(19) United States
(12) Patent Application Publication
(10) Pub. No.: US 2024/0318172 A1
(43) Pub. Date: Sep. 26, 2024

(54) PRODUCTS AND METHODS FOR INHIBITION OF EXPRESSION OF PERIPHERAL MYELIN PROTEIN-22

(71) Applicants: RESEARCH INSTITUTE AT NATIONWIDE CHILDREN'S HOSPITAL, Columbus, OH (US); The Cyprus Foundation for Muscular Dystrophy Research D/B/A The Cyprus Institute of Neurology..., Agios Dometios (CY)

(72) Inventors: Scott Quenton Harper, Powell, OH (US); Kleopas Kleopa, Agios Dometios (CY); Marina Stavrou, Agios Dometios (CY)

(21) Appl. No.: 18/038,900

(22) PCT Filed: Nov. 30, 2021
(86) PCT No.: PCT/US21/61177

§ 371 Date: May 25, 2023

Related U.S. Application Data
(60) Provisional application No. 63/120,190, filed on Dec. 1, 2020.

(51) Int. Cl. C12N 15/113; A61K 31/7088; A61K 48/00; A61P 21/00; C12N 15/86

(52) U.S. Cl. CPC C12N 15/113; A61K 31/7088; A61K 48/005; A61P 21/00; C12N 15/86; C12N 2310/11; C12N 2310/141; C12N 2750/14143

(57) ABSTRACT

RNA interference-based methods and products for inhibiting the expression of a peripheral myelin protein-22 gene are provided. RNAs that inhibit the peripheral myelin protein-22 gene are provided as well as DMAs encoding the RNAs. Delivery vehicles such as recombinant adeno-associated viruses deliver DMAs encoding RNAs that inhibit the peripheral myelin protein-22 gene. The methods treat Charcot-Marie-Tooth Disease such as Charcot-Marie-Tooth Disease Type 1 A (CMT1A).

### FIELD

[0001] RNA interference-based methods and products for inhibiting the expression of a peripheral myelin protein-22 gene are provided. RNAs that inhibit the peripheral myelin protein-22 gene are provided as well as DNAs encoding the RNAs. Delivery vehicles such as recombinant adeno-associated viruses deliver DNAs encoding RNAs that inhibit the peripheral myelin protein-22 gene. The methods treat Charcot-Marie-Tooth Disease such as Charcot-Marie-Tooth Disease Type 1A (CMT1A).

### INCORPORATION BY REFERENCE OF THE SEQUENCE LISTING

[0002] This application contains, as a separate part of disclosure, a Sequence Listing in computer-readable form (Filename: 56204_SeqListing.txt; 6,159,677 bytes-ASCII text file dated Nov. 30, 2021) which is incorporated by reference herein in its entirety.

### BACKGROUND

[0003] Charcot-Marie-Tooth disease (CMT) refers to a heterogeneous group of hereditary peripheral neuropathies that affect 1 in 2500 people. The most common type, CMT Type 1, is a demyelinating peripheral neuropathy. The CMT Type 1 subtype that affects more than 50% of all CMT cases and about 70-80% of CMT Type 1 cases is autosomal dominant demyelinating CMT neuropathy type 1A [CMT1A (MIM 118220)].

[0004] CMT1A is most frequently caused by a dominantly inherited 1.4 Mb tandem intra-chromosomal duplication on chromosome 17p11.2-p12. The duplication results in three copies of the peripheral myelin protein-22 (PMP22) gene which are translated into PMP22 protein [Timmerman et al., Nature Genetics, 1(3): 171-175 (1992) and Valentijn et al., Nature Genetics, 1(3): 166-170 (1992)]. In some cases, point mutations in PMP22 may also lead to dominant CMT1A and generally present with the most severe phenotype [Matsunami et al., Nature Genetics, 1(3):176-179 (1992), Patel et al., Nature Genetics, 1(3): 159-165 (1992), Timmerman et al., supra]. Patients with CMT1A develop slowly progressive distal muscle weakness and atrophy, sensory loss, and absent reflexes with a typical onset at adolescence. CMT1A shows high variability in disease severity even within the same family. Sensory responses are usually absent while motor nerve conduction velocities (MNCVs) are slowed, ranging from 5 to 35 m/s in the forearm, but most average around 20 m/s, with uniform and symmetric findings in different nerves. Although MNCVs do not change significantly over decades, motor amplitudes and the number of motor units decrease slowly, reflecting axonal loss, which correlates with clinical disability.

[0005] The PMP22 protein is a 22-kDa intrinsic tetraspan glycoprotein primarily produced by myelinating Schwann cells (SCs) during development and makes 2-5% of peripheral nervous system (PNS) compact myelin. This protein is crucial for SC growth and differentiation, myelogenesis, myelin thickness and in the maintenance of PNS axons and myelin. PMP22 is also involved in the linkage of cytoskeletal actin with the plasma membrane, serving as a regulator of cholesterol content in lipid rafts. Despite the fact that PMP22 mRNA is expressed in almost every tissue, PMP22 protein is only found in myelinating SCs, suggesting a tissue specific post-transcriptional regulation of PMP22 mRNA [Maier et al., Mol. Cell. Neuroscience, 24(3): 803-817 (2003) and Roux et al., J. Comp. Neurol., 474(4): 578-588 (2004)].

[0006] The 5′-UTR of the PMP22 gene includes two known promoters, P1 and P2. Their respective transcripts differ only at their 5′ non-coding region [Bosse et al., J. Neuroscience Res., 37(4): 529-537 (1994) and Suter et al., J. Biol. Chem., 269(41): 25795-25808 (1994)] but result in six splice variants which exhibit a tissue-specific expression pattern [Visigalli et al., Hum. Mut., 37(1): 98-109 (2015)]. PMP22 regulation is achieved through its intronic regions and enhancer elements within them [Jones et al., Hum. Mol. Genet., 21(7): 1581-1591 (2012); Srinivasan et al., Nuc. Acids Res., 40(14): 6449-6460 (2012); and Pantera et al., Hum. Mol. Genet., 27(16): 2830-2839 (2018)]. P1 promoter transcripts are SC-specific, while the P2 promoter transcripts are expressed in non-PNS tissues. Therefore, duplication of the PMP22 gene or of its key transcriptional binding sites shifts the ratio of splicing isoforms and alters methylation, microRNA binding and post-translational modification sites [Verrier et al., Glia, 57(12): 1265-1279 (2009) and Lee et al., Exp. Neurobiology, 28(2): 279-288 (2019)]. In normal myelinating and non-myelinating SCs, approximately 20% of the newly synthesized PMP22 is glycosylated while the remaining ˜80% is targeted for proteasomal endoplasmic reticulum (ER)-associated degradation (ERAD).

[0007] CMT1A is thought to depend on gene dosage effects of PMP22 because CMT1A patients have increased PMP22 mRNA [Yoshikawa et al., Ann. Neurol., 35(4): 445-450 (1994)] and protein [Gabriel et al., Neurology, 49(6): 1635-1640 (2015)] levels in their sural nerve biopsies. Individuals who carry a combination of one deleted and one duplicated PMP22 allele do not present CMT1A-like phenotype as they have a balanced gene dosage. Some CMT1A phenotypes may also result from a different size or type of duplication on chromosome 17p that affects PMP22 expression [Pantera, supra]. CMT1A patients with 1.4 Mb duplication may have variable PMP22 levels in skin biopsies not necessarily correlating with disease severity [Nobbio et al., Brain, 137(Pt 6): 1614-1620 (2014) and Katona et al., Brain, 132(Pt 7): 1734-1740 (2014)]. Nevertheless, supporting the PMP22 gene dosage effect as the driving mechanism of CMT1A, rodent models overexpressing PMP22 reproduced a CMT1A-like phenotype [Sereda et al., Neuron, 16(5): 1049-60 (1996); Huxley et al., Hum. Mol. Genet., 5(5): 563-569 (1996); Huxley et al., Hum. Mol. Genet., 7(3): 449-458 (1998); Magyar et al., J. Neuroscience, 16(17): 5351-5360 (1996); Perea et al., Hum. Mol. Genet., 10(10): p. 1007-1018 (2001); Robaglia-Schlupp et al., Brain, 125(Pt 10): 2213-2221 (2002); and Robertson et al., J. Anat., 200(4): 377-390 (2002)], which was ameliorated after interrupting PMP22 overexpression [Fledrich et al., Nat. Med., 20(9): 1055-1061 (2014); Lee, supra; Perea, supra; Sereda et al., Nat. Med., 9(12): 1533-1537 (2003); Passage et al., Nat. Med., 10(4): 396-401 (2004); Meyer et al., Ann. Neurology, 61(1): 61-72 (2007); Chumakov et al., Orphanet Journal of Rare Diseases, 9(1): 201 (2014); Lee et al., Neurobiology of Disease, 100: 99-107 (2017); Zhao et al., J. Clin. Invest., 128(1): 359-368 (2018); Prukop et al., PLoS One, 14(1): e0209752 (2019); and Lee et al., Nuc. Acids Res., 48(1): 130-140 (2020)].

[0008] Overexpressed PMP22 has been shown to saturate the proteasomal capacity for degradation, leading to perinuclear or cytoplasmic PMP22 accumulation, decreased overall proteasomal activity, and ER stress. PMP22 is also involved in early steps of myelinogenesis, in the determination of myelin thickness and maintenance. PMP22 duplication destabilizes the architecture, protein stoichiometry and function of the myelin sheath and SC, leading to demyelination, remyelination, the characteristic onion bulb formation and SC apoptosis. As a consequence, impairment in SC-axon interactions and dysfunctional neurofilament structure result in higher packing density and less phosphorylation of neurofilaments accompanied by slower axonal transport and myelination rates.

[0009] Current treatments for CMT1A remain geared toward general symptom management in the form of physical therapy or corrective surgery.

[0010] There thus exists a need in the art for products and methods for treatment of CMT1A.

### SUMMARY

[0011] The disclosure herein provides methods to specifically induce silencing of overexpressed PMP22 by RNA interference (RNAi) using vectors expressing artificial inhibitory RNAs targeting the PMP22 mRNA. The artificial inhibitory RNAs contemplated include, but are not limited to, small interfering RNAs (siRNAs) (also referred to as short interfering RNAs, small inhibitory RNAs or short inhibitory RNAs), short hairpin RNAs (shRNAs) and miRNA shuttles (artificial miRNAs) that inhibit expression of the PMP22 gene. The artificial inhibitory RNAs are referred to as miPMP22s herein. The miPMP22s are small regulatory sequences that act post-transcriptionally by targeting, for example, the 3′UTR of PMP22 mRNA in a reverse complementary manner resulting in reduced PMP22 mRNA and protein levels. Use of the methods and products is indicated, for example, in preventing or treating CMT1A.

[0012] PMP22 inhibitory RNAs are provided as well as polynucleotides encoding one or more of the miPMP22s. The disclosure provides nucleic acids comprising RNA-encoding template nucleotide sequences comprising at least about 70%, 75%, 80%, 81%, 82%, 83%, 84%, 85%, 86%, 87%, 88%, 89%, 90%, 91%, 92%, 93%, 94%, 95%, 96%, 97%, 98%, 99% or 100% identity to the sequence set forth in any one of SEQ ID NOs: 1-8.

[0013] Exemplary miPMP22s comprise the full length sequences set out in any one of SEQ ID NOs: 9-16 or variants thereof comprising at least about 70%, 75%, 80%, 81%, 82%, 83%, 84%, 85%, 86%, 87%, 88%, 89%, 90%, 91%, 92%, 93%, 94%, 95%, 96%, 97%, 98%, 99% identity to the sequence set forth in any one of SEQ ID NOs: 9-16. Corresponding final processed antisense guide strand sequences are respectively set out in SEQ ID NOs: 17-24, or are variants thereof comprising at least about 70%, 75%, 80%, 81%, 82%, 83%, 84%, 85%, 86%, 87%, 88%, 89%, 90%, 91%, 92%, 93%, 94%, 95%, 96%, 97%, 98%, 99% identity to the sequence set forth in any one of SEQ ID NOs: 17-24. The processed antisense guide strand is the strand of the mature miRNA duplex that becomes the RNA component of the RNA induced silencing complex ultimately responsible for sequence-specific gene silencing. The disclosure additionally provides the antisense guide strands set out in FIG. 48 and contemplates variants of each of those antisense guide strands that are at least about 70%, 75%, 80%, 81%, 82%, 83%, 84%, 85%, 86%, 87%, 88%, 89%, 90%, 91%, 92%, 93%, 94%, 95%, 96%, 97%, 98%, 99% identical. The disclosure additionally provides the antisense guide strands set out in FIG. 50 and contemplates variants of each of those antisense guide strands that are at least about 70%, 75%, 80%, 81%, 82%, 83%, 84%, 85%, 86%, 87%, 88%, 89%, 90%, 91%, 92%, 93%, 94%, 95%, 96%, 97%, 98%, 99% identical.

[0014] miPMP22s can specifically bind to a segment of a messenger RNA (mRNA) encoded by a human PMP22 gene (represented by SEQ ID NO: 25 which is a human PMP22 cDNA), wherein the segment conserved relative to mRNA encoded by the wild-type mouse PMP22 gene (represented by SEQ ID NO: 27 which is a mouse PMP22 cDNA). For example, a miPMP22 can specifically bind a mRNA segment that is complementary to a sequence within nucleotides 1-2423 of SEQ ID NO: 25. More particularly, a miPMP22 can specifically bind a mRNA segment that is complementary to a sequence within nucleotides 1412-1433 of SEQ ID NO: 25 (the nucleotides bound by, for example, miPMP22-868) or 1415-1436 of SEQ ID NO: 25 (the nucleotides bound by, for example, miPMP22-871).

[0015] Delivery of DNA encoding miPMP22s can be achieved using a delivery vehicle that delivers the DNA(s) to a Schwann cell. For example, recombinant AAV (rAAV) vectors can be used to deliver DNA encoding miPMP22s. Other vectors (for example, other viral vectors such as lentivirus, adenovirus, retrovirus, equine-associated virus, alphavirus, pox viruses, herpes virus, polio virus, sindbis virus and vaccinia viruses) can also be used to deliver polynucleotides encoding miPMP22s. Thus, also provided are viral vectors encoding one or more miPMP22s. When the viral vector is a rAAV, the rAAV lack AAV rep and cap genes. The rAAV can be self-complementary (sc) AAV. As another example, non-viral vectors such as lipid nanoparticles can be used for delivery.

[0016] Provided herein are rAAV, each encoding a miPMP22. Also provided are rAAV encoding one or more miPMP22s. A rAAV (with a single-stranded genome, scAAV) encoding one or more miPMP22s can encode one, two, three, four, five, six, seven or eight miPMP22s. A scAAV encoding one or more miPMP22s can encode one, two, three or four miPMP22s.

[0017] Compositions are provided comprising the nucleic acids or viral vectors described herein.

[0018] Further provided are methods of preventing or inhibiting expression of the PMP22 gene in a cell comprising contacting the cell with a delivery vehicle (such as rAAV) encoding a miPMP22 wherein, if the delivery vehicle is rAAV, the rAAV lacks rep and cap genes. In the methods, expression of the duplicated and/or mutant PMP22 allele is inhibited by at least 10, at least 20, at least 30, at least 40, at least 50, at least 60, at least 70, at least 80, at least 90, at least 95, at least 98 percent, at least 99 percent, or 100 percent. In the methods, expression of the wild-type PMP22 allele is inhibited by at least 10, at least 20, at least 30, at least 40, at least 50, at least 60, at least 70, at least 80, at least 90, at least 95, at least 98 percent, at least 99 percent, or 100 percent.

[0019] Still further provided are methods of delivering DNA encoding a miPMP22 to an subject in need thereof, comprising administering to the subject a delivery vehicle (such as rAAV) comprising DNA encoding the miPMP22 wherein, if the delivery vehicle is rAAV, the rAAV lacks rep and cap genes. Other methods of delivering DNA encoding the miPMP22 to an subject in need thereof, comprise administering to the subject a delivery vehicle (such as rAAV) comprising DNA encoding one or more miPMP22 wherein, if the delivery vehicle is rAAV, the rAAV lacks rep and cap genes.

[0020] Methods are also provided of preventing or treating CMT1A comprising administering a delivery vehicle (such as rAAV) comprising DNA encoding a miPMP22 wherein, if the delivery vehicle is rAAV, the rAAV lacks rep and cap genes. Other methods of preventing or treating CMT1A comprise administering a delivery vehicle (such as rAAV) comprising DNA encoding one or more miPMP22 wherein, if the delivery vehicle is rAAV, the rAAV lacks rep and cap genes. The methods result in restoration of PMP22 expression to at least 25 percent, at least 30, at least 40, at least 50, at least 60, at least 70, at least 80, at least 90, at least 95, at least 98 percent, at least 99 percent, or 100 percent or more, of normal PMP22 expression in an unaffected subject.

[0021] The disclosure provides a delivery vehicle that is a viral vector comprising the nucleic acids described herein and/or a combination of any one or more thereof. Viral vectors provided include, but are not limited to an adeno-associated virus (AAV), adenovirus, lentivirus, retrovirus, poxvirus, baculovirus, herpes simplex virus, vaccinia virus, or a synthetic virus. The viral vector can be an AAV. The AAV lacks rep and cap genes. The AAV can be a recombinant AAV (rAAV) or a self-complementary recombinant AAV (scAAV). The AAV is, for example, AAV-1, AAV-2, AAV-3, AAV-4, AAV-5, AAV-6, AAV-7, AAV-8, AAV-9, AAV-10, AAV-11, AAV-12, AAV-13, AAV-anc80, or AAV rh.74. The AAV can be AAV-9. The AAV can be a pseudotyped AAV, for example, an AAV2/8 or AAV2/9.

[0022] The disclosure provides a composition comprising the nucleic acids described herein and a pharmaceutically acceptable carrier. The disclosure provides a composition comprising a viral vector comprising the nucleic acids described herein, and/or a combination of any one or more thereof and a pharmaceutically acceptable carrier.

[0023] The disclosure provides a composition comprising a delivery vehicle capable of delivering agents to a Schwann cell a nucleic acid encoding a miPMP22, wherein the miPMP22 binds a segment of a mRNA encoded by a human PMP22 gene (wherein the segment either does or does not encode sequence comprising a mutation associated with CMT1A); wherein the segment is conserved relative to the wild-type mouse PMP22 gene, and, optionally, a pharmaceutically acceptable carrier. The human PMP22 gene can comprise the sequence of SEQ ID NO: 25, or a variant thereof comprising at least about 70%, 75%, 80%, 81%, 82%, 83%, 84%, 85%, 86%, 87%, 88%, 89%, 90%, 91%, 92%, 93%, 94%, 95%, 96%, 97%, 98%, or 99%, identity. The mouse PMP22 gene can comprise the sequence of SEQ ID NO: 27, or a variant thereof comprising at least about 70%, 75%, 80%, 81%, 82%, 83%, 84%, 85%, 86%, 87%, 88%, 89%, 90%, 91%, 92%, 93%, 94%, 95%, 96%, 97%, 98%, or 99%, identity. A miPMP22 specifically binds, for example, a mRNA segment that is complementary to a sequence within nucleotides 1412-1433 of SEQ ID NO: 25 (the nucleotides bound by, for example, miPMP22-868) or 1415-1436 of SEQ ID NO: 25 (the nucleotides bound by, for example, miPMP22-871).

[0024] The disclosure provides a delivery vehicle in the compositions that is a viral vector. The viral vector in the compositions can be, for example, an adeno-associated virus (AAV), adenovirus, lentivirus, retrovirus, poxvirus, baculovirus, herpes simplex virus, vaccinia virus, or a synthetic virus. The viral vector can be an AAV. The AAV lacks rep and cap genes. The AAV can be a recombinant AAV (rAAV) or a self-complementary recombinant AAV (scAAV). The AAV is or has a capsid serotype selected from, for example, AAV-1, AAV-2, AAV-3, AAV-4, AAV-5, AAV-6, AAV-7, AAV-8, AAV-9, AAV-10, AAV-11, AAV-12, AAV-13, AAV-anc80, and AAV rh.74. The AAV can be or can have a capsid serotype of AAV-9. The AAV can be a pseudotyped AAV, such as AAV2/8 or AAV2/9.

[0025] The disclosure provides methods of delivering to a Schwann cell comprising a duplicated and/or mutant PMP22 gene: (a) a nucleic acid comprising a template nucleic acid encoding a miPMP22 comprising at least about 70%, 75%, 80%, 81%, 82%, 83%, 84%, 85%, 86%, 87%, 88%, 89%, 90%, 91%, 92%, 93%, 94%, 95%, 96%, 97%, 98%, 99%, or 100% identity to the polynucleotide sequence set forth in any one of SEQ ID NOs: 1-8; a nucleic acid encoding the full length miPMP22 sequences set out in any one of SEQ ID NOs: 9-16 or variants thereof comprising at least about 70%, 75%, 80%, 81%, 82%, 83%, 84%, 85%, 86%, 87%, 88%, 89%, 90%, 91%, 92%, 93%, 94%, 95%, 96%, 97%, 98%, 99% identity to the sequence set forth in any one of SEQ ID NOs: 9-16; a nucleic acid encoding a miPMP22 processed antisense guide strand comprising at least about 70%, 75%, 80%, 81%, 82%, 83%, 84%, 85%, 86%, 87%, 88%, 89%, 90%, 91%, 92%, 93%, 94%, 95%, 96%, 97%, 98%, 99%, or 100% identity to the polynucleotide sequence set forth in any one of SEQ ID NOs: 17-24; a nucleic acid encoding one or more antisense guide strands set out in FIG. 48, or a variant of an antisense guide strand in FIG. 48 that is at least about 70%, 75%, 80%, 81%, 82%, 83%, 84%, 85%, 86%, 87%, 88%, 89%, 90%, 91%, 92%, 93%, 94%, 95%, 96%, 97%, 98%, 99% identical; or a nucleic acid encoding one or more antisense guide strands set out in FIG. 50, or a variant of an antisense guide strand in FIG. 50 that is at least about 70%, 75%, 80%, 81%, 82%, 83%, 84%, 85%, 86%, 87%, 88%, 89%, 90%, 91%, 92%, 93%, 94%, 95%, 96%, 97%, 98%, 99% identical; (b) a vector comprising any one or more of the nucleic acids described herein; or (c) a composition comprising any one or more of the nucleic acids or vectors described herein.

[0026] The disclosure provides a method of treating a subject suffering from a duplicated and/or mutant PMP22 gene, the method comprising administering to the subject(a) a nucleic acid comprising a template nucleic acid encoding a miPMP22 comprising at least about 70%, 75%, 80%, 81%, 82%, 83%, 84%, 85%, 86%, 87%, 88%, 89%, 90%, 91%, 92%, 93%, 94%, 95%, 96%, 97%, 98%, 99%, or 100% identity to the polynucleotide sequence set forth in any one of SEQ ID NOs: 1-8; a nucleic acid encoding the full length miPMP22 sequences set out in any one of SEQ ID NOs: 9-16 or variants thereof comprising at least about 70%, 75%, 80%, 81%, 82%, 83%, 84%, 85%, 86%, 87%, 88%, 89%, 90%, 91%, 92%, 93%, 94%, 95%, 96%, 97%, 98%, 99% identity to the sequence set forth in any one of SEQ ID NOs: 9-16; a nucleic acid encoding a miPMP22 processed antisense guide strand comprising at least about 70%, 75%, 80%, 81%, 82%, 83%, 84%, 85%, 86%, 87%, 88%, 89%, 90%, 91%, 92%, 93%, 94%, 95%, 96%, 97%, 98%, 99%, or 100% identity to the polynucleotide sequence set forth in any one of SEQ ID NOs: 17-24; a nucleic acid encoding one or more antisense guide strands set out in FIG. 48, or a variant of an antisense guide strand in FIG. 48 that is at least about 70%, 75%, 80%, 81%, 82%, 83%, 84%, 85%, 86%, 87%, 88%, 89%, 90%, 91%, 92%, 93%, 94%, 95%, 96%, 97%, 98%, 99% identical; or a nucleic acid encoding one or more antisense guide strands set out in FIG. 50, or a variant of an antisense guide strand in FIG. 50 that is at least about 70%, 75%, 80%, 81%, 82%, 83%, 84%, 85%, 86%, 87%, 88%, 89%, 90%, 91%, 92%, 93%, 94%, 95%, 96%, 97%, 98%, 99% identical; (b) a vector comprising any one or more of the nucleic acids described herein; or (c) a composition comprising any one or more of the nucleic acids or vectors described herein.

[0027] The disclosure contemplates the subject treated by methods herein suffers from CMT1A. The disclosure also contemplates treatment of a subject that is at risk for CMT1A due to a duplication or mutation of the PMP22 gene. The subject can be a mammalian animal. The subject can be a human subject.

[0028] The disclosure also provides uses of at least one nucleic acid as described herein, at least one viral vector as described herein, or a composition as described herein in making a medicament for, or in treating a subject suffering from, a duplicated and/or mutant PMP22 gene.

[0029] The disclosure also provides uses of at least one nucleic acid as described herein, at least one viral vector as described herein, or a composition as described herein in making a medicament for or in treating CMT1A in a subject in need thereof.

[0030] Other features and advantages of the disclosure will be apparent from the following description of the drawing and the detailed description. It should be understood, however, that the drawing, detailed description, and the examples, while indicating embodiments of the disclosed subject matter, are given by way of illustration only, because various changes and modifications within the spirit and scope of the disclosure will become apparent from the drawing, detailed description, and the examples.

### BRIEF DESCRIPTION OF THE DRAWINGS

[0031] This patent or application file contains at least one drawing executed in color. Copies of this patent or patent application publication with color drawing(s) will be provided by the United States Patent and Trademark Office upon request and payment of the necessary fee.

[0032] FIG. 1 shows an example of an artificial miRNA shuttle sequence to demonstrate folding and processing sites. The mature guide strand is underlined. Grey arrowheads indicate Drosha cut sites; black arrowheads indicate Dicer cut sites. Shaded sequences at extreme 5′ and 3′ ends are restriction sites in the template DNA used to clone the miRNA shuttles in front of the U6 promoter.

[0033] FIG. 2 shows a human PMP22 full length cDNA sequence (SEQ ID NO: 25) in which alternating shading shows exon boundaries (5 exons) and the underlined sequence is the longest human PMP22 protein coding open reading frame (ORF).

[0034] FIG. 3 shows the human PMP22 full-length ORF sequence with a translated PMP22 protein sequence (SEQ ID NO: 26).

[0035] FIG. 4 shows a mouse PMP22 cDNA sequence (SEQ ID NO: 27) in which alternating shading shows exon boundaries (5 exons).

[0036] FIG. 5A-B shows the human PMP22 cDNA with miPMP22 binding sites. All miPMP22 target sequences are located in Exon 5 (in the 3′ UTR region). Underlined sequence is the PMP22 full-length open reading frame.

[0037] FIG. 6 shows the full-length miPMP22-868 sequence (SEQ ID NO: 9).

[0038] FIG. 7 shows binding interactions of miPMP22-868 and miPMP22-871 with mouse and human PMP22.

[0039] FIG. 8 shows the full-length miPMP22-871 sequence (SEQ ID NO: 10).

[0040] FIG. 9 shows the full-length miPMP22-869 sequence (SEQ ID NO: 11).

[0041] FIG. 10 shows the full-length miPMP22-872 sequence (SEQ ID NO: 12).

[0042] FIG. 11 shows the full-length miPMP22-1706 sequence (SEQ ID NO: 13).

[0043] FIG. 12 shows the full-length miPMP22-1740 sequence (SEQ ID NO: 14).

[0044] FIG. 13 shows the full-length miPMP22-1741 sequence (SEQ ID NO: 15).

[0045] FIG. 14 shows the full-length miPMP22-1834 sequence (SEQ ID NO: 16).

[0046] FIG. 15A-D shows qPCR results of in vitro testing of PMP22 knockdown by miPMP22s.

[0047] FIG. 16A-D shows in vivo expression of AAV9 in lumbar roots of adult mice. Representative images of lumbar root sections of a non-injected mouse (A) and of mice 4 and 8 weeks after lumbar intrathecal injection of AAV9-U6-miRLacZ-CMV-EGFP (B-C). Sections were immunostained for eGFP (red) indicating cells expressing the reporter gene along with miRLacZ. eGFP was also auto-fluorescent (green). Cell nuclei were stained with DAPI (blue). Arrow heads reveal examples of perinuclear eGFP immunoreactivity in SCs. Quantification of the percentage of eGFP positive cells is shown in D (Mean, SD). Data were compared using the Student t-test, p<0.0001. Averages: 4 weeks 45.95, 8 weeks 56.82.

[0048] FIG. 17A-D shows in vivo expression of AAV9 in sciatic nerves of adult mice. Representative images of sciatic nerve sections (A-C) and sciatic nerve teased fibers (E-G) of a non-injected mouse (A,E) and of mice 4 (B,F) and 8 (C,G) weeks after lumbar intrathecal injection with AAV9-U6-miRLacZ-CMV-EGFP (B-C). Sections were immunostained for eGFP (red) indicating cell expressing the reporter gene along with miRLacZ. eGFP was also auto-fluorescent (green). Cell nuclei were stained with DAPI (blue). Arrow heads reveal examples of perinuclear eGFP immunoreactivity in SCs. Quantification of the percentage of eGFP positive cells is shown in D (Mean, SD). Data were compared using the Student t-test, p=0.0460. Averages: 4 weeks 42.07, 8 weeks 45.74.

[0049] FIG. 18A-D shows in vivo expression of AAV9 in femoral nerves of adult mice. Representative images of teased femoral nerve fibers of a non-injected mouse (A) and of mice 4 and 8 weeks after lumbar intrathecal injection with AAV9 expressing AAV9-U6-miRLacZ-CMV-EGFP (B-C). Fibers were immunostained for eGFP (red) indicating cell expressing the reporter gene along with miRLacZ. eGFP was also auto-fluorescent (green). Cell nuclei were stained with DAPI (blue). Arrow heads reveal examples of perinuclear eGFP immunoreactivity in SCs. Quantification of the percentage of eGFP positive cells is shown in D (Mean, SD). Data were compared using the Student t-test, p=0.0336. Averages: 4 weeks 31.17, 8 weeks 41.09.

[0050] FIG. 19A-F shows immunoblot and VGCN analysis of AAV9-miLacZ eGFP reporter gene expression. Representative images of immunoblot analysis of eGFP expression levels 4 and 8 weeks post intrathecal lumbar injection in lumbar root (A) and sciatic nerve (D) lysates with AAV9 expressing miRLacZ along with the EGFP reporter gene. Tissue samples from C61-Het non-injected mice were used as a negative control. Tubulin blot was used as loading control. For the quantification, eGFP to tubulin optic density ratio was calculated (Mean, SD). Data were compared using the Student t-test, p=0.0272 (B, E). AAV9-miLacZ VGCN in lumbar roots (C) and sciatic nerves (F) were calculated at 4 and 8 weeks after intrathecal lumbar injection. VGCN data were compared using the Student t-test and no statistical significance was found between the two time points (Mean, SD). Averages: Western blot roots: 4 weeks 0.92, 8 weeks 0.99; Western blot sciatic nerve: 4 weeks 0.48, 8 weeks 0.81; VCN roots: 4 weeks 3.24, 8 weeks 1.09; VCN sciatic nerve: 4 weeks 0.41, 8 weeks 0.38.

[0051] FIG. 20A-F shows results of in vivo testing of AAV9-miR871 effects in hu/mu PMP22 and other myelin-related genes in the lumbar spinal roots of CMT1A mouse model. Real Time PCR analysis of hu/mu PMP22 and other myelin-related genes expression in C61 Het mice six weeks after injection with AAV9-miR871 relative to AAV9-miRLacZ (non-targeting control) vector injected littermates (presented as baseline). For all above transcripts expression analysis muGAPDH was used as a housekeeping gene to normalize for loading and relative change was determined using the 2-ΔΔCT method (Mean, SD).

[0052] FIG. 21A-F shows results of in vivo testing of AAV9-miR871 effects in hu/mu PMP22 and other myelin-related genes in the sciatic nerves of CMT1A mouse model. Real Time PCR analysis of hu/mu PMP22 and other myelin-related genes expression in C61 Het mice six weeks after injection with AAV9-miR871 relative to AAV9-miRLacZ (non-targeting control) vector injected littermates (presented as baseline). For all above transcripts expression analysis muGAPDH was used as a housekeeping gene to normalize for loading and relative change was determined using the 2-ΔΔCT method (Mean, SD).

[0053] FIG. 22A-F shows results of in vivo testing of AAV9-miR871 effects in hu/mu PMP22 and other myelin-related genes in the femoral nerves of CMT1A mouse model. Real Time PCR analysis of hu/mu PMP22 and other myelin-related genes expression in C61 Het mice six weeks after injection with AAV9-miR871 relative to AAV9-miRLacZ (non-targeting control) vector injected littermates (presented as baseline). For all above transcripts expression analysis muGAPDH was used as a housekeeping gene to normalize for loading and relative change was determined using the 2-ΔΔCT method (Mean, SD).

[0054] FIG. 23A-F shows results of in vivo testing of AAV9-miR868 effects in hu/mu PMP22 and other myelin-related genes in the lumbar spinal roots of CMT1A mouse model. Real Time PCR analysis of hu/mu PMP22 and other myelin-related genes expression in C61 Het mice six weeks after injection with AAV9-miR871 relative to AAV9-miRLacZ (non-targeting control) vector injected littermates (presented as baseline). For all above transcripts expression analysis muGAPDH was used as a housekeeping gene to normalize for loading and relative change was determined using the 2-ΔΔCT method (Mean, SD).

[0055] FIG. 24A-F shows results of in vivo testing of AAV9-miR868 effects in hu/mu PMP22 and other myelin-related genes in the sciatic nerves of CMT1A mouse model. Real Time PCR analysis of hu/mu PMP22 and other myelin-related genes expression in C61 Het mice six weeks after injection with AAV9-miR871 relative to AAV9-miRLacZ (non-targeting control) vector injected littermates (presented as baseline). For all above transcripts expression analysis muGAPDH was used as a housekeeping gene to normalize for loading and relative change was determined using the 2-ΔΔCT method (Mean, SD).

[0056] FIG. 25A-F shows results of in vivo testing of AAV9-miR868 effects in hu/mu PMP22 and other myelin-related genes in the femoral nerves of CMT1A mouse model. Real Time PCR analysis of hu/mu PMP22 and other myelin-related genes expression in C61 Het mice six weeks after injection with AAV9-miR871 relative to AAV9-miRLacZ (non-targeting control) vector injected littermates (presented as baseline). For all above transcripts expression analysis muGAPDH was used as a housekeeping gene to normalize for loading and relative change was determined using the 2-ΔΔCT method (Mean, SD).

[0057] FIG. 26A-D shows results of in vivo testing of AAV9-miR871 effects on HuPMP22 and MPZ proteins in the lumbar roots of a CMT1A mouse model. Immunoblot analysis of HuPMP22 (A) expression levels in lumbar root lysates 6 weeks post lumbar intrathecal injection with AAV9 expressing miR871 or miRLacZ. Tissue samples from non-injected mice were used as a negative control. Tubulin blot and MPZ gel band were used as loading controls (B, C). MPZ expression was altered after treatment (D). For the quantification, HuPMP22 to tubulin, HuPMP22 to MPZ gel band and MPZ gel band to tubulin, optic density ratios were calculated (Mean, SD). Data were compared using the Student t-test.

[0058] FIG. 27A-D shows results of in vivo testing of AAV9-miR871 effects on HuPMP22 and MPZ proteins in the sciatic nerves of a CMT1A mouse model. Immunoblot analysis of HuPMP22 (A) expression levels in sciatic nerve lysates 6 weeks post lumbar intrathecal injection with AAV9 expressing miR871 or miRLacZ. Tissue samples from non-injected mice were used as a negative control. Tubulin blot and MPZ gel band were used as loading controls (B, C). MPZ expression was altered after treatment (D). For the quantification, HuPMP22 to tubulin, HuPMP22 to MPZ gel band and MPZ gel band to tubulin, optic density ratios were calculated (Mean, SD). Data were compared using the Student t-test.

[0059] FIG. 28A-D shows results of in vivo testing of AAV9-miR871 effects on HuPMP22 and MPZ proteins in the femoral nerves of a CMT1A mouse model. Immunoblot analysis of HuPMP22 (A) expression levels in femoral nerve lysates 6 weeks post lumbar intrathecal injection with AAV9 expressing miR871 or miRLacZ. Tissue samples from non-injected mice were used as a negative control. Tubulin blot and MPZ gel band were used as loading controls (B, C). MPZ expression was altered after treatment (D). For the quantification, HuPMP22 to tubulin, HuPMP22 to MPZ gel band and MPZ gel band to tubulin, optic density ratios were calculated (Mean, SD). Data were compared using the Student t-test.

[0060] FIG. 29 shows Early and Late Treatment trial design in the C61 Het mouse model of CMT1A. The early treatment trial design was also employed for WT mice, expressing only normal levels of murine PMP22.

[0061] FIG. 30A-B shows rotarod results at baseline and following early treatment at 5 rpm. A: AAV9-miR871 treated compared to AAV9-miRLacZ (mock) treated control mice, as indicated. Two months old non-injected WT and non-injected C61 Het mice showed no significant difference, while 4 and 6 months old WT mice performed better than their age-matched AAV9-miRLacZ treated C61 Het mice. At the age of 4 and 6 months (2 and 4 months post-injection) AAV9-miR871-treated C61 Het mice showed improved motor performance compared to the mock group, and did not differ significantly from WT mice of the same age (AAV9-miR871: n=16, AAV9-miRLacZ: n=16, 2 m C61 Het: n=32, 2-6 months old WT: n=10). B: Time course analysis demonstrates the improvement of AAV9-miR871 treated compared to mock treated C61 Het mice in rotarod 2 and 4 months post-injection (at 4 and 6 months of age). Values represent mean±SD. Data were compared using Mann-Whitney Test: 4 m WT vs. 4 m Het-miRLacZ: p=0.0017, 4 m Het-miRLacZ vs. 4 m Het-miR871: p=0.0003, 6 m WT vs. 6 m Het-miRLacZ: p=0.0003, 6 m Het-miRLacZ vs. 6 m Het-miR871: p<0.0001. Averages: 2 mWT: 594.12, 2 m Het: 549, 4 m WT: 596.1, 4 m Het-miRLacZ: 512.96, 4 m Het-miR871: 597.59, 6 m WT: 585.42, 6 m Het-miRLacZ: 390.43, 6 m Het-miR871: 584.96.

[0062] FIG. 31A-B shows rotarod results at baseline and following early treatment at 17.5 rpm: A: At baseline at the age of 2 months, before treatment, all C61 Het mice performed worse than WT mice. Likewise WT mice performed better than mock treated C61 Het mice at 4 and 6 months of age. At the age of 4 and 6 months AAV9-miR871-treated C61 Het mice showed improved motor performance compared to the control vector treated and reached the performance of WT mice (AAV9-miR871: n=16, AAV9-miRLacZ: n=16, 2 m C61 Het: n=32, 2-6 months old WT: n=10). B: Time course analysis demonstrates improved motor performance of AAV9-miR871 treated C61 Het mice in rotarod 2 and 4 months post-injection (at 4 and 6 months of age). Values represent mean±SD. Data were compared using Mann-Whitney Test: 2 m WT vs. 2 m Het-miRLacZ: p<0.0001, 4 m WT vs. 4 m Het-miRLacZ: p<0.0001, 4 m Het-miRLacZ vs. 4 m Het-miR871: p<0.0001, 4 m WT vs. 4 m Het-miR871: p<0.0001, 6 m WT vs. 6 m Het-miRLacZ: p<0.0001, 6 m Het-miRLacZ vs. 6 m Het-miR871: p<0.0001, 6 m WT vs. 6 m Het-miR871: p=0.0106. Averages: 2 mWT: 582.21, 2 m Het: 235.79, 4 m WT: 497.8, 4 m Het-miRLacZ: 172.93, 4 m Het-miR871: 504.09, 6 m WT: 416.16, 6 m Het-miRLacZ: 69.54, 6 m Het-miR871: 470.48.

[0063] FIG. 32A-B shows foot grip analysis at baseline and following early treatment: A: At baseline at the age of 2 months, before treatment, all C61 Het mice performed worse than non-injected WT mice. Likewise WT mice performed better than mock treated C61 Het mice at 4 and 6 months of age. At the age of 4 and 6 months AAV9-miR871-treated C61 Het mice showed improved grip strength performance compared to AAV9-miRLacZ treated control mice (AAV9-miR871: n=16, AAV9-miRLacZ: n=16, 2 m C61 Het: n=32, 2-6 months old WT: n=10). B:Time course analysis showed improved performance of AAV9-miR871 treated C61 Het mice in foot grip analysis 2 and 4 months post-injection (4 and 6 months of age). Values represent mean±SD. Data were compared using Mann-Whitney Test: 2 m WT vs. 2 m Het-miRLacZ: p<0.0001 4 m WT vs. 4 m Het-miRLacZ: p<0.0001, 4 m Het-miRLacZ vs. 4 m Het-miR871: p<0.0001, 4 m WT vs. 4 m Het-miR871: p<0.0001, 6 m WT vs. 6 m Het-miRLacZ: p<0.0001, 6 m Het-miRLacZ vs. 6 m Het-miR871: p<0.0001, 6 m WT vs. 6 m Het-miR871: p=0.0106. Averages: 2 mWT: 51.28, 2 m Het: 22.69, 4 m WT: 42.73, 4 m Het-miRLacZ: 17.80, 4 m Het-miR871: 29.53, 6 m WT: 36.81, 6 m Het-miRLacZ: 15.92, 6 m Het-miR871: 31.70.

[0064] FIG. 33A-B shows wire hang test analysis at baseline and following early treatment: A: At baseline at the age of 2 months, before treatment, all C61 Het mice performed worse than non-injected WT mice. Likewise WT mice performed better than mock treated C61 Het mice at 4 and 6 months of age. At the age of 4 and 6 months AAV9-miR871-treated C61 Het mice showed improved hang test performance compared to AAV9-miRLacZ treated control mice (AAV9-miR871: n=16, AAV9-miRLacZ: n=16, 2 m C61 Het: n=32, 2-6 months old WT: n=10). AAV9-miR871-treated mice at 4 months did not manage to reach WT performances, this is in contrast to 6-months old AAV9-miR871 treated mice that did not differ significantly to their age matched AAV9-miRLacZ treated B: Time course analysis showed improved performance of AAV9-miR871 treated C61 Het mice in hang test analysis 2 and 4 months post-injection (4 and 6 months of age). Values represent mean±SD. Data were compared using Mann-Whitney Test: 2 m WT vs. 2 m Het-miRLacZ: p<0.0001, 4 m WT vs. 4 m Het-miRLacZ: p<0.0001, 4 m Het-miRLacZ vs. 4 m Het-miR871: p<0.0001, 4 m WT vs. 4 m Het-miR871: p<0.0001, 6 m WT vs. 6 m Het-miRLacZ: p<0.0001, 6 m Het-miRLacZ vs. 6 m Het-miR871: p<0.0001, 6 m WT vs. 6 m Het-miR871: p=0.0106. Averages: 2 mWT: 593.70, 2 m Het: 306.96, 4 m WT: 527.28, 4 m Het-miRLacZ: 155.64, 4 m Het-miR871: 381.53, 6 m WT: 351.30, 6 m Het-miRLacZ: 130.81, 6 m Het-miR871: 371.65.

[0065] FIG. 34A-B shows rotarod results at baseline and following late treatment at 5 rpm. A: AAV9-miR871 treated compared to AAV9-miRLacZ (mock) treated control mice, as indicated. At all examined ages WT mice performed better than age-matched C61-Het or C61-Het AAV9-miRLacZ treated mice. At the age of 8 and 10 months (2 and 4 months post-injection) AAV9-miR871-treated C61 Het mice showed improved motor performance compared to the mock group, and did not differ significantly from WT mice of the same age (8 m AAV9-miR871: n=16, 8 m AAV9-miRLacZ: n=16, 10 m AAV9-miR871: n=10, 10 m AAV9-miRLacZ: n=8, 6 m C61 Het: n=32, 6-8 months old WT: n=10). B: Time course analysis demonstrates the improvement of AAV9-miR871 treated compared to mock treated C61 Het mice. Values represent mean±SD. Data were compared using Mann-Whitney Test: 6 m WT vs. 6 m Het-miRLacZ: p<0.0001, 8 m WT vs. 8 m Het-miRLacZ: p<0.0001, 8 m Het-miRLacZ vs. 8 m Het-miR871: p<0.0001, 10 m WT vs. 10 m Het-miRLacZ: p<0.0001, 10 m Het-miRLacZ vs. 10 m Het-miR871: p<0.0001. Averages: 6 mWT: 583.80, 6 m Het: 345.04, 8 m WT: 578.49, 8 m Het-miRLacZ: 221.93, 8 m Het-miR871: 566.01, 10 m WT: 584.20, 10 m Het-miRLacZ: 148.57, 10 m Het-miR871: 558.40.

[0066] FIG. 35A-B shows rotarod results at baseline and following late treatment at 17.5 rpm. A: AAV9-miR871 treated compared to AAV9-miRLacZ (mock) treated control mice, as indicated. At all examined ages WT mice performed better than age-matched C61-Het or C61-Het AAV9-miRLacZ treated mice. At the age of 8 and 10 months (2 and 4 months post-injection) AAV9-miR871-treated C61 Het mice showed improved motor performance compared to the mock group, and did not differ significantly from WT mice of the same age, with only exception being 8 m WT vs. 8 m Het-miR871 (8 m AAV9-miR871: n=16, 8 m AAV9-miRLacZ: n=16, 10 m AAV9-miR871: n=10, 10 m AAV9-miRLacZ: n=8, 6 m C61 Het: n=32, 6-8 months old WT: n=10). B: Time course analysis demonstrates the improvement of AAV9-miR871 treated compared to mock treated C61 Het mice. Values represent mean±SD. Data were compared using Mann-Whitney Test: 6 m WT vs. 6 m Het-miRLacZ: p<0.0001, 8 m WT vs. 8 m Het-miRLacZ: p<0.0001, 8 m Het-miRLacZ vs. 8 m Het-miR871: p<0.0001, 8 m WT vs. 8 m Het-miR871: p=0.0015, 10 m WT vs. 10 m Het-miRLacZ: p<0.0001, 10 m Het-miRLacZ vs. 10 m Het-miR871: p<0.0001. Averages: 6 mWT: 417.96, 6 m Het: 66.12, 8 m WT: 453.38, 8 m Het-miRLacZ: 19.24, 8 m Het-miR871: 293.95, 10 m WT: 328.96, 10 m Het-miRLacZ: 16.89, 10 m Het-miR871: 304.76.

[0067] FIG. 36A-B shows grip strength results at baseline and following late treatment. A: AAV9-miR871 treated compared to AAV9-miRLacZ (mock) treated control mice, as indicated. At all examined ages WT mice performed better than age-matched C61-Het or C61-Het AAV9-miRLacZ treated mice. At the age of 8 and 10 months (2 and 4 months post-injection) AAV9-miR871-treated C61 Het mice showed improved motor performance compared to the mock group, and did not differ significantly from WT mice of the same age (8 m AAV9-miR871: n=16, 8 m AAV9-miRLacZ: n=16, 10 m AAV9-miR871: n=10, 10 m AAV9-miRLacZ: n=8, 6 m C61 Het: n=32, 6-8 months old WT: n=10). B: Time course analysis demonstrates the improvement of AAV9-miR871 treated compared to mock treated C61 Het mice. Values represent mean±SD. Data were compared using Mann-Whitney Test: 6 m WT vs. 6 m Het-miRLacZ: p<0.0001, 8 m WT vs. 8 m Het-miRLacZ: p<0.0001, 8 m Het-miRLacZ vs. 8 m Het-miR871: p<0.0001, 10 m WT vs. 10 m Het-miRLacZ: p<0.0001, 10 m Het-miRLacZ vs. 10 m Het-miR871: p<0.0001. Averages: 6 mWT: 36.81, 6 m Het: 16.59, 8 m WT: 27.29, 8 m Het-miRLacZ: 16.20, 8 m Het-miR871: 26.82, 10 m WT: 25.62, 10 m Het-miRLacZ: 14.00, 10 m Het-miR871: 22.23.

[0068] FIG. 37A-B hang test results at baseline and following late treatment. A: AAV9-miR871 treated compared to AAV9-miRLacZ (mock) treated control mice, as indicated. At all examined ages WT mice performed better than age-matched C61-Het or C61-Het AAV9-miRLacZ treated mice. At the age of 8 and 10 months (2 and 4 months post-injection) AAV9-miR871-treated C61 Het mice showed improved motor performance compared to the mock group, and did not differ significantly from WT mice of the same age (8 m AAV9-miR871: n=16, 8 m AAV9-miRLacZ: n=16, 10 m AAV9-miR871: n=10, 10 m AAV9-miRLacZ: n=8, 6 m C61 Het: n=32, 6-8 months old WT: n=10). B: Time course analysis demonstrates the improvement of AAV9-miR871 treated compared to mock treated C61 Het mice. Values represent mean±SD. Data were compared using Mann-Whitney Test: 6 m WT vs. 6 m Het-miRLacZ: p<0.0001, 8 m WT vs. 8 m Het-miRLacZ: p<0.0001, 8 m Het-miRLacZ vs. 8 m Het-miR871: p=0.0004, 10 m WT vs. 10 m Het-miRLacZ: p=0.0062, 10 m WT vs. 10 m Het-miRLacZ: p=0.0338. Averages: 6 mWT: 351.30, 6 m Het: 55.23, 8 m WT: 238.40, 8 m Het-miRLacZ: 39.79, 8 m Het-miR871: 162.99, 10 m WT: 165.20, 10 m Het-miRLacZ: 70.90, 10 m Het-miR871: 127.54.

[0069] FIG. 38A-B shows physiological and phenotypical improvement in AAV9-miR871 early treated C61 Het mice. A: Motor nerve conduction velocity (MNCV) was improved in the 6-month old AAV9-miR871 treated C61 Het mice (n=8) compared to the AAV9-miRLacZ vector injected littermates (n=8) and approached the values of WT mice (n=6). Values represent mean±SD. Data were compared using the Mann-Whitney: 6 m WT vs. 6 m Het-miRLacZ: p=0.0003, 6 m Het-miRLacZ vs. 6 m Het-miR871: p<0.0001, 6 m WT vs. 6 m Het-miR871: p=0.1412. Averages: 6 m WT: 41.61, 6 m Het-miRLacZ: 25.90, 6 m Het-miR871: 36.88. B: Representative images of peripheral neuropathy phenotype evaluation of C61 Het mice early treatment group with either AAV9-miR871 or AAV9-miRLacZ. Six-month-old C61 Het AAV9-miRLacZ treated mice presented abnormal clenching of toes and clasping of hind limb phenotype upon suspension by the tail, suggestive of the presence of a peripheral nervous system defect. This phenotype is completely rescued in C61 Het AAV9-miR871 treated mice that present normal clenching without clasping of hind limbs.

[0070] FIG. 39A-B shows physiological and phenotypical improvement in AAV9-miR871 late treated C61 Het mice. A: Motor nerve conduction velocity (MNCV) was improved in the 6-month old AAV9-miR871 treated C61 Het mice (n=6) compared to the AAV9-miRLacZ vector injected littermates (n=5) and without though reaching the values of WT mice (n=4). Values represent mean±SD. Data were compared using the Mann-Whitney: 10 m WT vs. 10 m Het-miRLacZ: p=0.0079, 10 m Het-miRLacZ vs. 10 m Het-miR871: p=0.0040, 10 m WT vs. 10 m Het-miR871: p=0.0333. Averages: 6 m WT: 43.38, 6 m Het-miRLacZ: 24.12, 6 m Het-miR871: 37.69. B: Representative images of peripheral neuropathy phenotype evaluation of C61 Het mice late treatment group with either AAV9-miR871 or AAV9-miRLacZ. Ten-month-old C61 Het AAV9-miRLacZ treated mice presented abnormal clenching of toes and clasping of hind limb phenotype upon suspension by the tail, suggestive of the presence of a PNS defect. This phenotype is completely rescued in C61 Het AAV9-miR871 treated mice that present normal clenching without clasping of hind limbs.

[0071] FIG. 40A-D shows roots semithin sections of early treated CMT1A mouse model. Toluidine blue stained longitudinal (A,B) and transverse (C,D) semithin sections of lumbar motor spinal roots of C61 Het mice following early-treatment with either AAV9-miR871 or AAV9-miRLacZ vector. Representative images of semithin sections of anterior lumbar motor spinal roots attached to the spinal cord at low and higher (A-D) magnification. Thinly myelinated (t), demyelinated (*) fibers and onion bulb formations (o).

[0072] FIG. 41A-C shows quantification of the percentages of abnormally myelinated fibers in multiple early-treated roots (n=16 mice per group) confirms significant improvement in the numbers of abnormally myelinated fibers (A-B), as well as significant reduction in the numbers of onion bulb formations (C) in the fully treated compared with mock vector treated littermates. Values represent mean±SD. Data were compared using the Mann-Whitney. Averages: A: miRLacZ: 15.35, miR871: 11.74, B: miRLacZ: 49.74, miR871: 25.36, C: miRLacZ: 8.06, miR871: 0.69.

[0073] FIG. 42A-B shows femoral nerve semithin sections of early treated CMT1A mouse model. Toluidine blue stained semithin sections of femoral nerves of C61 Het mice following early-treatment with either AAV9-miR871 or AAV9-miRLacZ vector. Representative images of semithin sections of femoral nerve at low and higher (A-B) magnification. Thinly myelinated (t), demyelinated (*) fibers.

[0074] FIG. 43A-C shows quantification of the percentages of abnormally myelinated fibers in multiple early-treated femoral nerves (n=16 mice per group) confirms significant improvement in the numbers of abnormally myelinated fibers (A-B), onion bulb formations were limited and did not differ significantly when comparing fully and mock vector treated littermates. Values represent mean±SD. Data were compared using the Mann-Whitney. Averages: A: miRLacZ: 19.36, miR871: 6.83, B: miRLacZ: 2.33, miR871: 1.09, C: miRLacZ: 0.69, miR871: 0.25.

[0075] FIG. 44A-B shows roots semithin sections of late treated CMT1A mouse model. Toluidine blue stained semithin sections of lumbar motor spinal roots of C61 Het mice following intrathecal delivery of the either AAV9-miR871 or AAV9-miRLacZ vector. Representative images of semithin sections of anterior lumbar motor spinal roots attached to the spinal cord at low and higher (A-B) magnification. Thinly myelinated (t), demyelinated (*) fibers and onion bulb formations (o).

[0076] FIG. 45A-C shows quantification of the percentages of abnormally myelinated fibers in multiple late-treated roots (n=7 mice per group) confirms significant improvement in the numbers of abnormally myelinated fibers (A-B), as well as significant reduction in the numbers of onion bulb formations (C) in the fully treated compared with mock vector treated littermates. Values represent mean±SD. Data were compared using the Mann-Whitney. Averages: A: miRLacZ: 19.39, miR871: 14.62, B: miRLacZ: 52.25, miR871: 32.65, C: miRLacZ: 38.86, miR871: 2.71.

[0077] FIG. 46A-B shows femoral nerve semithin sections of late treated CMT1A mouse model. Toluidine blue stained semithin sections of femoral nerves of C61 Het mice following late treatment with either AAV9-miR871 or AAV9-miRLacZ vector. Representative images of semithin sections of anterior lumbar motor spinal roots attached to the spinal cord at low and higher (A-B) magnification. Thinly myelinated (t), demyelinated (*) fibers.

[0078] FIG. 47A-C shows quantification of the percentages of abnormally myelinated fibers in multiple late-treated femoral nerves (miRLacZ n=7, miR871 n=10) confirms significant improvement in the numbers of abnormally myelinated fibers (A-B), onion bulb formations were limited and did not differ significantly when comparing fully and mock vector treated littermates. Values represent mean±SD. Data were compared using the Mann-Whitney. Averages: A: miRLacZ: 21.95, miR871: 11.31, B: miRLacZ: 2.08, miR871: 1.37, C: miRLacZ: 0.57, miR871: 0.20.

[0079] FIG. 48 shows 19-23 nucleotide miPMP22 antisense guide strands capable of targeting the PMP22-215 full length cDNA sequence. Each column in the figure shows antisense guide strand sequences of one of the lengths (e.g., the 19-nucleotide guide strands) in the 5′ to 3′ orientation and each column continues onto (spans) the next pages of the figure.

[0080] FIG. 49 shows the PMP22-204 cDNA sequence.

[0081] FIG. 50 shows 19-23 nucleotide miPMP22 antisense guide strands capable of targeting the PMP22-204 cDNA sequence. Each column in the figure shows antisense guide strand sequences of one of the lengths (e.g., the 19-nucleotide guide strands) where each sequence is shown in the 5′ to 3′ orientation and each column continues onto (spans) the next pages of the figure.

[0082] FIG. 51 shows results of in vivo testing of AAV9-miR871 effects in mu PMP22 in the lumbar spinal roots, sciatic nerve and femoral nerve of wild type (WT) mice, expressing only normal levels of murine PMP22, 6 weeks post-injection. Real Time PCR analysis of mu PMP22 gene expression in WT mice 6 weeks after injection with AAV9-miR871 relative to AAV9-miRLacZ (non-targeting control) vector injected littermates (presented as baseline). For the above transcripts expression analysis, muGAPDH was used as a housekeeping gene to normalize for loading and relative change was determined using the 2^{-ΔΔCT} method (Mean, SD). miR871: lumbar roots n=4, sciatic nerve n=4, femoral nerve n=2. miRLacZ: lumbar roots n=4, sciatic nerve n=4, femoral nerve n=1. Averages: mu PMP22: roots: −0.356856675, sciatic nerve: −0.521269475, femoral nerve: −0.8747207.

[0083] FIG. 52 shows results of in vivo testing of AAV9-miR871 effects in myelin-related genes in the lumbar spinal roots, sciatic nerve and femoral nerve of wild type (WT) mice, expressing only normal levels of murine PMP22, 6 weeks post-injection. Real Time PCR analysis of myelin-related genes expression in WT mice 6 weeks after injection with AAV9-miR871 relative to AAV9-miRLacZ (non-targeting control) vector injected littermates (presented as baseline). For the above transcripts expression analysis, muGAPDH was used as a housekeeping gene to normalize for loading and relative change was determined using the 2^{-ΔΔCT} method (Mean, SD). miR871: lumbar roots n=4, sciatic nerve n=4, femoral nerve n=2. miRLacZ: lumbar roots n=4, sciatic nerve n=4, femoral nerve n=1. Averages: mu MPZ: roots: 1.307563825, sciatic nerve: 1.475276575, femoral nerve: 2.22841445, mu CNP: roots: 0.856114775, sciatic nerve: 0.79534705, femoral nerve: 5.025213, mu Gldn: roots: 1.31614995, sciatic nerve: 1.011103935, femoral nerve: 2.85548965, mu GJB1: roots: 1.0224301, sciatic nerve: 2.091169, femoral nerve: 4.06045285.

[0084] FIG. 53A-C shows results of in vivo testing of AAV9-miR871 effects on muPMP22 and MPZ proteins in the lumbar roots of WT mice, expressing only normal levels of murine PMP22 at 6 weeks post injection. Immunoblot analysis of muPMP22 (A) expression levels in lumbar roots lysates 6 weeks post lumbar intrathecal injection with AAV9 expressing miR871 or miRLacZ. Tissue samples (lumbar roots and spinal cord) from non-injected mice were used as a control. Tubulin blot was used as a loading control (A-C). MuPMP22 expression was reduced while MPZ expression was not significantly altered after treatment (A-C). Immunoblot of eGFP reporter gene was used in order to confirm the success of the injection (A). For the quantification, muPMP22 to tubulin and MPZ to tubulin, optic density ratios were calculated (Mean, SD). Data were compared using the Student t-test: muPMP22: p=0.0004, muMPZ: p=0.4465. Normalized averages: miR871-muPMP22: 0.34, miR871-MPZ: 0.98.

[0085] FIG. 54A-C shows results of in vivo testing of AAV9-miR871 effects on muPMP22 and MPZ proteins in the sciatic nerves of WT mice, expressing only normal levels of murine PMP22 at 6 weeks post injection. Immunoblot analysis of muPMP22 (A) expression levels in sciatic nerves lysates 6 weeks post lumbar intrathecal injection with AAV9 expressing miR871 or miRLacZ. Tissue samples (sciatic nerve and spinal cord) from non-injected mice were used as a control. Tubulin blot was used as a loading control (A-C). MuPMP22 expression was reduced while MPZ expression was increased after treatment (A-C). Immunoblot of eGFP reporter gene was used in order to confirm the success of the injection (A). For the quantification, muPMP22 to tubulin and MPZ to tubulin, optic density ratios were calculated (Mean, SD). Data were compared using the Student t-test: muPMP22: p=0.0024, muMPZ: p=0.0287. Normalized averages: miR871-muPMP22: 0.31, miR871-MPZ: 1.54.

[0086] FIG. 55A-C shows results of in vivo testing of AAV9-miR871 effects on muPMP22 and MPZ proteins in the femoral nerves of WT mice, expressing only normal levels of murine PMP22 at 6 weeks post injection. Immunoblot analysis of muPMP22 (A) expression levels in femoral nerves lysates 6 weeks post lumbar intrathecal injection with AAV9 expressing miR871 or miRLacZ. Tissue samples (femoral nerve and spinal cord) from non-injected mice were used as a control. Tubulin blot was used as a loading control (A-C). MuPMP22 expression was reduced while MPZ expression was not significantly altered after treatment (A-C). Immunoblot of eGFP reporter gene was used in order to confirm the success of the injection (A). For the quantification, muPMP22 to tubulin and MPZ to tubulin, optic density ratios were calculated (Mean, SD). Data were compared using the Student t-test: muPMP22: p=0.0099, muMPZ: p=0.2515. Normalized averages: miR871-muPMP22: 0.15, miR871-MPZ: 1.17.

[0087] FIG. 56A-B shows rotarod results at 5 rpm of WT injected mice, expressing only normal levels of murine PMP22, at baseline and following injection with AAV9-miR871 at 2 months of age. A: AAV9-miR871 injected compared to AAV9-miRLacZ (mock) injected control mice, as indicated. Prior injection, two months old WT mice did not differ from non-injected WT mice. At the age of 4 months (2 months post-injection) AAV9-miR871-injected WT mice showed impaired motor performance compared to the WT mock and non-injected groups. At the age of 6 months AAV9-miR871-injected WT mice did not differ from age-matched non-injected WT or mock mice groups. At all examined ages, mock injected mice did not differ from WT non-injected mice (AAV9-miR871: n=10, AAV9-miRLacZ: n=10, 2 m WT to be injected: n=20, 2-6 months old WT: n=10). B: Time course analysis demonstrates the performance of AAV9-miR871 injected compared to mock injected WT mice. Values represent mean±SD. Data were compared using One way ANOVA with Tukey's Multiple Comparison Test. Significance level of all comparisons, P<0.05. Averages: 2 mWT: 594.12, 2 m WT prior injection: 599.51, 4 m WT: 596.1, 4 m WT-miRLacZ: 586.78, 4 m WT-miR871: 496.72, 6 m WT: 585.42, 6 m WT-miRLacZ: 565.78, 6 m WT-miR871: 570.76.

[0088] FIG. 57A-B shows rotarod at 17.5 rpm results of WT injected mice, expressing only normal levels of murine PMP22, at baseline and following injection with AAV9-miR871 at 2 months of age. A: AAV9-miR871 injected compared to AAV9-miRLacZ (mock) injected control mice, as indicated. Prior injection, two months old WT mice did not differ from non-injected WT mice. At the age of 4 months (2 months post-injection) AAV9-miR871-injected WT mice showed impaired motor performance compared to the WT mock and non-injected groups. At the age of 6 months AAV9-miR871-injected WT mice did not differ from age-matched non-injected WT or mock mice groups. At all examined ages, mock injected mice did not differ from WT non-injected mice (AAV9-miR871: n=10, AAV9-miRLacZ: n=10, 2 m WT to be injected: n=20, 2-6 months old WT: n=10). B: Time course analysis demonstrates the performance of AAV9-miR871 injected compared to mock injected WT mice. Values represent mean±SD. Data were compared using One way ANOVA with Tukey's Multiple Comparison Test. Significance level of all comparisons, P<0.05. Averages: 2 mWT: 582.22, 2 m WT prior injection: 565.06, 4 m WT: 497.8, 4 m WT-miRLacZ: 461.44, 4 m WT-miR871: 237, 6 m WT: 416.16, 6 m WT-miRLacZ: 474.32, 6 m WT-miR871: 377.38.

[0089] FIG. 58A-B shows grip strength results of WT injected mice, expressing only normal levels of murine PMP22, at baseline and following injection with AAV9-miR871 at 2 months of age. A: AAV9-miR871 injected compared to AAV9-miRLacZ (mock) injected control mice, as indicated. Prior injection, two months old WT mice did not differ from non-injected WT mice. At all examined ages, WT non-injected and mock injected mice performed better than their age-matched WT-AAV9-miR871 mice. At all examined ages, mock injected mice did not differ from WT non-injected mice (AAV9-miR871: n=10, AAV9-miRLacZ: n=10, 2 m WT to be injected: n=20, 2-6 months old WT: n=10). B: Time course analysis demonstrates the performance of WT AAV9-miR871 injected compared to mock injected WT mice. Values represent mean±SD. Data were compared using One way ANOVA with Tukey's Multiple Comparison Test. Significance level of all comparisons, P<0.05. Averages: 2 mWT: 51.28, 2 m WT prior injection: 46.11, 4 m WT: 42.73, 4 m WT-miRLacZ: 40.09, 4 m WT-miR871: 23.34, 6 m WT: 36.81, 6 m WT-miRLacZ: 32.98, 6 m WT-miR871: 24.48.

[0090] FIG. 59A-B shows hang test results of WT injected mice, expressing only normal levels of murine PMP22, at baseline and following injection with AAV9-miR871 at 2 months of age. A: AAV9-miR871 injected compared to AAV9-miRLacZ (mock) injected control mice, as indicated. Prior injection, two months old WT mice did not differ from non-injected WT mice. At the age of 4 months (2 months post injection), non-injected WT, mock and AAV9-miR871 injected mice performed similarly. At the age of 6 months (4 months post-injection) AAV9-miR871-injected WT mice showed impaired performance compared to the WT mock and non-injected groups. At all examined ages, mock injected mice did not differ from WT non-injected mice (AAV9-miR871: n=10, AAV9-miRLacZ: n=10, 2 m WT to be injected: n=20, 2-6 months old WT: n=10). B: Time course analysis demonstrates the performance of WT AAV9-miR871 injected compared to mock injected WT mice. Values represent mean±SD. Data were compared using One way ANOVA with Tukey's Multiple Comparison Test. Significance level of all comparisons, P<0.05. Averages: 2 mWT: 593.7, 2 m WT prior injection: 585.26, 4 m WT: 527.28, 4 m WT-miRLacZ: 503.92, 4 m WT-miR871: 410.2, 6 m WT: 351.3, 6 m WT-miRLacZ: 449.06, 6 m WT-miR871: 161.94.

[0091] FIG. 60 shows physiological improvement in AAV9-miR871 early treated C61 Het mice. Amplitude of the compound muscle action potential (CMAP) was improved in the 6-month old AAV9-miR871 treated C61 Het mice (n=8) compared to the AAV9-miRLacZ vector injected littermates (n=8) but did not reach the values of WT mice (n=6). Values represent mean±SD. Data were compared using One way ANOVA with Tukey's Multiple Comparison Test. Averages (mV): 6 m WT: 6.90, 6 m Het-miRLacZ: 1.44, 6 m Het-miR871: 3.51.

[0092] FIG. 61 shows physiological performance of AAV9-miR871 late treated C61 Het mice. Amplitude of the compound muscle action potential (CMAP) was not improved in the 10-month old AAV9-miR871 treated C61 Het mice (n=8) compared to the AAV9-miRLacZ vector injected littermates (n=8) and did not reach the values of WT mice (n=6). Values represent mean±SD. Data were compared using One way ANOVA with Tukey's Multiple Comparison Test. Averages (mV): 10 m WT: 5.33, 10 m Het-miRLacZ: 2.40, 10 m Het-miR871: 2.98.

[0093] FIG. 62 shows physiological performance of AAV9-miR871 WT-injected mice. Amplitude of the compound muscle action potential (CMAP) was reduced in 6-month old AAV9-miR871 treated WT mice (n=5) compared to the AAV9-miRLacZ vector injected littermates (n=4) (B) while motor nerve conduction velocities (MNCV) were not affected (A), compared to the values of WT non-injected mice (n=6). Values represent mean±SD. Data were compared using One way ANOVA with Tukey's Multiple Comparison Test. Averages: 6 m WT: 6.89, 6 m WT-miRLacZ: 7.03, 6 m WT-miR871: 4.62. Averages for MNCVs: 6 m WT: 41.61, 6 m WT-miRLacZ: 42.09, 6 m WT-miR871: 40.07.

[0094] FIG. 63 shows hind limb clasping phenotype of WT injected mice with either AAV9-miRLacZ or AAV9-miR871 vectors at four months post injection (6 months of age). Quantification of hind limb clasping angle and representative images of peripheral neuropathy phenotype evaluation of WT mice group injected with either AAV9-miR871 or AAV9-miRLacZ. There was no difference among 6-months old WT, WT injected with AAV9-miRLacZ or WT injected with AAV9-miR871 mice. Averages for CMAPs (mV): 6 m WT: 73.19, 6 m WT-miRLacZ: 70.54, 6 m WT-miR871: 59.09.

[0095] FIG. 64 shows the immune response analysis 6 weeks and 4 months post injection of anterior lumbar roots sections of baseline WT and C61-Het mice as well as of C61-Het mice injected with AAV9-miRLacZ. The percentage of B-cell marker CD20, leukocyte marker CD45, macrophage marker CD68 and T-cell marker CD3 was calculated in relation to total cell number (Mean, SD). Data were compared using One way ANOVA with Tukey's Multiple Comparison Test. Significance level of all comparisons, P<0.05 (WT: n=4, C61 Het: n=4, C61 Het-miRLacZ: n=4). Averages: CD20: 6 weeks: WT: 0.06, Het: 0.55, Het-miRLacZ: 0.69, 4 months: WT: 0.18, Het: 1.94, Het-miRLacZ: 1.37, CD45: WT: 0.23, Het: 7.82, Het-miRLacZ: 7.43, 4 months: WT: 1.49, Het: 8.46, Het-miRLacZ: 8.13, CD68: WT: 2.38, Het: 3.59, Het-miRLacZ: 3.34, 4 months: WT: 1.00, Het: 6.88, Het-miRLacZ: 7.62, CD3: WT: 0.07, Het: 0.76, Het-miRLacZ: 0.84, 4 months: WT: 0.23, Het: 1.43, Het-miRLacZ: 1.20.

[0096] FIG. 65 shows the immune response analysis 6 weeks and 4 months post injection of sciatic nerve sections of baseline WT and C61-Het mice as well as of C61-Het mice injected with AAV9-miRLacZ. The percentage of B-cell marker CD20, leukocyte marker CD45, macrophage marker CD68 and T-cell marker CD3 was calculated in relation to total cell number (Mean, SD). Data were compared using One way ANOVA with Tukey's Multiple Comparison Test. Significance level of all comparisons, P<0.05 (WT: n=4, C61 Het: n=4, C61 Het-miRLacZ: n=4). Averages: CD20: 6 weeks: WT: 2.38, Het: 3.59, Het-miRLacZ: 3.34, 4 months: WT: 1.00, Het: 6.88, Het-miRLacZ: 7.62, CD45: WT: 2.76, Het: 7.03, Het-miRLacZ: 6.64, 4 months: WT: 1.94, Het: 6.36, Het-miRLacZ: 6.62, CD68: WT: 2.76, Het: 7.03, Het-miRLacZ: 6.64, 4 months: WT: 1.94, Het: 6.36, Het-miRLacZ: 6.62, CD3: WT: 0.85, Het: 2.27, Het-miRLacZ: 1.86, 4 months: WT: 0.66, Het: 4.57, Het-miRLacZ: 4.46.

[0097] FIG. 66 shows the immune response analysis 6 weeks and 4 months post injection of liver sections of baseline WT and C61-Het mice as well as of C61-Het mice injected with AAV9-miRLacZ. The percentage of B-cell marker CD20, leukocyte marker CD45, macrophage marker CD68 and T-cell marker CD3 was calculated in relation to total cell number (Mean, SD). Data were compared using One way ANOVA with Tukey's Multiple Comparison Test. Significance level of all comparisons, P<0.05 (WT: n=4, C61 Het: n=4, C61 Het-miRLacZ: n=4). Averages: CD20: 6 weeks: WT: 0.09, Het: 0.62, Het-miRLacZ: 0.64, 4 months: WT: 0.16, Het: 0.59, Het-miRLacZ: 0.62, CD45: WT: 0.77, Het: 0.66, Het-miRLacZ: 2.50, 4 months: WT: 1.36, Het: 1.00, Het-miRLacZ: 1.24, CD68: WT: 1.28, Het: 1.15, Het-miRLacZ: 1.17, 4 months: WT: 0.66, Het: 1.03, Het-miRLacZ: 1.23, CD3: WT: 0.72, Het: 0.77, Het-miRLacZ: 1.69, 4 months: WT: 1.01, Het: 1.10, Het-miRLacZ: 0.92.

[0098] FIG. 67 shows plasma neurofilament light (NfL) concentration (pg/ml) in 6-months old baseline WT (n=4), C61 Het (n=4), C61 Het AAV9-miRLacZ-treated (n=6) and C61 Het AAV9-miR871-treated (n=6) mice. Nfl concentrations are a dynamic measure of axonal damage and serve as a biomarker for CMT disease severity. Six-months old baseline C61 Het mice presented higher concentrations of Nfl in their plasma compared to aged matched baseline WT mice. AAV9-miRLacZ injection to C61 Het mice did not affected Nfl levels when compared to aged matched non-injected C61 Het mice. Early treated C61 Het mice with AAV9-miR871 presented reduced concentrations of Nfl in their plasma when compared to C61 Het mice injected with AAV9-miRLacZ. AAV9-miR871 scores approached WT levels. Averages: 6 m WT: 131.10, 6 m C61 Het: 418.07, C61 Het AAV9-miRLacZ: 540.65, C61 Het AAV9-miR871: 321.37.

[0099] FIG. 68 shows plasma neurofilament light (NfL) concentration (pg/ml) in 10-months old baseline WT (n=4), C61 Het (n=4), C61 Het AAV9-miRLacZ-treated (n=6) and C61 Het AAV9-miR871-treated (n=6) mice. Nfl concentrations are a dynamic measure of axonal damage and serve as a biomarker for CMT disease severity. Ten-months old baseline C61 Het presented higher concentrations of Nfl in their plasma compared to aged matched baseline WT mice. AAV9-miRLacZ injection to C61 Het mice did not affected Nfl levels when compared to aged matched non-injected C61 Het mice. Late treatment with AAV9-miR871 was not sufficient to improve Nfl levels at 10 months old C61 Het mice. Averages: 10 m WT: 88.07, 10 m C61 Het: 539.66, C61 Het AAV9-miRLacZ: 471.99, C61 Het AAV9-miR871: 559.28.

[0100] FIG. 69 shows plasma neurofilament light (NfL) concentration (pg/ml) in 6-months old baseline WT (n=4), WT AAV9-miRLacZ-treated (n=5) and WT AAV9-miR871-treated (n=5) mice. Nfl concentrations are a dynamic measure of axonal damage. There was no difference among non-injected and injected WT mice in terms of plasma Nfl concertation. Averages: 6 m WT: 131.10, WT AAV9-miRLacZ: 128.93, WT AAV9-miR871: 104.92.

[0101] FIG. 70 shows the immune response analysis of early treatment anterior lumbar roots immunohistochemistry sections of baseline WT and C61-Het mice as well as of C61-Het mice injected with AAV9-miR871 at 4 months post-injection (6 months old mice). The percentage of B-cell marker CD20, leukocyte marker CD45, macrophage marker CD68 and T-cell marker CD3 was calculated in relation to total cell number (Mean, SD). Non-injected 6 months old C61 Het lumbar roots presented elevated scores of all immune response markers that were decreased down to WT levels after AAV9-miR871 injection. Data were compared using One way ANOVA with Tukey's Multiple Comparison Test. Significance level of all comparisons, P<0.05. Averages: CD20: WT: 0.18, C61 Het: 1.94, C61 Het-AAV9-miR871: 0.25, CD45: WT: 1.49, C61 Het: 8.46, C61 Het-AAV9-miR871: 2.39, CD68: WT: 1.00, C61 Het: 6.88, C61 Het-AAV9-miR871: 0.98, CD3: WT: 0.23, C61 Het: 1.43, C61 Het-AAV9-miR871: 0.60.

[0102] FIG. 71 shows the immune response analysis of early treatment sciatic nerve immunohistochemistry sections of baseline WT and C61-Het mice as well as of C61-Het mice injected with AAV9-miR871 at 4 months post-injection (6 months old mice). The percentage of B-cell marker CD20, leukocyte marker CD45, macrophage marker CD68 and T-cell marker CD3 was calculated in relation to total cell number (Mean, SD). Non-injected 6 months old C61 Het sciatic nerves presented elevated scores of all immune response markers that were decreased down to WT levels after AAV9-miR871 injection. Data were compared using One way ANOVA with Tukey's Multiple Comparison Test. Significance level of all comparisons, P<0.05. Averages: CD20: WT: 0.05, C61 Het: 1.25, C61 Het-AAV9-miR871: 0.51, CD45: WT: 1.93, C61 Het: 6.36, C61 Het-AAV9-miR871: 2.68, CD68: WT: 0.66, C61 Het: 4.58, C61 Het-AAV9-miR871: 1.22, CD3: WT: 0.16, C61 Het: 0.59, C61 Het-AAV9-miR871: 0.25.

[0103] FIG. 72 shows the immune response analysis of early treatment liver immunohistochemistry sections of baseline WT and C61-Het mice as well as of C61-Het mice injected with AAV9-miR871 at 4 months post-injection (6 months old mice). The percentage of B-cell marker CD20, leukocyte marker CD45, macrophage marker CD68 and T-cell marker CD3 was calculated in relation to total cell number (Mean, SD). Non-injected 6 months old WT, C61 Het and C61 Het injected with AAV9-miR871 livers presented similar scores of immune response markers. Data were compared using One way ANOVA with Tukey's Multiple Comparison Test. Significance level of all comparisons, P<0.05. Averages: CD20: WT: 1.36, C61 Het: 1.00, C61 Het-AAV9-miR871: 1.19, CD45: WT: 0.66, C61 Het: 1.03, C61 Het-AAV9-miR871: 0.91, CD68: WT: 1.99, C61 Het: 2.42, C61 Het-AAV9-miR871: 2.52, CD3: WT: 1.01, C61 Het: 1.09, C61 Het-AAV9-miR871: 1.11.

[0104] FIG. 73 shows the immune response analysis of late treatment anterior lumbar roots sections of baseline WT and C61-Het mice as well as of C61-Het mice injected with AAV9-miR871 at 4 months post-injection (10 months old mice). The percentage of B-cell marker CD20, leukocyte marker CD45, macrophage marker CD68 and T-cell marker CD3 was calculated in relation to total cell number (Mean, SD). Non-injected 10 months old C61 Het lumbar roots presented elevated scores of all immune response markers that were decreased down to WT levels after AAV9-miR871 injection, with only exception being CD45 positive cells that despite their significant decrease they did not reach WT levels. Data were compared using One way ANOVA with Tukey's Multiple Comparison Test. Significance level of all comparisons, P<0.05. Averages: CD20: WT: 0.39, C61 Het: 1.80, C61 Het-AAV9-miR871: 0.45, CD45: WT: 4.07, C61 Het: 13.45, C61 Het-AAV9-miR871: 7.32, CD68: WT: 2.32, C61 Het: 7.81, C61 Het-AAV9-miR871: 1.25, CD3: WT: 0.45, C61 Het: 2.19, C61 Het-AAV9-miR871: 0.55.

[0105] FIG. 74 shows the immune response analysis of late treatment sciatic nerve sections of baseline WT and C61-Het mice as well as of C61-Het mice injected with AAV9-miR871 at 4 months post-injection (10 months old mice). The percentage of B-cell marker CD20, leukocyte marker CD45, macrophage marker CD68 and T-cell marker CD3 was calculated in relation to total cell number (Mean, SD). Non-injected 10 months old C61 Het sciatic nerves presented elevated scores of all immune response markers that were decreased down to WT levels after AAV9-miR871 injection. Data were compared using One way ANOVA with Tukey's Multiple Comparison Test. Significance level of all comparisons, P<0.05. Averages: CD20: WT: 0.14, C61 Het: 1.29, C61 Het-AAV9-miR871: 0.43, CD45: WT: 6.21, C61 Het: 12.34, C61 Het-AAV9-miR871: 8.52, CD68: WT: 2.17, C61 Het: 5.25, C61 Het-AAV9-miR871: 2.51, CD3: WT: 0.37, C61 Het: 1.65, C61 Het-AAV9-miR871: 0.57.

[0106] FIG. 75 shows the immune response analysis of late treatment liver sections of baseline WT and C61-Het mice as well as of C61-Het mice injected with AAV9-miR871 at 4 months post-injection (10 months old mice). The percentage of B-cell marker CD20, leukocyte marker CD45, macrophage marker CD68 and T-cell marker CD3 was calculated in relation to total cell number (Mean, SD). Non-injected 10 months old WT, C61 Het and C61 Het injected with AAV9-miR871 livers presented similar scores of immune response markers. Data were compared using One way ANOVA with Tukey's Multiple Comparison Test. Significance level of all comparisons, P<0.05. Averages: CD20: WT: 4.04, C61 Het: 4.69, C61 Het-AAV9-miR871: 4.89, CD45: WT: 3.84, C61 Het: 3.03, C61 Het-AAV9-miR871: 3.98, CD68: WT: 12.63, C61 Het: 11.86, C61 Het-AAV9-miR871: 10.68, CD3: WT: 1.48, C61 Het: 2.74, C61 Het-AAV9-miR871: 2.84.

[0107] FIG. 76 shows VGCN of PNS and non-PNS tissues of early treated mice at 4 months post injection (mice 6 months old). Averages: Roots: 3.57, sciatic nerve: 3.57, femoral nerve: 0.55, brain: 0.19, liver: 21.29, kidney: 0.17, lung: 0.17, quadriceps: 0.09, heart: 0.48, stomach: 0.05, eye: 0.43.

[0108] FIG. 77 shows VGCN of PNS and non-PNS tissues of late treated mice at 4 months post injection (mice 10 months old). Averages: Roots: 1.84, sciatic nerve: 2.73, femoral nerve: 1.41, brain: 0.34, liver: 20.74, kidney: 0.63, lung: 0.85, quadriceps: 0.33, heart: 3.86, stomach: 0.17, eye: 0.17.

### DETAILED DESCRIPTION

[0109] The products and methods described herein are used in the treatment of diseases associated with a duplicated and/or mutant PMP22 gene. Diseases associated with PMP22 include, for example, CMT1A.

[0110] A nucleic acid encoding human PMP22 is set forth in SEQ ID NO: 25. Various products and methods of the disclosure can target variants of the human PMP22 nucleotide sequence set forth in SEQ ID NO: 25. The variants can exhibit 99%, 98%, 97%, 96%, 95%, 94%, 93%, 92%, 91%, 90%, 89%, 88%, 87%, 86%, 85%, 84%, 83%, 82%, 81%, 80%, 79%, 78%, 77%, 76%, 75%, 74%, 73%, 72%, 71%, and 70% identity to the nucleotide sequence set forth in SEQ ID NO: 25.

[0111] A nucleic acid encoding mouse PMP22 is set forth in SEQ ID NO: 27. Various products and methods of the disclosure can target variants of the nucleotide sequence set forth in SEQ ID NO: 27. The variants can exhibit 99%, 98%, 97%, 96%, 95%, 94%, 93%, 92%, 91%, 90%, 89%, 88%, 87%, 86%, 85%, 84%, 83%, 82%, 81%, 80%, 79%, 78%, 77%, 76%, 75%, 74%, 73%, 72%, 71%, and 70% identity to the nucleotide sequence set forth in SEQ ID NO: 27.

[0112] The disclosure includes the use of RNA interference to inhibit or interfere with the expression of PMP22 to ameliorate and/or treat subjects with diseases or disorders resulting from overexpression of PMP22. RNA interference (RNAi) is a mechanism of gene regulation in eukaryotic cells that has been considered for the treatment of various diseases. RNAi refers to post-transcriptional control of gene expression mediated by inhibitory RNAs. The inhibitory RNAs are small (21-25 nucleotides in length), noncoding RNAs that share sequence homology and base-pair with cognate messenger RNAs (mRNAs). The interaction between the inhibitory RNAs and mRNAs directs cellular gene silencing machinery to prevent the translation of the mRNAs. The RNAi pathway is summarized in Duan (Ed.), Section 7.3 of Chapter 7 in Muscle Gene Therapy, Springer Science+Business Media, LLC (2010).

[0113] As an understanding of natural RNAi pathways has developed, researchers have designed artificial inhibitory RNAs for use in regulating expression of target genes for treating disease. Several classes of small RNAs are known to trigger RNAi processes in mammalian cells [Davidson et al., Nat. Rev. Genet., 12:329-40 (2011); Harper, Arch. Neurol., 66:933-938 (2009)]. Artificial inhibitory RNAs expressed in vivo from plasmid- or virus-based vectors and may achieve long term gene silencing with a single administration, for as long as the vector is present within target cell nuclei and the driving promoter is active [Davidson et al., Methods Enzymol., 392:145-73, (2005)]. Importantly, this vector-expressed approach leverages the decades-long advancements already made in the muscle gene therapy field, but instead of expressing protein coding genes, the vector cargo in RNAi therapy strategies are artificial inhibitory RNAs targeting disease genes-of-interest.

[0114] Products and methods are provided herein that comprise shRNA to affect PMP22 expression (e.g., knockdown or inhibit expression). An shRNA is an artificial RNA molecule with a tight hairpin turn that can be used to silence target gene expression via RNA interference (RNAi). shRNA is an advantageous mediator of RNAi in that it has a relatively low rate of degradation and turnover, but it requires use of an expression vector. Once the vector has transduced the host genome, the shRNA is then transcribed in the nucleus by polymerase II or polymerase III, depending on the promoter choice. The product mimics pri-microRNA (pri-miRNA) and is processed by Drosha. The resulting pre-shRNA is exported from the nucleus by Exportin 5. This product is then processed by Dicer and loaded into the RNA-induced silencing complex (RISC). The sense (passenger) strand is degraded. The antisense (guide) strand directs RISC to mRNA that has a complementary sequence. In the case of perfect complementarity, RISC cleaves the mRNA. In the case of imperfect complementarity, RISC represses translation of the mRNA. In both of these cases, the shRNA leads to target gene silencing. The disclosure includes the production and administration of a viral vector expressing PMP22 antisense sequences via shRNA. The expression of shRNAs is regulated by the use of various promoters. The disclosure contemplates use of polymerase III promoters, such as U6 and H1 promoters, or polymerase II promoters. U6 shRNAs are exemplified.

[0115] The products and methods provided herein can comprise miRNA shuttles to modify PMP22 expression (e.g., knockdown or inhibit expression). Like shRNAs, miRNA shuttles are expressed intracellularly from DNA transgenes. miRNA shuttles typically contain natural miRNA sequences required to direct correct processing, but the natural, mature miRNA duplex in the stem is replaced by the sequences specific for the intended target transcript (e.g., as shown in FIG. 1). Following expression, the artificial miRNA is cleaved by Drosha and Dicer to release the embedded siRNA-like region. Polymerase Ill promoters, such as U6 and H1 promoters, and polymerase II promoters are also used to drive expression of the miRNA shuttles.

[0116] The disclosure provides nucleic acids encoding miPMP22s to inhibit the expression of the PMP22 gene. The disclosure provides a nucleic acid encoding a miPMP22 wherein the nucleic acid comprises at least about 70%, 75%, 80%, 81%, 82%, 83%, 84%, 85%, 86%, 87%, 88%, 89%, 90%, 91%, 92%, 93%, 94%, 95%, 96%, 97%, 98%, 99%, or 100% identity to the polynucleotide sequence set forth in any one of SEQ ID NOs: 1-8. The disclosure provides a nucleic acid encoding a miPMP22 processed antisense guide strand comprising at least about 70%, 75, 80%, 81%, 82%, 83%, 84%, 85%, 86%, 87%, 88%, 89%, 90%, 91%, 92%, 93%, 94%, 95%, 96%, 97%, 98%, 99%, or 100% identity to the miPMP22 processed antisense guide strand sequence set forth in any one of SEQ ID NOs: 17-24.

[0117] Exemplary miPMP22s comprise the RNA sequence set out in any one or more of SEQ ID NOs: 9-16, or a variant thereof comprising at least about 70%, 75%, 80%, 81%, 82%, 83%, 84%, 85%, 86%, 87%, 88%, 89%, 90%, 91%, 92%, 93%, 94%, 95%, 96%, 97%, 98%, or 99% identity to any one of SEQ ID NOs 9-16. Final processed guide strand sequences corresponding to SEQ ID NOs: 9-16 are respectively set out in SEQ ID NOs: 17-24. The disclosure additionally provides the antisense guide strands set out in FIG. 48 and contemplates variants of each of those antisense guide strands that are at least about 70%, 75%, 80%, 81%, 82%, 83%, 84%, 85%, 86%, 87%, 88%, 89%, 90%, 91%, 92%, 93%, 94%, 95%, 96%, 97%, 98%, 99% identical. The disclosure additionally provides the antisense guide strands set out in FIG. 50 and contemplates variants of each of those antisense guide strands that are at least about 70%, 75%, 80%, 81%, 82%, 83%, 84%, 85%, 86%, 87%, 88%, 89%, 90%, 91%, 92%, 93%, 94%, 95%, 96%, 97%, 98%, 99% identical.

[0118] The disclosure contemplates polynucleotides encoding one or more copies of these sequences are combined into a single delivery vehicle, such as a vector. Thus, the disclosure includes vectors comprising a nucleic acid of the disclosure or a combination of nucleic acids of the disclosure. Provided are viral vectors (such as adeno-associated virus (AAV), adenovirus, retrovirus, lentivirus, equine-associated virus, alphavirus, pox virus, herpes virus, herpes simplex virus, polio virus, sindbis virus, vaccinia virus or a synthetic virus, e.g., a chimeric virus, mosaic virus, or pseudotyped virus, and/or a virus that contains a foreign protein, synthetic polymer, nanoparticle, or small molecule) to deliver the nucleic acids disclosed herein. AAV vectors are exemplified. Non-viral delivery vehicles are also contemplated

[0119] Adeno-associated virus (AAV) is a replication-deficient parvovirus, the single-stranded DNA genome of which is about 4.7 kb in length including 145 nucleotide inverted terminal repeat (ITRs). There are multiple serotypes of AAV. The nucleotide sequences of the genomes of the AAV serotypes are known. For example, the complete genome of AAV-1 is provided in GenBank Accession No. NC_002077; the complete genome of AAV-2 is provided in GenBank Accession No. NC_001401 and Srivastava et al., J. Virol., 45: 555-564 (1983); the complete genome of AAV-3 is provided in GenBank Accession No. NC_1829; the complete genome of AAV-4 is provided in GenBank Accession No. NC_001829; the AAV-5 genome is provided in GenBank Accession No. AF085716; the complete genome of AAV-6 is provided in GenBank Accession No. NC_00 1862; at least portions of AAV-7 and AAV-8 genomes are provided in GenBank Accession Nos. AX753246 and AX753249, respectively; the AAV-9 genome is provided in Gao et al., J. Virol., 78: 6381-6388 (2004); the AAV-10 genome is provided in Mol. Ther., 13(1): 67-76 (2006); the AAV-11 genome is provided in Virology, 330(2): 375-383 (2004); portions of the AAV-12 genome are provided in Genbank Accession No. DQ813647; portions of the AAV-13 genome are provided in Genbank Accession No. EU285562. The sequence of the AAV rh.74 genome is provided in see U.S. Pat. No. 9,434,928, incorporated herein by reference. The sequence of the AAV-B1 genome is provided in Choudhury et al., Mol. Ther., 24(7): 1247-1257 (2016). Cis-acting sequences directing viral DNA replication (rep), encapsidation/packaging and host cell chromosome integration are contained within the AAV ITRs. Three AAV promoters (named p5, p19, and p40 for their relative map locations) drive the expression of the two AAV internal open reading frames encoding rep and cap genes. The two rep promoters (p5 and p19), coupled with the differential splicing of the single AAV intron (at nucleotides 2107 and 2227), result in the production of four rep proteins (rep 78, rep 68, rep 52, and rep 40) from the rep gene. Rep proteins possess multiple enzymatic properties that are ultimately responsible for replicating the viral genome. The cap gene is expressed from the p40 promoter and it encodes the three capsid proteins VP1, VP2, and VP3. Alternative splicing and non-consensus translational start sites are responsible for the production of the three related capsid proteins. A single consensus polyadenylation site is located at map position 95 of the AAV genome. The life cycle and genetics of AAV are reviewed in Muzyczka, Current Topics in Microbiology and Immunology, 158: 97-129 (1992).

[0120] AAV possesses unique features that make it attractive as a vector for delivering foreign DNA to cells, for example, in gene therapy. AAV infection of cells in culture is noncytopathic, and natural infection of humans and other animals is silent and asymptomatic. Moreover, AAV infects many mammalian cells allowing the possibility of targeting many different tissues in vivo. Moreover, AAV transduces slowly dividing and non-dividing cells, and can persist essentially for the lifetime of those cells as a transcriptionally active nuclear episome (extrachromosomal element). The AAV proviral genome is infectious as cloned DNA in plasmids which makes construction of recombinant genomes feasible. Furthermore, because the signals directing AAV replication, genome encapsidation and integration are contained within the ITRs of the AAV genome, some or all of the internal approximately 4.3 kb of the genome (encoding replication and structural capsid proteins, rep-cap) may be replaced with foreign DNA. The rep and cap proteins may be provided in trans. Another significant feature of AAV is that it is an extremely stable and hearty virus. It easily withstands the conditions used to inactivate adenovirus (56 to 65° C. for several hours), making cold preservation of AAV less critical. AAV may even be lyophilized. Finally, AAV-infected cells are not resistant to superinfection.

[0121] As exemplified herein, the AAV vector lacks rep and cap genes. The AAV can be a recombinant AAV (rAAV) or a self-complementary recombinant AAV (scAAV). The AAV has a capsid serotype can be from, for example, AAV-1, AAV-2, AAV-3, AAV-4, AAV-5, AAV-6, AAV-7, AAV-8, AAV-9, AAV-10, AAV-11, AAV-12, AAV-13, AAV-anc80, AAV rh.74, AAV rh.8, or AAVrh.10.

[0122] Viral vectors provided include, for example, AAV1 (i.e., an AAV containing AAV1 inverted terminal repeats (ITRs) and AAV1 capsid proteins), AAV2 (i.e., an AAV containing AAV2 ITRs and AAV2 capsid proteins), AAV3 (i.e., an AAV containing AAV3 ITRs and AAV3 capsid proteins), AAV4 (i.e., an AAV containing AAV4 ITRs and AAV4 capsid proteins), AAV5 (i.e., an AAV containing AAV5 ITRs and AAV5 capsid proteins), AAV6 (i.e., an AAV containing AAV6 ITRs and AAV6 capsid proteins), AAV7 (i.e., an AAV containing AAV7 ITRs and AAV7 capsid proteins), AAV8 (i.e., an AAV containing AAV8 ITRs and AAV8 capsid proteins), AAV9 (i.e., an AAV containing AAV9 ITRs and AAV9 capsid proteins), AAVrh74 (i.e., an AAV containing AAVrh74 ITRs and AAVrh74 capsid proteins), AAVrh.8 (i.e., an AAV containing AAVrh.8 ITRs and AAVrh.8 capsid proteins), AAVrh.10 (i.e., an AAV containing AAVrh.10 ITRs and AAVrh.10 capsid proteins), AAV11 (i.e., an AAV containing AAV11 ITRs and AAV11 capsid proteins), AAV12 (i.e., an AAV containing AAV12 ITRs and AAV12 capsid proteins), or AAV13 (i.e., an AAV containing AAV13 ITRs and AAV13 capsid proteins).

[0123] DNA plasmids of the disclosure comprise recombinant AAV (rAAV) genomes of the disclosure. The DNA plasmids are transferred to cells permissible for infection with a helper virus of AAV (e.g., adenovirus, E1-deleted adenovirus or herpes virus) for assembly of the rAAV genome into infectious viral particles. Techniques to produce rAAV particles, in which an AAV genome to be packaged, rep and cap genes, and helper virus functions are provided to a cell are standard in the art. Production of rAAV requires that the following components are present within a single cell (denoted herein as a packaging cell): a rAAV genome, AAV rep and cap genes separate from (i.e., not in) the rAAV genome, and helper virus functions. The AAV rep genes may be from any AAV serotype for which recombinant virus can be derived and may be from a different AAV serotype than the rAAV genome ITRs, including, but not limited to, AAV serotypes AAV-1, AAV-2, AAV-3, AAV-4, AAV-5, AAV-6, AAV-7, AAV-8, AAV-9, AAV-10, AAV-11, AAV-12, AAV-13, AAV-anc80, and AAV rh.74. IAAV DNA in the rAAV genomes can be from any AAV serotype for which a recombinant virus can be derived including, but not limited to, AAV serotypes AAV-1, AAV-2, AAV-3, AAV-4, AAV-5, AAV-6, AAV-7, AAV-8, AAV-9, AAV-10, AAV-11, AAV-12, AAV-13, AAV-anc80, and AAV rh.74. Other types of rAAV variants, for example rAAV with capsid mutations, are also included in the disclosure. See, for example, Marsic et al., Molecular Therapy 22(11): 1900-1909 (2014). As noted above, the nucleotide sequences of the genomes of various AAV serotypes are known in the art. Use of cognate components is specifically contemplated. Production of pseudotyped rAAV is disclosed in, for example, WO 01/83692 which is incorporated by reference herein in its entirety.

[0124] The AAV vector can be a pseudotyped AAV, containing ITRs from one AAV serotype and capsid proteins from a different AAV serotype. The pseudo-typed AAV can be AAV2/9 (i.e., an AAV containing AAV2 ITRs and AAV9 capsid proteins). The pseudotyped AAV can be AAV2/8 (i.e., an AAV containing AAV2 ITRs and AAV8 capsid proteins). The pseudotyped AAV can be AAV2/1 (i.e., an AAV containing AAV2 ITRs and AAV1 capsid proteins).

[0125] The AAV vector can contain a recombinant capsid protein, such as a capsid protein containing a chimera of one or more of capsid proteins from AAV1, AAV2, AAV3, AAV4, AAV5, AAV6, AAV7, AAV8, AAV9, AAVrh74, AAVrh.8, or AAVrh.10, AAV10, AAV11, AAV12, or AAV13. Other types of rAAV variants, for example rAAV with capsid mutations, are also contemplated. See, for example, Marsic et al., Molecular Therapy, 22(11): 1900-1909 (2014). As noted above, the nucleotide sequences of the genomes of various AAV serotypes are known in the art.

[0126] The disclosure provides AAV to deliver miPMP22s which target PMP22 mRNA to inhibit PMP22 expression. AAV can be used to deliver miPMP22s under the control of an RNA polymerase III (Pol III)-based promoter. AAV is used to deliver miPMP22s under the control of a U6 promoter. AAV is used to deliver miPMP22s under the control of a H1 promoter. AAV is used to deliver miPMP22s under the control of an RNA polymerase II (Pol II)-based promoter. AAV is used to deliver miPMP22s under the control of an U7 promoter. AAV is used to deliver MiPMP22s under the control of a Schwann cell-specific promoter. AAV is used to deliver miPMP22s under the control of an MPZ promoter. AAV is used to deliver miPMP22s under the control of a PMP22 promoter.

[0127] In nature, the U6 promoter controls expression of the U6 RNA, a small nuclear RNA (snRNA) involved in splicing, and which has been well-characterized [Kunkel et al., Nature, 322(6074):73-77 (1986); Kunkel et al., Genes Dev. 2(2):196-204 (1988); Paule et al., Nuc. Acids Res., 28(6):1283-1298 (2000)]. The U6 promoter is used to control vector-based expression in mammalian cells [Paddison et al., Proc. Natl. Acad. Sci. USA, 99(3):1443-1448 (2002); Paul et al., Nat. Biotechnol.,20(5):505-518 (2002)] because (1) the promoter is recognized by RNA polymerase III (poly III) and controls high-level, constitutive expression of RNA; and (2) the promoter is active in most mammalian cell types. The disclosure includes use of both murine and human U6 promoters.

[0128] AAV vectors herein lack rep and cap genes. The AAV can be a recombinant AAV, a recombinant single-stranded AAV (ssAAV), or a recombinant self-complementary AAV (scAAV).

[0129] rAAV genomes of the disclosure comprise one or more AAV ITRs flanking a polynucleotide encoding, for example, one or more miPMP22s. Commercial providers such as Ambion Inc. (Austin, TX), Darmacon Inc. (Lafayette, CO), InvivoGen (San Diego, CA), and Molecular Research Laboratories, LLC (Herndon, VA) generate custom inhibitory RNA molecules. In addition, commercial kits are available to produce custom siRNA molecules, such as SILENCER™ siRNA Construction Kit (Ambion Inc., Austin, TX) or psiRNA System (InvivoGen, San Diego, CA).

[0130] A method of generating a packaging cell is to create a cell line that stably expresses all the necessary components for AAV particle production. For example, a plasmid (or multiple plasmids) comprising a rAAV genome lacking AAV rep and cap genes, AAV rep and cap genes separate from the rAAV genome, and a selectable marker, such as a neomycin resistance gene, are integrated into the genome of a cell. AAV genomes have been introduced into bacterial plasmids by procedures such as GC tailing [Samulski et al., Proc. Natl. Acad. S6. USA, 79:2077-2081 (1982)], addition of synthetic linkers containing restriction endonuclease cleavage sites [Laughlin et al., Gene, 23:65-73 (1983)] or by direct, blunt-end ligation [Senapathy & Carter, J. Biol. Chem., 259:4661-4666 (1984)]. The packaging cell line is then infected with a helper virus such as adenovirus. The advantages of this method are that the cells are selectable and are suitable for large-scale production of rAAV. Other examples of suitable methods employ adenovirus or baculovirus rather than plasmids to introduce rAAV genomes and/or rep and cap genes into packaging cells.

[0131] General principles of rAAV production are reviewed in, for example, Carter, Current Opinions in Biotechnology, 1533-1539 (1992); and Muzyczka, Curr. Topics in Microbiol. and Immunol., 158: 97-129 (1992). Various approaches are described in Ratschin et al., Mol. Cell. Biol. 4:2072 (1984); Hermonat et al., Proc. Natl. Acad. Sci. USA, 81: 6466 (1984); Tratschin et al., Mol. Cell. Biol. 5: 3251 (1985); McLaughlin et al., J. Virol., 62:1963 (1988); and Lebkowski et al., Mol. Cell. Biol., 7: 349 (1988). Samulski et al., J. Virol., 63: 3822-3828 (1989); U.S. Pat. No. 5,173,414; WO 95/13365 and corresponding U.S. Pat. No. 5,658,776; WO 95/13392; WO 96/17947; PCT/US98/18600; WO 97/09441 (PCT/US96/14423); WO 97/08298 (PCT/US96/13872); WO 97/21825 (PCT/US96/20777); WO 97/06243 (PCT/FR96/01064); WO 99/11764; Perrin et al., Vaccine, 13:1244-1250 (1995); Paul et al., Hum. Gene Ther., 4:609-615 (1993); Clark et al., Gene Ther., 3:1124-1132 (1996); U.S. Pat. Nos. 5,786,211; 5,871,982; 6,258,595; and McCarty, Mol. Ther., 16(10): 1648-1656 (2008). The foregoing documents are hereby incorporated by reference in their entirety herein, with particular emphasis on those sections of the documents relating to rAAV production. The production and use of self-complementary (sc) rAAV are specifically contemplated and exemplified.

[0132] The disclosure further provides packaging cells that produce AAV vectors. Packaging cells may be stably transformed cancer cells such as HeLa cells, 293 cells and PerC.6 cells (a cognate 293 line). In another embodiment, packaging cells are cells that are not transformed cancer cells, such as low passage 293 cells (human fetal kidney cells transformed with E1 of adenovirus), MRC-5 cells (human fetal fibroblasts), WI-38 cells (human fetal fibroblasts), Vero cells (monkey kidney cells) and FRhL-2 cells (rhesus fetal lung cells).

[0133] Recombinant AAV (rAAV) (i.e., infectious encapsidated rAAV particles) are thus provided herein. The genomes of the rAAV lack AAV rep and cap DNA, that is, there is no AAV rep or cap DNA between the ITRs of the genomes of the rAAV.

[0134] The rAAV may be purified by methods standard in the art such as by column chromatography or cesium chloride gradients. Methods for purifying rAAV vectors from helper virus are known in the art and include methods disclosed in, for example, Clark et al., Hum. Gene Ther., 10(6): 1031-1039 (1999); Schenpp and Clark, Methods Mol. Med., 69: 427-443 (2002); U.S. Pat. No. 6,566,118 and WO 98/09657.

[0135] Compositions comprising the nucleic acids and viral vectors of the disclosure are provided. Compositions comprising delivery vehicles (such as rAAV) described herein are provided. Such compositions also comprise a pharmaceutically acceptable carrier. The compositions may also comprise other ingredients such as diluents and adjuvants. Acceptable carriers, diluents and adjuvants are nontoxic to recipients and are preferably inert at the dosages and concentrations employed, and include buffers such as phosphate, citrate, or other organic acids; antioxidants such as ascorbic acid; low molecular weight polypeptides; proteins, such as serum albumin, gelatin, or immunoglobulins; hydrophilic polymers such as polyvinylpyrrolidone; amino acids such as glycine, glutamine, asparagine, arginine or lysine; monosaccharides, disaccharides, and other carbohydrates including glucose, mannose, or dextrins; chelating agents such as EDTA; sugar alcohols such as mannitol or sorbitol; salt-forming counterions such as sodium; and/or nonionic surfactants such as Tween, pluronics or polyethylene glycol (PEG).

[0136] Titers of rAAV to be administered in methods of the invention will vary depending, for example, on the particular rAAV, the mode of administration, the treatment goal, the individual, and the cell type(s) being targeted, and may be determined by methods standard in the art. Titers of rAAV may range from about 1×10⁶, about 1×10⁷, about 1×10⁸, about 1×10⁹, about 1×10¹⁰, about 1×10¹¹, about 1×10¹², about 1×10¹³, about 1×10¹⁴, about 1×10¹⁶, or more DNase resistant particles (DRP) [or viral genomes (vg)] per ml.

[0137] Methods of transducing a target cell with a delivery vehicle (such as rAAV), in vivo or in vitro, are contemplated. The in vivo methods comprise the step of administering an effective dose, or effective multiple doses, of a composition comprising a delivery vehicle (such as rAAV) to an subject (including a human patient) in need thereof. If the dose is administered prior to development of a disorder/disease, the administration is prophylactic. If the dose is administered after the development of a disorder/disease, the administration is therapeutic. An effective dose is a dose that alleviates (eliminates or reduces) at least one symptom associated with the disorder/disease state being treated, that slows or prevents progression to a disorder/disease state, that slows or prevents progression of a disorder/disease state, that diminishes the extent of disease, that results in remission (partial or total) of disease, and/or that prolongs survival. An example of a disease contemplated for prevention or treatment with methods of the invention is CMT1A. In families known to carry pathological PMP22 gene duplications or mutations, the methods can be carried out before the onset of disease. In other patients, the methods are carried out after diagnosis.

[0138] Molecular, biochemical, histological, and functional outcome measures demonstrate the therapeutic efficacy of the methods. Outcome measures are described, for example, in Chapters 32, 35 and 43 of Dyck and Thomas, Peripheral Neuropathy, Elsevier Saunders, Philadelphia, PA, 4^{th} Edition, Volume 1 (2005) and in Burgess et al., Methods MoL. Biol., 602: 347-393 (2010). Outcome measures include, but are not limited to, one or more of the reduction or elimination of mutant PMP22 mRNA or protein in affected tissues, PMP22 gene knockdown, increased body weight and improved muscle strength. Others include, but are not limited to, nerve histology (axon number, axon size and myelination), neuromuscular junction analysis, and muscle weights and/or muscle histology. Others include, but are not limited to, nerve conduction velocity-ncv, electromyography-emg, and synaptic physiology.

[0139] In the methods of the disclosure, expression of PMP22 in a subject is inhibited by at least 10, at least 20, at least 30, at least 40, at least 50, at least 60, at least 70, at least 80, at least 90, at least 95, at least 98 percent, at least 99 percent, or 100 percent compared to expression in the subject before treatment.

[0140] Combination therapies are also contemplated by the invention. Combination as used herein includes both simultaneous treatment and sequential treatments. Combinations of methods described herein with standard medical treatments and supportive care are specifically contemplated.

[0141] Administration of an effective dose of a nucleic acid, viral vector, or composition of the disclosure may be by routes standard in the art including, but not limited to, intramuscular, parenteral, intravascular, intravenous, oral, buccal, nasal, pulmonary, intracranial, intracerebroventricular, intrathecal, intraosseous, intraocular, rectal, or vaginal. An effective dose can be delivered by a combination of routes. For example, an effective dose is delivered intravenously and intramuscularly, or intravenously and intracerebroventricularly, and the like. An effective dose can be delivered in sequence or sequentially. An effective dose can be delivered simultaneously. Route(s) of administration and serotype(s) of AAV components of the rAAV (in particular, the AAV ITRs and capsid protein) of the invention are chosen and/or matched by those skilled in the art taking into account the infection and/or disease state being treated and the target cells/tissue(s) that are to express the miRNAs.

[0142] In particular, actual administration of delivery vehicle (such as rAAV) may be accomplished by using any physical method that will transport the delivery vehicle (such as rAAV) into a target cell of an subject. Administration includes, but is not limited to, injection into muscle, the bloodstream and/or directly into the nervous system or liver. Simply resuspending a rAAV in phosphate buffered saline has been demonstrated to be sufficient to provide a vehicle useful for muscle tissue expression, and there are no known restrictions on the carriers or other components that can be co-administered with the rAAV (although compositions that degrade DNA should be avoided in the normal manner with rAAV). Capsid proteins of a rAAV may be modified so that the rAAV is targeted to a particular target tissue of interest such as glial cells (e.g., Schwann cells). See, for example, WO 02/053703, the disclosure of which is incorporated by reference herein. Pharmaceutical compositions can be prepared as injectable formulations or as topical formulations to be delivered to the muscles by transdermal transport. Numerous formulations for both intramuscular injection and transdermal transport have been previously developed and can be used in the practice of the invention. The delivery vehicle (such as rAAV) can be used with any pharmaceutically acceptable carrier for ease of administration and handling.

[0143] A dispersion of delivery vehicle (such as rAAV) can also be prepared in glycerol, sorbitol, liquid polyethylene glycols and mixtures thereof and in oils. Under ordinary conditions of storage and use, these preparations contain a preservative to prevent the growth of microorganisms. In this connection, the sterile aqueous media employed are all readily obtainable by standard techniques well-known to those skilled in the art.

[0144] The pharmaceutical forms suitable for injectable use include sterile aqueous solutions or dispersions and sterile powders for the extemporaneous preparation of sterile injectable solutions or dispersions. In all cases the form must be sterile and must be fluid to the extent that easy syringeability exists. It must be stable under the conditions of manufacture and storage and must be preserved against the contaminating actions of microorganisms such as bacteria and fungi. The carrier can be a solvent or dispersion medium containing, for example, water, ethanol, polyol (for example, glycerol, propylene glycol, liquid polyethylene glycol, sorbitol and the like), suitable mixtures thereof, and vegetable oils. The proper fluidity can be maintained, for example, by the use of a coating such as lecithin, by the maintenance of the required particle size in the case of a dispersion and by the use of surfactants. The prevention of the action of microorganisms can be brought about by various antibacterial and antifungal agents, for example, parabens, chlorobutanol, phenol, sorbic acid, thimerosal and the like. In many cases it will be preferable to include isotonic agents, for example, sugars or sodium chloride. Prolonged absorption of the injectable compositions can be brought about by use of agents delaying absorption, for example, aluminum monostearate and gelatin.

[0145] Sterile injectable solutions are prepared by incorporating rAAV in the required amount in the appropriate solvent with various other ingredients enumerated above, as required, followed by filter sterilization. Generally, dispersions are prepared by incorporating the sterilized active ingredient into a sterile vehicle which contains the basic dispersion medium and the required other ingredients from those enumerated above. In the case of sterile powders for the preparation of sterile injectable solutions, the preferred methods of preparation are vacuum drying and the freeze drying technique that yield a powder of the active ingredient plus any additional desired ingredient from the previously sterile-filtered solution thereof.

[0146] Transduction of cells such as Schwann cells with rAAV provided herein results in sustained expression of PMP22 miRNAs. The present invention thus provides methods of administering/delivering rAAV which express PMP22 miRNAs to a subject, preferably a human being. These methods include transducing cells and tissues (including, but not limited to, glial cells such as Schwann cells, peripheral motor neurons, sensory motor neurons, tissues such as muscle, and organs such as liver and brain) with one or more rAAV described herein. Transduction may be carried out with gene cassettes comprising cell-specific control elements.

[0147] The term “transduction” is used to refer to, as an example, the administration/delivery of miPMP22s to a target cell either in vivo or in vitro, via a replication-deficient rAAV described herein resulting in the expression of miPMP22s by the target cell (e.g., Schwann cells).

[0148] Thus, methods are provided of administering an effective dose (or doses, administered essentially simultaneously or doses given at intervals) of rAAV described herein to subject in need thereof.

### Other Terminology

[0149] As used herein, singular forms “a,” “and,” and “the” include plural referents unless the context clearly indicates otherwise. Thus, for example, reference to “an antibody” includes multiple antibodies.

[0150] As used herein, all numerical values or numerical ranges include whole integers within or encompassing such ranges and fractions of the values or the integers within or encompassing ranges unless the context clearly indicates otherwise. Thus, for example, reference to a range of 90-100%, includes 91%, 92%, 93%, 94%, 95%, 95%, 97%, etc., as well as 91.1%, 91.2%, 91.3%, 91.4%, 91.5%, etc., 92.1%, 92.2%, 92.3%, 92.4%, 92.5%, etc., and so forth. In another example, reference to a range of 1-5,000-fold includes 1-, 2-, 3-, 4-, 5-, 6-, 7-, 8-, 9-, 10-, 11-, 12-, 13-, 14-, 15-, 16-, 17-, 18-, 19-, or 20-fold, etc., as well as 1.1-, 1.2-, 1.3-, 1.4-, or 1.5-fold, etc., 2.1-, 2.2-, 2.3-, 2.4-, or 2.5-fold, etc., and so forth.

[0151] “About” a number, as used herein, refers to range including the number and ranging from 10% below that number to 10% above that number. “About” a range refers to 10% below the lower limit of the range, spanning to 10% above the upper limit of the range.

[0152] As used herein, “can” or “can be” indicates something contemplated by the inventors that is functional and available as part of the subject matter provided.

### EXAMPLES

[0153] Aspects and exemplary embodiments of the invention are illustrated by the following examples.

### Example 1

Design and in vitro Testing of miPMP22 Targeting PMP22

[0154] Artificial miRNAs are based on the natural mir-30, maintaining important structural and sequence elements required for normal miRNA biogenesis but replacing the mature mir-30 sequences with 22-nt of complementarity with the PMP22 gene. See FIG. 1 which shows an exemplary general miRNA shuttle structure.

[0155] The PMP22 artificial miRNAs (miPMP22s) were designed to target conserved regions between the mouse PMP22 gene and the human PMP22 gene. A full length human PMP22 cDNA sequence is shown in FIG. 2 and with a translation in FIG. 3, while a mouse PMP22 cDNA is shown in FIG. 4. All the miPMP22s bind to conserved regions of the 3′ UTR in Exon 5. FIG. 5 shows the binding sites of six miRNAs referred to herein as miPMP22-868, miPMP22-871, miPMP22-1706, miPMP22-1740, miPMP22-1741 and miPMP22-1834 within a human PMP22 cDNA.

[0156] The miPMP22-868 DNA template sequence is
[0157] 5′CTCGAGTGAGCGAGTGGGGGTTGCTGTTGATTGACTGTAAAGCCACAGATGGGTCAATCAACAGCA ATCCCCACCTGCCTACTAGT3′ (SEQ ID NO: 1), which encodes the full length RNA sequence
[0158] 5′CUCGAGUGAGCGAGUGGGGGUUGCUGUUGAUUGACUGUAAAGCCACAGAUGGGUCAAUCAACAGCA AUCCCCACCUGCCUACUAGU3′ (SEQ ID NO: 9). FIG. 6 shows the folded full length RNA sequence generated using Unafold. The processed mature double-stranded miPMP22-868 is

```
    5′ UGGGGGUUGCUGUUGAUUGACU 3′ Sense strand (passenger strand) (SEQ ID NO: 43)
          ||||||||||||||||||||
3′ CCACCCCUAACGACAACUAACU 5′ Antisense strand (guide strand) (SEQ ID NO: 17)
```

while the processed antisense guide strand is 5′ UCAAUCAACAGCAA. CCCCACC 3′ (SEQ ID NO: 17).

[0159] The fifteenth nucleotide in the antisense guide strand was changed to a “U” so that instead of a traditional Watson-Crick base pair (C:G) at that position in the duplex, the base pair is a wobble U:G base pair for two main reasons. See FIG. 7. First, the mouse and human PMP22 genes have a sequence polymorphism at this binding site. In humans, the nucleotide is a G, while in mice it is an A. RNA molecules can form G:U base pairs (2 hydrogen bonds) as well as G:C base pairs (3 hydrogen bonds). Like DNA, RNA cannot form G:A base-pairs. Thus, the nucleotide is changed to a U, so that it can base pair with both the mouse and human PMP22 transcripts at this position. Second, changing this base also reduced the G:C content of the miRNA duplex from about 55% to 50%. A long stretch of five consecutive G:C base pairs at the 3′ end of the antisense molecule could possibly inhibit unwinding of the duplex and reduce silencing. Because G:U base-pairs have only two hydrogen bonds, while GC base-pairs have three hydrogen bonds, inserting the U at this position still allows base-pairing of the antisense and sense strands of the miRNA but with a slightly weaker interaction.

[0160] The miPMP22-871 DNA template sequence is
[0161] 5′CTCGAGTGAGCGAGGGGTTGCTGTTGATTGAAGACTGTAAAGCCACAGATGGGTCTTCAATCAACA GCAATCCCCTGCCTACTAGT3′ (SEQ ID NO: 2), which encodes the full length RNA sequence
[0162] 5′CUCGAGUGAGCGAGGGGUUGCUGUUGAUUGAAGACUGUAAAGCCACAGAUGGGUCUUCAAUCAACA GCAAUCCCCUGCCUACUAGU3′ (SEQ ID NO: 10). FIG. 8 shows the folded full length RNA sequence generated using Unafold. The processed mature double-stranded miPMP22-871 is

```
    5′ GGGUUGCUGUUGAUUGAAGACU 3′ Sense strand (passenger strand) (SEQ ID NO: 44)
          ||||||||||||||||||||
3′ CCCCUAACGACAACUAACUUCU 5′ Antisense strand (guide strand) (SEQ ID NO: 18)
```

while the processed antisense guide strand is 5′ UCUUCAAUCAACAGCAA CCCC 3′ (SEQ ID NO: 18).

[0163] In a similar manner to miPMP22-868, the eighteenth nucleotide in the miPMP22-871 antisense guide strand was changed to a “U”. See FIG. 7.

[0164] The miPMP22-869 DNA template sequence is
[0165] 5′CTCGAGTGAGCGATGGGGGTTGCTGTTGATTGAACTGTAAAGCCACAGATGGGTTCAATC AACAGCAATCCCCACTGCCTACTAGT3′ (SEQ ID NO: 3), which encodes the full length RNA sequence
[0166] 5′CUCGAGUGAGCGAUGGGGGUUGCUGUUGAUUGAACUGUAAAGCCACAGAUGGGUUCAAUC AACAGCAAUCCCCACUGCCUACUAGU3′ (SEQ ID NO: 11). FIG. 9 shows the folded full length RNA sequence generated using Unafold. The processed mature double-stranded miPMP22-869 is

5′ GGGGGUUGCUGUUGAUUGAACU 3′ Sense strand (passenger strand) (SEQ ID NO: 45)
||||||||||||||||||||
3′ CACCCCUAACGACAACUAACUU 5′ Antisense strand (guide strand) (SEQ ID NO: 19)

while the processed antisense guide strand is 5′ UUCAAUCAACAGCAA CCCCAC 3′ (SEQ ID NO: 19). In a similar manner to miPMP22-868, the sixteenth nucleotide in the miPMP22-869 antisense guide strand was changed to a “U”.

[0167] The miPMP22-872 DNA template sequence is
[0168] 5′CTCGAGTGAGCGAGGGTTGCTGTTGATTGAAGATCTGTAAAGCCACAGATGGGATCTTCA ATCAACAGCAATCCCTGCCTACTAGT3′ (SEQ ID NO: 4), which encodes the full length RNA sequence
[0169] 5′CUCGAGUGAGCGAGGGUUGCUGUUGAUUGAAGAUCUGUAAAGCCACAGAUGGGAUCUUCA AUCAACAGCAAUCCCUGCCUACUAGU3′ (SEQ ID NO: 12). FIG. 10 shows the folded full length RNA sequence generated using Unafold. The processed mature double-stranded miPMP22-872 is

5′ GGUUGCUGUUGAUUGAAGAUCU 3′ Sense strand (passenger strand) (SEQ ID NO: 46)
||||||||||||||||||||
3′ CCCCAACGACAACUAACUUCUA 5′ Antisense strand (guide strand) (SEQ ID NO: 20)

while the processed antisense guide strand is 5′ AUCUUCAAUCAACAGCAA CCC 3′ (SEQ ID NO: 20). In a similar manner to miPMP22-868, the nineteenth nucleotide in the miPMP22-869 antisense guide strand was changed to a “U”.

[0170] The miPMP22-1706 DNA template sequence is
[0171] 5′CTCGAGTGAGCGACTCCAAGGACTGTCTGGCAATCTGTAAAGCCACAGATGGGATTGCCAGACAGT CCTTGGAGGTGCCTACTAGT3′ (SEQ ID NO: 5), which encodes the full length RNA sequence
[0172] 5′CUCGAGUGAGCGACUCCAAGGACUGUCUGGCAAUCUGUAAAGCCACAGAUGGGAUUGCCAGACAGU CCUUGGAGGUGCCUACUAGU3′ (SEQ ID NO: 13). FIG. 11 shows the folded full length RNA sequence generated using Unafold. The processed mature double-stranded miPMP22-1706 is

5′ UCCAAGGACUGUCUGGCAAUCU 3′ Sense strand (passenger strand) (SEQ ID NO: 47)
||||||||||||||||||||
3′ GGAGGUUCCUGACAGACCGUUA 5′ Antisense strand (guide strand) (SEQ ID NO: 21)

while the processed antisense guide strand is 5′ AUUGCCAGACAGUCCUUGGAGG 3′ (SEQ ID NO: 21). The binding of miPMP22-1706 to mouse PMP22 includes a G:U base-pair (which has two hydrogen bonds) as shown below.

```
5′ GUUCUGUGCCUCCAAGGACUGUCUGGCAAUGACUUGUA 3′ HUMAN PMP22 (SEQ ID NO: 48)
                      ||||||||||||||||||||||
3′ GGAGGUUCCUGACAGACCGUUA 5′ miPMP22-1706 (SEQ ID NO: 21)
                      ||||||||||||||||||||||
5′ GUUCUGUGCCUCCAAGGACUGUCUGGCGAUGACUUGUA 3′ MOUSE PMP22 (SEQ ID NO: 49)
```

[0173] The miPMP22-1740 DNA template sequence is
[0174] 5′CTCGAGTGAGCGACACCAACTGTAGATGTATATACTGTAAAGCCACAGATGGGTATATACATCTAC AGTTGGTGGTGCCTACTAGT3′ (SEQ ID NO: 6), which encodes the full length RNA sequence
[0175] 5′CUCGAGUGAGCGACACCAACUGUAGAUGUAUAUACUGUAAAGCCACAGAUGGGUAUAUACAUCUAC AGUUGGUGGUGCCUACUAGU3′ (SEQ ID NO: 14). FIG. 12 shows the folded full length RNA sequence generated using Unafold. The processed mature double-stranded miPMP22-1740 is

5′ ACCAACUGUAGAUGUAUAUACU 3′ Sense strand (passenger strand) (SEQ ID NO: 50)
||||||||||||||||||||
3′ GGUGGUUGACAUCUACAUAUAU 5′ Antisense strand (guide strand) (SEQ ID NO: 22)

while the processed antisense guide strand is 5′ UAUAUACAUCUACAGUUGGUGG 3′ (SEQ ID NO: 22). The binding of miPMP22-1740 to human and mouse PMP22 is shown below.

```
5′ UUGGCCACCAACUGUAGAUGUAUAUAUGGU 3′ HUMAN PMP22 (SEQ ID NO: 51)
              ||||||||||||||||||||||
3′ GGUGGUUGACAUCUACAUAUAU 5′ miPMP22-1740 (SEQ ID NO: 22)
              ||||||||||||||||||||||
5′ UUGGCCACCAACUGUAGAUGUAUAUACGGU 3′ MOUSE PMP22 (SEQ ID NO: 52)
```

[0176] The miPMP22-1741 DNA template sequence is
[0177] 5′ CTCGAGTGAGCGAACCAACTGTAGATGTATATATCTGTAAAGCCACAGATGGGATATATA CATCTACAGTTGGTGTGCCTACTAGT3′ (SEQ ID NO: 7), which encodes the full length RNA sequence
[0178] 5′CUCGAGUGAGCGAACCAACUGUAGAUGUAUAUAUCUGUAAAGCCACAGAUGGGAUAUAUA CAUCUACAGUUGGUGUGCCUACUAGU3′ (SEQ ID NO: 15). FIG. 13 shows the folded full length RNA sequence generated using Unafold. The processed mature double-stranded miPMP22-1741 is

5′ CCAACUGUAGAUGUAUAUAUCU 3′ Sense strand (passenger strand) (SEQ ID NO: 53)
||||||||||||||||||||
3′ GUGGUUGACAUCUACAUAUAUA 5′ Antisense strand (guide strand) (SEQ ID NO: 23)

while the processed antisense guide strand is 5′ AUAUAUACAUCUACAGUUGGUG 3′ (SEQ ID NO: 23). The binding of miPMP22-1741 to human and mouse PMP22 is shown below.

```
5′ UUGGCCACCAACUGUAGAUGUAUAUAUGGU 3′ HUMAN PMP22 (SEQ ID NO: 51)
                ||||||||||||||||||||||
3′ GUGGUUGACAUCUACAUAUAUA 5′ miPMP22-1741 (SEQ ID NO: 23)
                |||||||||||||||||||||
5′ UUGGCCACCAACUGUAGAUGUAUAUACGGU 3′ MOUSE PMP22 (SEQ ID NO: 52)
```

[0179] The miPMP22-1834 DNA template sequence is
[0180] 5′CTCGAGTGAGCGATGGACTAAGATGCATTAAAATCTGTAAAGCCACAGATGGGATTTTGATGCATC TTAGTCCACTGCCTACTAGT 3′ (SEQ ID NO: 8), which encodes the full length RNA sequence
[0181] 5′CUCGAGUGAGCGAUGGACUAAGAUGCAUUAAAAUCUGUAAAGCCACAGAUGGGAUUUUGAUGCAUC UUAGUCCACUGCCUACUAGU3′ (SEQ ID NO: 16). FIG. 14 shows the folded full length RNA sequence generated using Unafold. The processed mature double-stranded miPMP22-1834 is

5′ GGACUAAGAUGCAUUAAAAUCU 3′ Sense strand (passenger strand) (SEQ ID NO: 54)
||||||||||||||||||||
3′ CACCUGAUUCUACGUAGUUUUA 5′ Antisense strand (guide strand) (SEQ ID NO: 24)

while the processed antisense guide strand is 5′ AUUUUGAUGCAUCUUAGUCCAC 3′ (SEQ ID NO: 24). The binding of miPMP22-1834 to human and mouse PMP22 is shown below.

```
5′ CUGUGUGGACUAAGAUGCAUUAAAAUAAAC 3′ HUMAN PMP22 (SEQ ID NO: 55)
                  ||||||||||||||||||||||||
3′ CACCUGAUUCUACGUAGUUUUA 5′ miPMP22-1834 (SEQ ID NO: 24)
                  ||||||||||||||||||||||||
5′ CUGUGUGGACUAAGAUGCAUCAAAAUAAAC 3′ MOUSE PMP22 (SEQ ID NO: 56)
```

[0182] Otherwise, the miPMP22 sequences were generally designed according to Boudreau et al., Chapter 2 of Harper (Ed.), RNA Interference Techniques, Neuromethods, Vol. 58, Springer Science+Business Media, LLC (2011).

[0183] This design strategy provides two major advantages: (1) non-allele specific PMP22 gene silencing and (2) testing for efficacy in mice with direct translatability in humans.

### Example 2

In Vitro Testing of miPMP22s

[0184] The miPMP22 template sequences were cloned into the U6T6 expression vector [Boudreau et al., pages 19-37 in RNA Interference Methods, Harper (Ed.), Humana Springer Press (2011). The miRNA expression cassette is ˜500 bp in size. The miPMP22s were then co-expressed with Human PMP22 (synthesized by Genscript in pCDNA3.1 expression vector) in HEK293T cells using a 4:1 miR:target molar ratio. Cells were transfected using Lipofectamine2000 and incubated for 24 h. Total RNA was collected using Trizol (Invitrogen), random primed cDNA was synthesized (High Capacity cDNA RT Kit, ThermoFisher), and PMP22 knock-down was assessed by qRT-PCR using a Taqman probe against human and murine PMP22 (Hs00165556_m1, Mm01333393_m1, ThermoFisher).

[0185] The qRT-PCR knock-down testing identified three lead candidates: miPMP22-868, miMPM22-871, and miPMP22-872. These three miPMP22s were able to significantly reduce Human PMP22 transcript level compared to the untreated (“no miR”) condition (FIG. 15). Results are the average of three independent experiments.

[0186] Template sequences encoding the two strongest miPMP22s (868 and 871) were cloned into a scAAV9 for in vivo delivery as described below.

### Example 3

Production of scAAV9 Encoding miPMP22s

[0187] The miPMP22-868 and -871 template sequences were cloned into the scAAV9 construct generically named “scAAV-NP.U6.miPMP22.CMV.eGFP” for in vivo delivery. The scAAV9 also contained a CMV promoter-driven eGFP reporter gene. The scAAV9 comprised a mutant AAV2 inverted terminal repeat (ITR) and a wild type AAV2 ITR that enable packaging of self-complementary AAV genomes. The resulting scAAV9 are referred to as “AAV9-miR868” (short for the scAAV9 construct scAAV-NP.U6.miPMP22-868.CMV.eGFP) and “AAV9-miR871” (short for the scAAV9 construct scAAV-NP.U6.miPMP22-871.CMV.eGFP). A non-targeting scAAV referred to as “AAV9-miRLacZ” (short for a scAAV construct scAAV-NP.U6.miRLacZ.CMV.eGFP).

[0188] The scAAV9 were produced by transient transfection procedures using a double-stranded AAV2-ITR-based vector, with a plasmid encoding Rep2Cap9 sequence as previously described [Gao et al., J. Virol., 78: 6381-6388 (2004)] along with an adenoviral helper plasmid pHelper (Stratagene, Santa Clara, CA) in 293 cells. The scAAV9 were produced in three separate batches for the experiments and purified by two cesium chloride density gradient purification steps, dialyzed against PBS and formulated with 0.001% Pluronic-F68 to prevent virus aggregation and stored at 4° C. All vector preparations were titered by quantitative PCR using Taq-Man technology. Purity of vectors was assessed by 4-12% sodium dodecyl sulfate-acrylamide gel electrophoresis and silver staining (Invitrogen, Carlsbad, CA). scAAV9 viruses were generated and titered by the Viral Vector Core at The Research Institute at Nationwide Children's Hospital.

### Example 4

### Animal Model

[0189] A C61-Het mice colony was established starting from two breeding pairs gifted by Prof. R. Martini (University Hospital of Wurzburg). This model is known to express four copies of the human PMP22 gene in addition to the endogenous mouse gene resulting to a two-fold overexpression of human PMP22 transgene when compared to endogenous wild type murine PMP22 [Huxley et al., (1996) supra; Huxley et al., (1998) supra; and Sereda et al., NeuroMolecular Med., 8(1-2): 205-216 (2006)]. All experimental procedures were conducted in accordance with animal care protocols approved by the Cyprus Government's Chief Veterinary Officer (project license CY/EXP/PR.L2/2012) according to national law, which is harmonized with EU guidelines (EC Directive 86/609/EEC).

### Example 5

### Intrathecal Vector Delivery

[0190] AAV9-miR871 (targeting), AAV9-miR868 (targeting) and AAV9-miRLacZ viruses (non-targeting control) were injected intrathecally into 2-month or 2-month old C61 Het mice to examine their effect on human/mouse PMP22 and other myelin-related proteins. For intrathecal delivery, a 50-μL Hamilton syringe connected to a 26-gauge needle was used to inject 20 μl of AAV9 stock containing an estimated amount of AAV9-miRLacZ: 1.66×10¹³ DRP/ml, AAV9-miR871: 3.0×10¹³ DRP/ml, or AAV9-miR868: 2.7×10¹³ DRP/ml vectors into anesthetized mice in the L5-L6 intrathecal space at a slow rate of 5 μl/min. A correct injection was verified by flick of the tail as previously described [Kagiava et al., P.N.A.S. USA, 113(17): E2421-E2429 (2016); Kagiava et al., Hum. Mol. Genet., 27(8):1460-1473 (2018); Kagiava et al., Methods in Molecular Biology, 1791: 277-285 (2018); and Schiza et al., Brain, 142(5): 1227-1241 (2019)].

### Example 6

### Biodistribution and Expression

[0191] The AAV9 miR871 (targeting) and miRLacZ viruses (non-targeting control) were injected intrathecally as described above into the 2-month old C61 Het mice to examine their effect on human/mouse PMP22 and other myelin-related proteins. Mice were analyzed for immunostaining after 4 and 8 weeks post-injection for the eGFP reporter gene expression as well as by Real-Time PCR or immunoblot analysis of the PMP22 expression 6 weeks post-injection. AAV9 vector biodistribution in PNS tissues was also assessed by Vector Genome Copy Number (VGCN) analysis.

[0192] For immunohistochemistry, mice were anaesthetized and transcardially perfused with phosphate-buffered saline (PBS) followed by fresh 4% paraformaldehyde. The lumbar spinal cord with spinal roots attached as well as sciatic and femoral nerves were dissected and frozen for cryosections. Part of the sciatic and femoral nerves were also teased into fibers under a stereoscope. Sections and fibers were permeabilized in cold acetone and incubated at room temperature with a blocking solution of 5% BSA containing 0.5% Triton-X for 1 h. The slides were incubated overnight at 4° C. with the primary antibody which was rabbit antisera against eGFP (1:2,000; Invitrogen) diluted in blocking solution. Slides were then washed in PBS and incubated with rabbit cross-affinity purified secondary antibody (Jackson ImmunoResearch, diluted 1:500) for 1 h at room temperature. Cell nuclei were visualized with DAPI. Slides were mounted with fluorescent mounting medium and images were photographed under a fluorescence microscope with a digital camera using NIS-elements software (Nikon). eGFP was also visible as an auto-fluorescent signal without employing an anti-eGFP antibody. The percentage of eGFP+SCs of lumbar spinal roots, sciatic nerves and femoral nerves was counted as recently described [Kagiava et al, Hum. Mol. Genet., 28(21): 3528-3616 (2019)].

[0193] For Immunoblot analysis, fresh lumbar roots, sciatic and femoral nerves were collected from groups of C61 Het mice that were intrathecally injected at 2 months of age with AAV9-miR871 or AAV9-miRLacZ vectors and sacrificed either at 4 and 8 weeks post-injected (biodistribution experiments) or at six weeks post-injection (silencing experiments), lysed in ice-cold RIPA buffer (10 mM sodium phosphate, pH 7.0, 150 mM NaCl, 2 mM EDTA, 50 mM sodium fluoride, 1% Nonidet P-40, 1% sodium deoxycholate, and 0.1% SDS) containing a mixture of protease inhibitors (Roche). Proteins (150 μg) from the lysates were fractionated by 12% SDS/PAGE and then transferred to a PVDF membrane (GE Healthcare Life Sciences) using a semidry transfer unit. Nonspecific sites on the membrane were blocked with 5% nonfat milk in PBS with Tween 20 (PBST) for 1 h at room temperature. Immunoblots were incubated with anti-huPMP22 (1:500 Abcam), anti-eGFP (1:1000 Abcom) and anti-msTubulin (1:3000; Developmental Studies Hybridoma Bank, for loading control) antibodies at 4° C. overnight. After washing with PBST, the immunoblots were incubated with HRP-conjugated secondary antiserum (Jackson ImmunoResearch, diluted 1:3000) in 5% milk-PBST for 1 h. Blots were again washed with PBST and the bound antibody was visualized by an enhanced chemiluminescence system (GE Healthcare Life Sciences).

[0194] For Real-Time PCR analysis, RNA was isolated from snap-frozen lumbar roots, sciatic and femoral nerves from groups of C61 Het mice that were intrathecally injected at 2 months of age with AAV9-miR871, AAV9-miR868 or AAV9-miRLacZ vectors and sacrificed six weeks post-injection using Qiagen RNeasy® Lipid Tissue Mini Kit following the manufacturer's protocol. After DNase treatment, RNA was quantified by spectrophotometry and 0.3 μg of RNA was used to synthesize cDNA employing TaqMan™ reverse-transcription reagents. Then the levels of huPMP22, muPMP22, muMPZ, muCNP, muGldn and muGJB1 mRNA were quantified using Taqman gene expression assays (Applied Biosystems) and muGAPDH assay as an endogenous control. huPMP22, muPMP22, muMPZ, muCNP muGldn and muGJB1 expression levels in AAV9-miR871 and AAV9-miR868 treated mice were compared to analogous expression levels of AAV9-miRLacZ treated littermates.

[0195] For Vector Genome Copy Number (VGCN) analysis, DNA was extracted from lumbar root and sciatic nerves using Meslo MagPurix Tissue DNA extraction kit following manufacturer instructions. For detection and quantification of vector genomes in extracted DNA, Droplet Digital PCR analysis was conducted using probes against on eGFP (reporter gene) and TRFC (loading control). The average VGCN per cell was calculated as the total VGCN divided by the total cell number.

[0196] Immunostaining (percentage of eGFP-expressing cells) and immunoblot (normalized ratio of optic densities) data were compared using unpaired Student t-test GraphPad Prism5 software. Significance level for all comparisons, P<0.05. Further details of each statistical analysis are indicated with each result.

[0197] In lumbar roots of adult mice, expression rates analysis showed that 45.96% and 56.82% of all PNS cells were positive for eGFP, 4 and 8 weeks post injection, respectively (FIG. 16). In sciatic nerves, expression rates analysis showed that 42.06% and 45.74% of all cells were positive for eGFP, 4 and 8 weeks post injection, respectively (FIG. 17). In femoral nerves, expression rates analysis showed that 31.06% and 41.09% of cells were positive for eGFP, 4 and 8 weeks post injection, respectively (FIG. 18). As expected from the fact that expression was driven by ubiquitous promoters, we also detected eGFP signal along axons both in the spinal cord as well as in lumbar roots, sciatic and femoral nerves.

[0198] The expression of eGFP in adult mice was also demonstrated by immunoblot analysis using the anti-eGFP antibody in lumbar root and sciatic nerve lysates obtained from two groups of 2-month old mice which were intrathecally injected with AAV9-U6-miRLacZ-CMV-eGFP. For this purpose, fresh lumbar roots and sciatic nerves were collected at 4 and 8 weeks post-injection and lysed in ice-cold RIPA buffer. The predicted eGFP protein band at 30 kDa was detectable in lumbar roots (Average roots eGFP/Tub ratio: 4 weeks: 0.96, 8 weeks: 1.01) as well as in sciatic nerves (Average sciatic nerve eGFP/Tub ratio: 4 weeks: 0.46, 8 weeks: 1.03) of examined AAV9-miLacZ treated mice compared to the negative control, but not at the same level (FIG. 19 A, B, D, E).

[0199] Furthermore, VGCN analysis performed on the extracted genomic DNA from lumbar roots (Average roots VGCN: 4 weeks: 3.25, 8 weeks: 1.9) and sciatic nerves (Average sciatic nerve VGCN: 4 weeks: 0.41, 8 weeks: 0.38) of mice 4 and 8 weeks post injection showed overall an adequate and stable over time biodistribution although with variation among animals (FIG. 19 C, F).

### Example 7

### In Vivo AAV-Mediated Gene Silencing of PMP22

[0200] After confirming adequate biodistribution and expression of the control AAV9-miRLacZ vector in PNS tissues, the effects of AAV9-miR871 and AAV9-miR868 at selected transcripts of C61-Het mice were assessed.

[0201] The lumbar roots of the C61-Het mice treated with AAV9-miR871 showed reduced human and mouse PMP22 mRNA levels by 0.29 and 0.25 fold, respectively, while mRNA levels of other myelin related proteins including GJB1, MPZ, CNP and Gldn were increased by 0.72, 0.54, 0.36 and 0.61 fold, respectively (FIG. 20). In accordance, the sciatic nerves of the mice treated with AAV9-miR871 showed reduced levels of human and mouse PMP22 mRNA levels by 0.46 and 0.49 fold, respectively, while mRNA levels of other myelin related proteins including GJB1, MPZ, CNP and Gldn were increased by 0.32, 0.16, 9.16 and 5.06 fold, respectively (FIG. 21). The femoral nerves of the AAV9-miR871 treated mice showed reduced levels of human and mouse PMP22 mRNA levels by 0.54 and 0.53 fold, respectively, while mRNA levels of other myelin related proteins including GJB1, MPZ, CNP and Gldn were increased by 2.49, 2.3, 2.12 and 1.96 fold, respectively (FIG. 22).

[0202] The lumbar roots of the C61-Het mice treated with AAV9-miR868 showed reduced human and mouse PMP22 mRNA levels by 0.27 and 0.01 fold, respectively, while mRNA levels of other myelin related proteins including GJB1, MPZ, CNP and Gldn were altered by −0.6, 0.21, −0.24 and 0.78 fold, respectively (FIG. 23). The sciatic nerves of the mice treated with AAV9-miR868 showed reduced levels of human and mouse PMP22 mRNA levels by 0.49 and 0.38 fold, respectively, while mRNA levels of other myelin related proteins including GJB1, MPZ, CNP and Gldn was decreased by 0.56, 0.55, 0.50 and 0.49 fold, respectively (FIG. 24). The femoral nerves of the AAV9-miR868 treated mice showed reduced levels of human and mouse PMP22 mRNA levels by 0.39 and 0.40 fold, respectively, while mRNA levels of other myelin related proteins including GJB1, MPZ, CNP and Gldn were increased by 1.44, 1.54, 2.28 and 2.30 fold, respectively (FIG. 25).

[0203] The lumbar roots of WT mice treated with AAV9-miR871 showed reduced mouse PMP22 mRNA levels by 0.36 fold, while mRNA levels of other myelin related proteins including GJB1, MPZ, CNP and Gldn were increased by 1.02, 1.31, 0.85 and 1.31 fold, respectively (FIGS. 51 and 52). In accordance, the sciatic nerves of WT mice treated with AAV9-miR871 showed reduced levels of mouse PMP22 mRNA levels by 0.52 fold while mRNA levels of other myelin related proteins including GJB1, MPZ, CNP and Gldn were increased by 2.09, 1.47, 0.79 and 1.01 fold, respectively (FIGS. 51 and 52). The femoral nerves of WT AAV9-miR871 treated mice showed reduced levels mouse PMP22 mRNA levels by 0.87 while mRNA levels of other myelin related proteins including GJB1, MPZ, CNP and Gldn were increased by 4.06, 2.29, 5.03 and 2.86 fold, respectively (FIGS. 51 and 52).

[0204] Based on the results, AAV9-miR871 was chosen as the most promising in silencing the hu/ms PMP22 mRNA while also resulting in the enhanced transcription of other myelin proteins. Therefore, its effect on human PMP22 protein levels of lumbar roots, sciatic and femoral nerves was assessed using immunoblot analysis.

[0205] PMP22 protein band was normalized using either tubulin immunoblot band or Myelin protein zero (MPZ) SDS gel band (FIG. 26), in both scenarios root HuPMP22 protein levels were shown to be significantly reduced after miR871 treatment by more than 60% (HuPMP22/Tub: 67% silencing, HuPMP22/MPZ: 64% silencing) when compared to miRLacZ treated mice. When normalize to tubulin MPZ protein expression was shown to be increased by 24% when compared to miRLacZ treated mice. Similarly, HuPMP22 protein of sciatic nerves was significantly reduced by more than 85% (HuPMP22/Tub: 87% silencing, HuPMP22/MPZ: 85% silencing) while MPZ protein expression remained unchanged (MPZ/Tub: 0.008% silencing) when compared to miRLacZ treated mice (FIG. 27). In femoral nerves HuPMP22 protein levels were significantly reduced by more than 60% (HuPMP22/Tub: 64% silencing, HuPMP22/MPZ: 72% silencing) while MPZ protein expression was significantly increased by 34% when compared to miRLacZ treated mice (FIG. 28).

[0206] Similarly, AAV9-miR871 injection in WT mice reduced the levels of murine PMP22 in lumbar roots by 66% while leaving MPZ levels unchanged (FIG. 53). In WT sciatic nerves, AAV9-miR871 injection resulted in 69% reduction of murine PMP22 while increasing MPZ protein levels by 54% (FIG. 54). WT femoral nerves responded similarly to WT lumbar roots as AAV9-miR871 injection reduced murine PMP22 protein levels by 99% while leaving MPZ protein levels unchanged (FIG. 55). Statistics: Immunoblot (ratio of optic densities) data were compared using Student t-test GraphPad Prism5 software. Significance level for all comparisons, P<0.05.

### Example 8

Therapeutic Trials with AAV9-miR871 Vector to Rescue the Mouse Model of CMT1A

[0207] After confirming adequate silencing effects of AAV9-miR871 vector in adult C61 Het mice with already advanced peripheral nerve pathology, early- and late-onset treatment trials were conducted according to the trial design shown in FIG. 29. Randomized, non-targeting vector-controlled treatment trials were conducted in the C61 Het mouse model of CMT1A using groups injected either with AAV9-miR871 or AAV9-miRLacZ at the age of 2 months (early treatment) or at the age of 6 months (late treatment).

[0208] C61-Het mice were randomized into four groups according to their age and the treatment received, AAV9-miR871 or AAV9-miRLacZ. Outcome analysis was performed four months post-injection for both treatment time points and included motor behavioral performance, motor nerve conduction studies as well as morphometric analysis to determine the degree of demyelination by measuring the percentage of thinly myelinated and demyelinated axons, along with the total number of onion bulb formations. Outcome analysis also included plasma quantification of Nfl levels as well as CD20, CD45, CD3 and CD68 marker immune response of C61 Het-AAV9-miR871 early and late treatment mice groups.

[0209] Littermate mice in each age group were randomized to either receiving the targeting vector (AAV9-miR871; treatment group) or non-targeting vector (AAV9-miRLacZ; control group). Randomization was based on animal numbering after tailing (mice with odd numbers will be randomized to treated and mice with even numbers to control treatment). Mice were evaluated by clinical testing, at the age of 6 months for early treatment and at the age of 10 months for late treatment, followed by electrophysiological study, plasma collection for Nfl analysis, as well as perfusion and quantitative morphometric and immune response analyses. Primary endpoint was considered the rescue of pathological changes in lumbar roots and femoral motor nerve. Secondary endpoints were the significant improvement in sciatic nerve motor conduction velocities, improvement in clinical motor behavioral performance, improved immunological reaction in lumbar roots, femoral motor nerve and liver as well as plasma Nfl levels.

[0210] Statistics: Behavioral, electrophysiological and morphological analysis data of the miRLacZ-, miR871-, early or late, treated mice were compared using the Mann-Whitney test GraphPad Prism5 software. Significance level for all comparisons, P<0.05. Further details of each statistical analysis are indicated in each result.

### Example 9

### Behavioral Testing

[0211] Strength and coordination were compared in treated and control-treated animals as described in [Kagiava (2016), supra; Schiza, supra]. Examiners were blinded to the treatment status (treated or control vector-treated) of the animals. Motor performance was assessed before the injection at the age of 2 (early treatment) or 6 (late treatment) months and again at 2 and 4 months post-injection by rotarod (at 5 and 17.5 rpm), foot grip and hang tests.

[0212] Rotarod testing: Motor balance and coordination was determined according to described protocols [Kagiava, Hum. MoL. Genet. (2018), supra; Savvaki, supra] using an accelerating rotarod apparatus (Ugo Basile, Italy). Training of animals was consisted of three trials per day with 15 min intervals for resting between trials for three consecutive days. Mice were placed on the rod with the speed gradually increasing from 2.5 to 25 rpm. The trial ends when the mouse falls from the rod, missteps, or when it remains on the rod for 600 s. Testing was performed on the 4^{th} day using two different speeds, 5 and 17.5 rpm. Latency (s) to fall is calculated for each speed.

[0213] Grip strength testing: To measure grip strength mice were held by the tail and lowered towards the apparatus (Ugo Basile) until they grab the grid with their hindlimbs, then gently pulled back until they release the grid. Each session consists of six consecutive trials. Measurements of the force in g were indicated on the equipment.

[0214] Wire hang testing: The wire hang test seeks to evaluate motor function and grip strength. The test begins with the animal hanging from an elevated wire. The animal was placed on the wire top, which was then inverted; the latency to when the animal falls was recorded. This test was performed once a day for three days consecutive and then the average performance was calculated.

[0215] For the early treatment group, motor performances were assessed before the injection at the age of 2 months and again 2 months post-injection and 4 months post-injection by rotarod, foot grip and hang tests (FIGS. 30-33). Comparing 2-month-old WT and non-injected C61 Het mice with the above tests proves the significantly impaired motor performance of the CMT1A model. The only test that did not show a significant difference among these two groups was rotarod at 5 rpm at 2 months of age, but it did show progressive deterioration in the CMT1A model over time that was rescued by treatment (FIG. 30). All other tests employed to assess motor performance showed that 4- and 6-month-old WT mice differ significantly to their age-matched AAV9-miRLacZ treated mice (FIGS. 30-33).

[0216] For the early treatment trial groups, 2-month-old C61 Het mice were randomly allocated to each treatment (miR871 or miRLacZ). As expected, 2 months old C61 Het mice that were either treated with AAV9-miR871 or AAV9-miRLacZ, showed no significant differences at baseline before initiating the treatment. Importantly, at 4 and 6 months of age, 2 and 4 months after treatment, all motor performance tests (rotarod 5 & 17.5 rpm, grip strength, wire hang test) showed a significant improvement of AAV9-miR871 treated mice when compared to AAV9-miLacZ treated control littermates (FIGS. 30-33).

[0217] For the late treatment group, motor performances were assessed before the injection at the age of 6 months and again 2 months post-injection and 4 months post-injection by rotarod, foot grip and hang tests (FIGS. 34-37). Comparing 6-month-old WT and non-injected C61 Het mice with the above tests proves the significantly impaired motor performance of the model. All other tests employed to assess motor performance showed that 6- and 8-month-old WT mice differ significantly to their age-matched AAV9-miRLacZ treated mice (FIGS. 34-37).

[0218] For the late treatment trial groups, 6-month-old C61 Het mice were randomly allocated to each treatment (miR871 or miRLacZ). As expected, 6 months old C61 Het mice that were either treated with AAV9-miR871 or AAV9-miRLacZ, showed no significant differences at baseline before initiating the treatment. Importantly, at 6 and 8 months of age, 2 and 4 months after treatment, all motor performance tests (rotarod 5 & 17.5 rpm, grip strength, wire hang test) showed a significant improvement of AAV9-miR871 treated mice when compared to AAV9-miLacZ treated control littermates (FIGS. 34-37).

[0219] For the WT injected groups, 2-month-WT mice were randomly allocated to each treatment (miR871 or miRLacZ). As expected, for all motor performance tests 2 months old WT mice that were either treated with AAV9-miR871 or AAV9-miRLacZ, showed no significant differences at baseline before injection. For the WT injected groups, motor performances were assessed before the injection at the age of 2 months and again 2 months post-injection and 4 months post-injection by rotarod, foot grip and hang tests (FIGS. 56-59).

[0220] Rotarod analysis of WT injected groups at 5 and 17.5 rpm showed that AAV9-miR871 injection at WT mice negatively affected their motor performance at 2 months post injection (FIGS. 56-57). This phenotype was not observed at 4 months post injection as injected and non-injected WT mice presented similar performances (FIG. 44-45). Grip strength analysis, 2 and 4 months post injection, showed significant impairment of WT mice injected with AAV9-miR871 when compared to aged-matched non-injected and mock injected WT mice (FIG. 58). Hang test analysis showed that AAV9-miR871 injection at WT mice negatively affected mice performance only at 4 months post injection time point. At all the other time points hang test performances of baseline and injected WT mice did not present any statistical significant differences (FIG. 59).

### Example 10

### Motor Nerve Conduction Velocity (MNCV), Sciatic Nerve Amplitude of the Compound Muscle Action Potential (CMAP) and Hindlimb Clasp Observation

[0221] C61 Het mice show MNCVs of sciatic nerve around 28 m/s at 2 months of age, 22 m/s at 6 and 10 months of age [Huxley (1998), supra; Kohl et al., American Journal of Pathology, 176(3): 1390-1399 (2010)]. MNCVs properties of the sciatic nerves were compared in treatment groups as described previously [Huxley (1998), supra; Kohl, supra; Zielasek et al., Muscle & Nerve, 19(8): 946-952 (1996)]. For MNCV and CMAP, the left and right sciatic nerves were stimulated in anesthetized animals at the sciatic notch and distally at the ankle via bipolar electrodes with supramaximal square-wave pulses (5 V) of 0.05 ms. MNCV was calculated by dividing the distance between the stimulating and recording electrodes by the result of subtracting the distal latency from the proximal latency. The latencies of CMAP were recorded by a bipolar electrode inserted between digits 2 and 3 of the hind paw and measured from the stimulus artifact to the onset of the negative M-wave deflection. A fixed distance was used between distal stimulation and recording sites for calculating distal latency to avoid errors arising from variations in ankle-paw distance in each mouse. MNCV and CMAP of sciatic nerve was measured for early treated group at 6 months of age, late treated group at 10 months of age and WT-injected groups at 6 months of age, with all time points being 4 months after treatment, in order to assess functional properties in treated and control mice groups.

[0222] Statistics: MNCV and CMAP were compared using One way ANOVA with Tukey's Multiple Comparison Test GraphPad Prism5 software. Significance level for all comparisons, P<0.05.

[0223] MNCV of early-treated mice sciatic nerves were measured 4 months after treatment, at the age of 6 months, in order to assess functional properties in miR871- and miRLacZ treated groups. MNCV and CMAP values were significantly improved in the miR871-treated group, reaching the average of 36.88 m/s and 3.51 mV, respectively (n=8) while MNCV and CMAP values in the miRLacZ group (n=8) were on average 25.9 m/s and 1.44 mV, respectively (FIG. 38A; p<0.0001 and FIG. 60). MNCV values of the miR871 treated group were close to those of the WT mice which the average of 41.61 m/s (n=6; p>0.05). However, CMAP values of miR871 group did not reach WT levels (WT CMAP score: 6.9 mV). Improved motor performance in early-treated C61-Het mice correlated with improvement in electrophysiological properties.

[0224] Similarly to early-treatment group, MNCV and CMAP of late-treated sciatic nerve were measured four months after treatment, at the age of 10 months, in order to assess functional properties in miR871 and miRLacZ groups. MNCV values were significantly improved in the miR871 treated group, reaching the average of 37.69 m/s (n=6) while velocities in the miRLacZ group (n=5) were on average 24.12 m/s (FIG. 39A; p=0.0040 and FIG. 61). However, MNCV values of the miR871 late-treated group did not manage to reach the values of the WT mice which had an average of 43.38 m/s (n=4; p=0.0333). CMAP values of 10-month old WT and miRLacZ mice differ significantly, with their averages being 5.33 and 2.4 mV, respectively. This phenotype was not improved after late treatment with AAV9-miR871 as the miR871 mice group had an average CMAP score of 2.98 mV. As in early-treated group, improved motor performance in early-treated C61-Het mice correlated with improvement in electrophysiological properties.

[0225] MNCV and CMAP of WT mice injected with AAV9-miRLacZ or AAV9-miR871 were measured four months after treatment, at the age of 6 months, in order to assess functional properties in miR871 and miRLacZ groups. MNCV values of WT, miRLacZ and miR871 treated groups did not differ, scoring the averages of 41.61, 42.09 and 40.07 m/s, respectively (FIG. 62A-B). CMAP values of 6 months old WT and miRLacZ mice did not differ significantly, with their averages being 6.89 and 7.03 m/V, respectively. miR871 group presented decreased CMAP score, with the average being 4.62 m/V.

[0226] Hindlimb clasping is a marker of disease progression in a number of mouse models of peripheral neuropathy [Arnaud et al., P.N.A.S. USA, 106(41): 17528-17533 (2009)]. The hindlimb clasping phenotype was observed in C61 Het mice starting from the first months of age and progressing until 10 months of age. During this observation, mice were suspended by the tail and abnormal clenching of toes and clasping was monitored as an indication of a peripheral nervous system defect.

[0227] Statistics: Hindlimbs opening angle data were compared using One way ANOVA with Tukey's Multiple Comparison Test GraphPad Prism5 software. Significance level for all comparisons, P<0.05.

[0228] Six-month-old C61 Het mice that were injected with AAV9-miRLacZ (mock) when 2 months old presented abnormal clenching of toes and clasping of hind limb phenotype upon suspension by the tail, suggestive of the presence of a peripheral nervous system defect. This phenotype was completely rescued in 6-months-old C61 Het mice that were injected with AAV9-miR871 at 2 months of age as they presented normal clenching without clasping of hind limbs (FIG. 38B).

[0229] 10-month-old C61 Het mice that were injected with AAV9-miRLacZ (mock) when 6 months old presented abnormal clenching of toes and clasping of hind limb phenotype upon suspension by the tail, suggestive of the presence of a peripheral nervous system PNS defect. Similarly to the early treatment group, this phenotype was completely rescued in 10-months-old C61 Het mice that were injected with AAV9-miR871 at 6 months of age as they presented normal clenching without clasping of hind limbs (FIG. 39B).

[0230] Non-injected WT and injected WT with either AAV9-miRLacZ or AAV9-miR871 did not presented any statistically significant difference in their hindlimb clasping phenotype (FIG. 63). Their hindlimb opening with the averages were 73.19, 70.54 and 59.09 degrees, respectively.

### Example 11

### Morphometric Analysis

[0231] Lumbar motor roots and femoral motor nerves of 6-month-old or 10-month-old AAV9-miR871 and AAV9-miRLacZ treated C61 Het mice were obtained for quantitative analysis of myelination following perfusion with 2.5% glutaraldehyde, osmication, dehydration, and embedding in araldite resin (all purchased from Agar Scientific, Essex, UK), as previously described [Kagiava (2019), supra]. Transverse semi-thin sections (1 μm) of the lumbar spinal cord with roots attached and the middle portion of the femoral motor nerves were obtained and stained with alkaline toluidine blue (Sigma-Aldrich, Munich, Germany). Sections were used to examine the degree of abnormal myelination in both groups. In brief, all demyelinated, thinly myelinated and normally myelinated axons were counted using the following criteria: axons larger than 1 μm without a myelin sheath were considered demyelinated; axons with myelin sheaths<10% of the axonal diameter were considered thinly myelinated; axons surrounded by circumferentially arranged Schwann cell processes and extracellular matrix were considered as “onion bulbs”; all other myelinated axons were considered normally myelinated. All pathological analyses were performed blinded to the treatment condition of each mouse. Morphological analysis was performed in multiple motor roots, as well as bilateral femoral motor nerves, and results were averaged per mouse. The number of abnormally myelinated fibers, including demyelinated and thinly myelinated fibers, were counted and percentage of fibers in each category was calculated. For onion bulb formations, the total number of bulbs per mouse was counted and presented as such.

[0232] Morphological analysis showed reduction in the abnormally myelinated fibers in all PNS tissues examined (roots and femoral nerve) of early treated C61-Het mice with AAV9-miR871 (FIGS. 40-43). In the anterior lumbar motor roots of the AAV9-miR871 treated mice the percentage of abnormally myelinated fibers was reduced compared to the AAV9-miRLacZ group (FIGS. 40-41). In detail, the percentage of thinly myelinated fibers was 11.74% in the AAV9-miR871 treated mice (n=16), compared with 15.35% in the AAV9-miRLacZ treated mice (n=16; p=0.0261, Mann-Whitney test). Likewise, the percentage of demyelinated fibers was 25.36% in the AAV9-miR871 treated mice (n=16), compared with 49.74% in the AAV9-miRLacZ treated mice (n=16; p<0.0001, Mann-Whitney test). Onion bulb formation was also reduced after treatment with AAV9-miR871 (average of 0.69 onion bulb formations per section; n=16) compared to AAV9-miRLacZ treated (average of 8.06 onion bulb formations/section, n=16; p<0.0001, Mann-Whitney test).

[0233] Likewise, in the femoral motor nerves of the AAV9-miR871 early-treated mice the percentage of abnormally myelinated fibers was reduced compared to the AAV9-miRLacZ group (FIGS. 42-43). The percentage of thinly myelinated fibers was 6.83% in the AAV9-miR871 treated mice (n=16), compared with 19.36% in the AAV9-miRLacZ treated mice (n=16; p<0.0001, Mann-Whitney test), while the percentage of demyelinated fibers was 1.09% in the AAV9-miR871 treated mice (n=16), compared with 2.33% in the AAV9-miRLacZ treated mice (n=16; p=0.0004, Mann-Whitney test). Not enough onion bulb formations were observed in miRLacZ femoral motor nerves of the early treatment group, resulting in no significant alternation in this formations after miR871 treatment (miRLacZ: 0.69%, miR871: 0.25%).

[0234] As in early treatment group, lumbar motor roots and femoral motor nerves of 10-month-old AAV9-miR871 or AAV9-miRLacZ treated C61 Het mice were obtained for quantitative analysis of myelination from groups of mice. Morphological analysis showed reduction in the abnormally myelinated fibers in all PNS tissues examined (roots and femoral nerve) of late treated C61-Het mice with AAV9-miR871 (FIG. 44-47). In the anterior lumbar motor roots of the AAV9-miR871 treated mice the percentage of abnormally myelinated fibers was reduced compared to the AAV9-miRLacZ group (FIG. 44-45). In detail, the percentage of thinly myelinated fibers was 14.62% in the AAV9-miR871 treated mice (n=7), compared with 19.39% in the AAV9-miRLacZ treated mice (n=7; p=0.0364, Mann-Whitney test). Likewise, the percentage of demyelinated fibers was 32.65% in the AAV9-miR871 treated mice (n=7), compared with 52.25% in the AAV9-miRLacZ treated mice (n=7; p=0.0035, Mann-Whitney test). Onion bulb formation was also reduced after treatment with AAV9-miR871 (average of 38.86 onion bulb formations per section; n=7) compared to AAV9-miRLacZ treated (average of 2.71 onion bulb formations/section, n=7; p=0.0010, Mann-Whitney test).

[0235] Likewise, in the femoral motor nerves of the AAV9-miR871 late-treated mice the percentage of abnormally myelinated fibers was reduced compared to the AAV9-miRLacZ group (FIG. 46-47). The percentage of thinly myelinated fibers was 11.31% in the AAV9-miR871 treated mice (n=10), compared with 21.95% in the AAV9-miRLacZ treated mice (n=7; p=0.0004, Mann-Whitney test). However, late treatment did not manage to reduce significantly the percentage of demyelinated fibers in AAV9-miR871 (n=10) treated mice when compared to AAV9-miRLacZ (n=7) treated mice (AAV9-miR871: 1.37%, miRLacZ: 2.08%; p=0.0544, Mann-Whitney test). Not enough onion bulb formations were observed in miRLacZ femoral motor nerves of the early treatment group, resulting in no significant alternation in this formations after AAV9-miR871 treatment (miRLacZ: 0.57%, miR871: 0.20%).

[0236] Statistics: Morphometric analysis data were compared using Mann-Whitney test GraphPad Prism5 software. Significance level for all comparisons, P<0.05.

### Example 12

### PMP22 Splice Forms

[0237] PMP22 has several splice variants. Six alternative splice forms were identified empirically in three different studies. [Visigalli et al., supra; Suter et al., supra; and Huehne and Rautenstrauss, Int. J. Mol. Med., 7(6): 669-675 (2001). In addition, Ensembl.org shows twenty-six different human PMP22 splice forms, most of which are predicted in silico. Three of these splice forms likely undergo nonsense-mediated decay (NMD) and therefore do not encode proteins. In addition, there are four other truncated, non-coding processed transcripts that could arise from this locus (Ensembl transcripts 205, 206, 227, 229). Thus, Ensembl predicts twenty-three possible protein-coding transcripts arising from the PMP22 locus, producing eight possible protein isoforms.

### Human PMP22 Splice Forms EMSEMBL.org

| Name | Transcript ID | bp | Protein | Biotype | CCDs |
|---|---|---|---|---|---|
| PMP22-215 | ENST00000674673.1 | 2423 | 160aa | Protein coding | CCDS11168 |
| PMP22-223 | ENST00000675808.1 | 2047 | 160aa | Protein coding | CCDS11168 |
| PMP22-213 | ENST00000646419.2 | 1855 | 118aa | Protein coding | CCDS82078 |
| PMP22-201 | ENST00000312280.9 | 1828 | 160aa | Protein coding | CCDS11168 |
| PMP22-210 | ENST00000612492.5 | 1828 | 160aa | Protein coding | CCDS11168 |
| PMP22-230 | ENST00000676221.1 | 1819 | 160aa | Protein coding | CCDS11168 |
| PMP22-202 | ENST00000395936.7 | 1796 | 118aa | Protein coding | CCDS82078 |
| PMP22-226 | ENST00000675950.1 | 1789 | 160aa | Protein coding | CCDS11168 |
| PMP22-224 | ENST00000675819.1 | 1774 | 160aa | Protein coding | CCDS11168 |
| PMP22-214 | ENST00000674651.1 | 1755 | 160aa | Protein coding | CCDS11168 |
| PMP22-212 | ENST00000644020.1 | 1738 | 118aa | Protein coding | CCDS82078 |
| PMP22-217 | ENST00000674868.1 | 1312 | 160aa | Protein coding | CCDS11168 |
| PMP22-221 | ENST00000675350.1 | 1058 | 160aa | Protein coding | CCDS11168 |
| PMP22-204 | ENST00000426385.4 | 4161 | 125aa | Protein coding | — |
| PMP22-222 | ENST00000675551.1 | 1822 | 165aa | Protein coding | — |
| PMP22-203 | ENST00000395938.7 | 1803 | 217aa | Protein coding | — |
| PMP22-231 | ENST00000676329.1 | 1757 | 194aa | Protein coding | — |
| PMP22-209 | ENST00000580584.3 | 1716 | 92aa | Protein coding | — |
| PMP22-225 | ENST00000675854.1 | 1667 | 92aa | Protein coding | — |
| PMP22-219 | ENST00000674947.1 | 1662 | 217aa | Protein coding | — |
| PMP22-207 | ENST00000494511.7 | 1616 | 92aa | Protein coding | — |
| PMP22-228 | ENST00000676161.1 | 1575 | 113aa | Protein coding | — |
| PMP22-216 | ENST00000674707.1 | 1543 | 92aa | Protein coding | — |

[0239] The two longest Ensembl transcripts are PMP22-215 (2,423 bp) and PMP22-204 (4,161 bp). PMP22-215 encodes the full-length, 160-amino acid PMP22 protein, while PMP22-204 produces a shorter, 125-amino acid isoform. FIG. 49 shows the PMP22-204 cDNA sequence.

[0240] The miPMP22-868 and miPMP22-871 described above target binding sites in twenty-two of the twenty-three possible protein-coding PMP22 transcripts (FIG. 50). The one transcript exception is PMP22-204, which contains a retained intron at the end of exon 4, thereby producing an alternative 3′ untranslated region (3′ UTR).

### Example 13

Immune Response Analysis 6 Weeks after AAV9-miRLacZ Intrathecal Injection in C61 Het Mice

[0241] Two-month old C61 Het mice were intrathecally injected with AAV9-miRLacZ and were then sacrificed either at 6 weeks post injection (3.5 months old) or at 4 months post injection (6 months old). Tissues were collected for immunohistochemistry analysis as described before above in Example 6. Lumbar roots, sciatic nerves and liver sections were stained against CD20 (1:100 Santa Cruz), CD45 (1:100 Abcam), CD68 (1:50 Biorad) and CD3 (1:100 Abcam). Cell nuclei were visualized with DAP. The percentage of CD20, CD45, CD68 and CD3 positive cells was calculated in relation to the total cell number.

[0242] Immunological response to the intrathecal delivery of AAV9-miRLacZ to 2-month old C61 Het mice was analyzed either at 6 weeks or 4 months post-injection by quantifying B-cell marker CD20, leukocyte marker CD45, macrophage marker CD68 and T-cell marker CD3 at lumbar roots (FIG. 64), sciatic nerve (FIG. 65) and liver (FIG. 66). AAV9-miRLacz injected C61 Het mice were compared to age matched non-injected C61 Het and WT (expressing only normal levels of murine PMP22) mice.

[0243] CD20, CD45, CD3 and CD68 markers immune response analysis of lumbar roots (FIG. 64) showed that CD20 levels of WT, C61 Het and C61 Het-AAV9-miRLacZ did not differ significantly at the 6-week time point. Non-injected C61 Het CD20 levels were significantly increased when comparing 3.5 with 6 months old values. Increased levels of CD20 were presented in non-injected and AAV9-miRLacZ injected C61 Het mice at 4 months post injection, mice were 6 months old, when compared to aged matched WT mice. AAV9-miRLacZ injection in C61 Het mice did not affect CD20 levels when compared to non-injected C61 Het mice. CD45, CD68 and CD3 levels of lumbar roots at both time points were shown to be elevated in non-injected and AAV9-miRLacZ C61 Het mice when compared to aged matched non-injected WT mice. CD68 and CD3 levels of non-injected C61 Het mice were increased as the animals aged. AAV9-miRLacZ injection in C61 Het mice did not affected CD markers levels when compared to non-injected C61 Het mice.

[0244] CD20, CD45, CD3 and CD68 markers immune response analysis of sciatic nerves (FIG. 65) showed that CD20 levels at the 6-week time point of WT, C61 Het and C61 Het-AAV9-miRLacZ did not differ significantly. Non-injected C61 Het CD20 levels were significantly increased when comparing 3.5- with 6-month old values. Increased levels of CD20 were presented in non-injected and AAV9-miRLacZ injected C61 Het mice at 4 months post injection, mice were 6 months old, when compared to aged matched WT mice. AAV9-miRLacZ injection in C61 Het mice did not affect CD20 levels when compared to non-injected C61 Het mice. CD45, CD68 and CD3 levels of sciatic nerves at both time points were shown to be elevated in non-injected and AAV9-miRLacZ C61 Het mice when compared to aged matched non-injected WT mice. CD68 levels of baseline C61 Het mice were increased as the animals aged. AAV9-miRLacZ injection in C61 Het mice did not affect CD markers levels when compared to non-injected C61 Het mice.

[0245] CD20, CD45, CD3 and CD68 marker immune response analysis of liver (FIG. 66) showed that non-injected WT and C61 Het express similar numbers of immune response markers. CD20 and CD3 levels of C61 Het-AAV9-miRLacZ mice at the 6-week time point were increased when compared to non-injected WT and C61 Het. This increase was balanced back to baseline levels at the 4-month time point.

[0246] According to these data, non-injected C61 Het mice present elevated immune response markers in lumbar roots and sciatic nerve sections that increased with age when compared to age-matched WT controls. This phenotype was not affected by AAV9-miRLacZ injection. Both 3.5- and 6-month old non-injected C61 Het mice presented normal levels of immune response markers in their liver when compared to aged matched control. At 4 weeks post injection time point, C61 Het-AAV9-miRLacZ injected mice presented increased the levels of CD20 and CD3 positive cells of the liver, indicating a systemically immune response to AAV9 injection. This phenotype was ameliorated as the post injection time was progressing as no inflammatory response was detected in C61 Het mice injected with AAV9-miRLacZ after 4 months of the injection.

[0247] Statistics: Immunostaining (percentage of CD positive cells) data were compared using One way ANOVA with Tukey's Multiple Comparison Test GraphPad Prism5 software. Significance level for all comparisons, P<0.05.

### Example 14

### Plasma Neurofilament Light (Nfl) Levels

[0248] In order to further evaluate the effectiveness of our treatment, we performed Nfl biomarker analysis from blood samples on baseline WT, C61 Het, C61 Het injected with AAV9-miRLacZ and C61 Het injected with AAV9-miR871, at early and late treatment end time points. Nfl concentrations are a dynamic measure of axonal damage and serve as a biomarker for CMT disease severity. Blood was collected prior to sacrificing the animals using standard methods [Parasuraman, et al., Journal of pharmacology & pharmacotherapeutics, 1, (2): 87-93 (2010)].

[0249] Blood samples were collected as previously described and processed within one hour [Kagiava et al., Gene therapy, Online ahead of print (2021)]. Blood samples were collected in EDTA-containing tubes and centrifuged at 20° C. at 3500 rpm for 10 min. Centrifugation separated blood samples in two phases and the top plasma phase was collected and stored at −80° C. until testing. Plasma Nfl concentration was measured at University College London (UCL) using a commercially available NF-Light kit on a Single molecule array (Simoa) HD-1 instrument (Quanterix, Billerica, MA) [Rohrer et al., Neurology, 87 (13): 1329-1336 (2016); Sandelius et al., Neurology, 90 (6): e518-e524 (2018)].

[0250] Nfl concentration of non-injected 6 months old C61 Het mice was elevated (n=4, 418.07 μg/ml) compared to age matched non-injected WT control mice (n=4, 131.10 μg/ml) (FIG. 67). Early treated C61 Het mice with AAV9-miR971 (n=6) presented lower concentration (321.37 μg/ml) of Nfl compared to AAV9-miRLacZ group (n=6, 540.65 μg/ml), with AAV9-miR971 scores being close to WT levels (131.10 μg/ml) (FIG. 62). Injection with AAV9-miRLacZ did not resulted in any alternations to plasma Nfl levels when compared to non-injected C61 Het mice (FIG. 67).

[0251] Nfl concentration of non-injected 10 months old C61 Het mice was elevated (n=4, 539.66 μg/ml) compared to age matched non-injected WT control mice (n=4, 88.07 μg/ml) (FIG. 68). Late treated C61 Het mice with AAV9-miR971 did not presented improved plasma Nfl levels when compared to aged matched non-injected C61 Het or C61 Het injected with AAV9-miRLacZ (FIG. 68). Non injected as well as AAV9-miRLacZ and AAV9-miR871 injected C61 Het mice presented similar levels of Nfl (C61 Het AAV9-miRLacZ: 471.99 μg/ml, C61 Het AAV9-miR871: 559.28 μg/ml) (FIG. 68).

[0252] Nfl concentration of WT-injected (miRLacZ: n=5, miR871: n=5) and non-injected (n=4) 6 months old mice was similar score with no statistically significant difference among them (6 m WT: 131.10 μg/ml, WT AAV9-miRLacZ: 128.93 μg/ml, WT AAV9-miR871: 104.92 μg/ml) (FIG. 69).

[0253] Statistics: Nfl concentration data were compared using One way ANOVA with Tukey's Multiple Comparison Test GraphPad Prism5 software. Significance level for all comparisons, P<0.05.

### Example 15

Immune Response Analysis 4 Months after AAV9-miR871 Intrathecal Injection in C61 Het Mice

[0254] C61 Het mice were intrathecally injected with AAV9-miR871 at either 2 months (early treatment) or 6 months (late treatment) of age and were then sacrificed at 4 months post injection (6 or 10 months of age, respectively). Tissues were collected for immunohistochemistry analysis as described before at “Example 6”. Lumbar roots, sciatic nerves and liver sections were stained against CD20 (1:100 Santa Cruz), CD45 (1:100 Abcam), CD68 (1:50 Biorad) and CD3 (1:100 Abcam). Cell nuclei were visualized with DAP. The percentage of CD20, CD45, CD68 and CD3 positive cells was calculated in relation to the total cell number.

[0255] Lumbar roots and sciatic nerves sections of 6 months old non-injected C61 Het mice presented higher levels of CD20, CD45, CD68 and CD3 positive cells compared to aged matched non-injected WT mice (FIGS. 70-71). Lumbar roots and sciatic nerves of early treated C61 Het mice injected with AAV9-miR871 showed reduced levels of CD20, CD45, CD68 and CD3 positive cells, with these scores reaching WT levels (FIGS. 70-71). According to these data, lumbar roots and sciatic nerves of 6 months old C61 Het mice present elevated scores of immune response markers that were decreased back to WT levels after early treatment with AAV9-miR871.

[0256] Liver sections of 6 months non-injected WT and C61 Het as well as C61 Het mice injected with AAV9-miR871 showed similar scores of CD20, CD45, CD68 and CD3 positive cells (FIG. 72). According to these data, livers of 6 months old C61 Het mice do not express extra inflammatory response at baseline or 4 months post-injection with AAV9-miR871.

[0257] Lumbar roots and sciatic nerves sections of 10 months old non-injected C61 Het mice presented higher levels of CD20, CD45, CD68 and CD3 positive cells compared to aged matched non-injected WT mice (FIGS. 73-74). Lumbar roots and sciatic nerves of late treated C61 Het mice injected with AAV9-miR871 showed reduced levels of CD20, CD45, CD68 and CD3 positive cells (FIGS. 73-74). C61 Het-AA9-miR871 scores reached WT levels, with only exception being CD45 score of lumbar roots (FIGS. 73-74). According to these data, lumbar roots and sciatic nerves of 10 months old C61 Het mice present elevated scores of immune response markers that were decreased to WT levels after early treatment with AAV9-miR871, with only exception being CD45 marker of lumbar roots.

[0258] Liver sections of 10 months non-injected WT and C61 Het as well as C61 Het mice injected with AAV9-miR871 showed similar scores of CD20, CD45, CD68 and CD3 positive cells (FIG. 75). According to these data, livers of 6 months old C61 Het mice do not express extra inflammatory response at baseline or 4 months post-injection with AAV9-miR871.

### Example 16

### VGCN Analysis of PNS and Non-PNS Tissues of Early and Late Treatment Groups, 4 Months Post Injection

[0259] C61 Het mice were injected with AAV9-miR871 either at 2 months of age (early treatment) or 6 months of age (late treatment) and were sacrificed 4 months post injection when mice were 6 or 10 months old, respectively. PNS (lumbar roots, sciatic and femoral nerve) as well as non-PNS (brain, liver, kidney, lung, quadriceps, heart, stomach and eye) samples were collected and processed for VGCN analysis as described in Example 6”. AAV9 viral vector particles were detectable in all examined tissues at significantly high amounts 4 months post injection of both treatment groups (FIGS. 76-77). For both treatment groups, liver was the tissues with the highest VGCN score and stomach was the tissue with the lowest VCGN score (FIGS. 76-77).

[0260] While the present invention has been described in terms of specific embodiments, it is understood that variations and modifications will occur to those skilled in the art. Accordingly, only such limitations as appear in the claims should be placed on the invention.

[0261] All documents referred to in this application are hereby incorporated by reference in their entirety.

The application's sequence listing, which the Patent Office published only in electronic form, follows.

SEQUENCE LISTING (32778 sequences)

SEQ ID NO: 1 - DNA, 86 bp, Artificial Sequence
  Synthetic
ctcgagtgagcgagtgggggttgctgttgattgactgtaaagccacagatgggtcaatcaacagcaatccccacctgcctactagt

SEQ ID NO: 2 - DNA, 86 bp, Artificial Sequence
  Synthetic
ctcgagtgagcgaggggttgctgttgattgaagactgtaaagccacagatgggtcttcaatcaacagcaatcccctgcctactagt

SEQ ID NO: 3 - DNA, 86 bp, Artificial Sequence
  Synthetic
ctcgagtgagcgatgggggttgctgttgattgaactgtaaagccacagatgggttcaatcaacagcaatccccactgcctactagt

SEQ ID NO: 4 - DNA, 86 bp, Artificial Sequence
  Synthetic
ctcgagtgagcgagggttgctgttgattgaagatctgtaaagccacagatgggatcttcaatcaacagcaatccctgcctactagt

SEQ ID NO: 5 - DNA, 86 bp, Artificial Sequence
  Synthetic
ctcgagtgagcgactccaaggactgtctggcaatctgtaaagccacagatgggattgccagacagtccttggaggtgcctactagt

SEQ ID NO: 6 - DNA, 86 bp, Artificial Sequence
  Synthetic
ctcgagtgagcgacaccaactgtagatgtatatactgtaaagccacagatgggtatatacatctacagttggtggtgcctactagt

SEQ ID NO: 7 - DNA, 86 bp, Artificial Sequence
  Synthetic
ctcgagtgagcgaaccaactgtagatgtatatatctgtaaagccacagatgggatatatacatctacagttggtgtgcctactagt

SEQ ID NO: 8 - DNA, 86 bp, Artificial Sequence
  Synthetic
ctcgagtgagcgatggactaagatgcattaaaatctgtaaagccacagatgggattttgatgcatcttagtccactgcctactagt

SEQ ID NO: 9 - RNA, 86 nt, Artificial Sequence
  Synthetic
cucgagugagcgaguggggguugcuguugauugacuguaaagccacagaugggucaaucaacagcaauccccaccugccuacuagu

SEQ ID NO: 10 - RNA, 86 nt, Artificial Sequence
  Synthetic
cucgagugagcgagggguugcuguugauugaagacuguaaagccacagaugggucuucaaucaacagcaauccccugccuacuagu

SEQ ID NO: 11 - RNA, 86 nt, Artificial Sequence
  Synthetic
cucgagugagcgauggggguugcuguugauugaacuguaaagccacagauggguucaaucaacagcaauccccacugccuacuagu

SEQ ID NO: 12 - RNA, 86 nt, Artificial Sequence
  Synthetic
cucgagugagcgaggguugcuguugauugaagaucuguaaagccacagaugggaucuucaaucaacagcaaucccugccuacuagu

SEQ ID NO: 13 - RNA, 86 nt, Artificial Sequence
  Synthetic
cucgagugagcgacuccaaggacugucuggcaaucuguaaagccacagaugggauugccagacaguccuuggaggugccuacuagu

SEQ ID NO: 14 - RNA, 86 nt, Artificial Sequence
  Synthetic
cucgagugagcgacaccaacuguagauguauauacuguaaagccacagauggguauauacaucuacaguugguggugccuacuagu

SEQ ID NO: 15 - RNA, 86 nt, Artificial Sequence
  Synthetic
cucgagugagcgaaccaacuguagauguauauaucuguaaagccacagaugggauauauacaucuacaguuggugugccuacuagu

SEQ ID NO: 16 - RNA, 86 nt, Artificial Sequence
  Synthetic
cucgagugagcgauggacuaagaugcauuaaaaucuguaaagccacagaugggauuuugaugcaucuuaguccacugccuacuagu

SEQ ID NO: 17 - RNA, 22 nt, Artificial Sequence
  Synthetic
ucaaucaacagcaauccccacc

SEQ ID NO: 18 - RNA, 22 nt, Artificial Sequence
  Synthetic
ucuucaaucaacagcaaucccc

SEQ ID NO: 19 - RNA, 22 nt, Artificial Sequence
  Synthetic
uucaaucaacagcaauccccac

SEQ ID NO: 20 - RNA, 22 nt, Artificial Sequence
  Synthetic
aucuucaaucaacagcaauccc

SEQ ID NO: 21 - RNA, 22 nt, Artificial Sequence
  Synthetic
auugccagacaguccuuggagg

SEQ ID NO: 22 - RNA, 22 nt, Artificial Sequence
  Synthetic
uauauacaucuacaguuggugg

SEQ ID NO: 23 - RNA, 22 nt, Artificial Sequence
  Synthetic
auauauacaucuacaguuggug

SEQ ID NO: 24 - RNA, 22 nt, Artificial Sequence
  Synthetic
auuuugaugcaucuuaguccac

SEQ ID NO: 25 - DNA, 2423 bp, Homo Sapiens
tcggccggacttttcttcccctaattcgcacccaagaggagcccgctagatcaatccccgccaatcctaggaagctggcatgcttcgtaggtgcagacagtaatagcggggaccggcgcggggcaggtgtgtccggctaagacgccaggacagggcaggggctccaggacccgagaggagagggacttcttccagcgctcaagcgcccgctgccctctattagtgggaaaggaatccagcctcagccccgcgcgggcgcggtcggcgtcggcgggcccagaagcccagccctgggcatccgctgagctacatttggctgggtcttcccagagtgggctgaggagccagtttctcggtcaacactaggtctccacggggccaggggagaagggaggtgggaggtgagaaagctcagccgcctctggtttcgagtaaaagtcgccgcggttttgcagggaccgactttttcttgaggcgcatttaaggccaagtgactgtctcctgccctccctctctcctgccccctctcctccctgagtcccgccctcccgcacacgctgacccagggacacaccctactgcagcgacgcaaacagggcgttgttcccgttaaaggggaacgccaggagcctcccactgcccccttgcttcgcgcgcgcgcagccccgcagcgcagctttggcggcgccagcagcggagccaacgcacccgagtttgtgtttgaggccaccctgaggatcgggacagctgttcctttgggctgcagaaactccgctgagcagaacttgccgccagaatgctcctcctgttgctgagtatcatcgtcctccacgtcgcggtgctggtgctgctgttcgtctccacgatcgtcagccaatggatcgtgggcaatggacacgcaactgatctctggcagaactgtagcacctcttcctcaggaaatgtccaccactgtttctcatcatcaccaaacgaatggctgcagtctgtccaggccaccatgatcctgtcgatcatcttcagcattctgtctctgttcctgttcttctgccaactcttcaccctcaccaaggggggcaggttttacatcactggaatcttccaaattcttgctggtctgtgcgtgatgagtgctgcggccatctacacggtgaggcacccggagtggcatctcaactcggattactcctacggtttcgcctacatcctggcctgggtggccttccccctggcccttctcagcggtgtcatctatgtgatcttgcggaaacgcgaatgaggcgcccagacggtctgtctgaggctctgagcgtacatagggaagggaggaagggaaaacagaaagcagacaaagaaaaaagagctagcccaaaatcccaaactcaaaccaaaccaaacagaaagcagtggaggtgggggttgctgttgattgaagatgtatataatatctccggtttataaaacctatttataacactttttacatatatgtacatagtattgtttgctttttatgttgaccatcagcctcgtgttgagccttaaagaagtagctaaggaactttacatcctaacagtataatccagctcagtatttttgttttgttttttgtttgtttgttttgttttacccagaaataagataactccatctcgccccttccctttcatctgaaagaagatacctccctcccagtccacctcatttagaaaaccaaagtgtgggtagaaaccccaaatgtccaaaagcccttttctggtgggtgacccagtgcatccaacagaaacagccgctgcccgaacctctgtgtgaagctttacgcgcacacggacaaaatgcccaaactggagcccttgcaaaaacacggcttgtggcattggcatacttgcccttacaggtggagtatcttcgtcacacatctaaatgagaaatcagtgacaacaagtctttgaaatggtgctatggatttaccattccttattatcactaatcatctaaacaactcactggaaatccaattaacaattttacaacataagatagaatggagacctgaataattctgtgtaatataaatggtttataactgcttttgtacctagctaggctgctattattactataatgagtaaatcataaagccttcatcactcccacatttttcttacggtcggagcatcagaacaagcgtctagactccttgggaccgtgagttcctagagcttggctgggtctaggctgttctgtgcctccaaggactgtctggcaatgacttgtattggccaccaactgtagatgtatatatggtgcccttctgatgctaagactccagaccttttgtttttgctttgcattttctgattttataccaactgtgtggactaagatgcattaaaataaacatcagagtaactcactggtc

SEQ ID NO: 26 - DNA, 483 bp, Homo Sapiens
atgctcctcctgttgctgagtatcatcgtcctccacgtcgcggtgctggtgctgctgttcgtctccacgatcgtcagccaatggatcgtgggcaatggacacgcaactgatctctggcagaactgtagcacctcttcctcaggaaatgtccaccactgtttctcatcatcaccaaacgaatggctgcagtctgtccaggccaccatgatcctgtcgatcatcttcagcattctgtctctgttcctgttcttctgccaactcttcaccctcaccaaggggggcaggttttacatcactggaatcttccaaattcttgctggtctgtgcgtgatgagtgctgcggccatctacacggtgaggcacccggagtggcatctcaactcggattactcctacggtttcgcctacatcctggcctgggtggccttccccctggcccttctcagcggtgtcatctatgtgatcttgcggaaacgcgaatga

SEQ ID NO: 27 - DNA, 1800 bp, Mus musculus
ggagcctcccactgcccccttgctttgcgcgcgcgctgacccgcagcacagctgtctttggggacgccagcaacccagtggacgcaccggagtttgtgcctgaggctaatctgctctgagatagctgtccctttgaactgaaacaggcaccgctcctctgatcccgagcccaactcccagccaccatgctcctactcttgttggggatcctgttcctgcacatcgcggtgctagtgttgctcttcgtctccaccatcgtcagccaatggctcgtgggcaatggacacacgactgatctctggcagaactgtaccacatccgccttgggagccgtccaacactgctactcctcatcagtgagcgaatggctgcagtctgtccaggccaccatgatcctgtctgtcatcttcagcgtcctggctctgttcctgttcttctgccagctcttcactctcaccaaaggcggccggttttacatcactggattcttccaaatccttgctggtctgtgcgtgatgagtgcagcggccatctacacagtgaggcacagtgagtggcatgtcaacactgactactcctatggcttcgcctacatcctggcctgggtggcctttcccctagccctcctcagtggtatcatctatgtgatcctgcggaaacgcgaatgaggcgcccgacgacgcaccgtccgtctaggctctgagcgcgcatagggtccacagggagggaggaaggaaaccagagaacaaaaccaaccaaccaaaaaagagctagccccaaacccaaacgcaagccaaaccaaacagaacgcagttgagtggggattgctgttgattgaagatgtatataatatctatggtttataaaacctatttataacactttttacatatatgtacataggattgttttgctttttatgttgaccgtcagcctcgtgttgaatcttaaacaactttacatcctaacactataaccaagctcagtatctttgttttgtttcgtttttttttttaatctttttgttttgctcagacataaaaactccacgtggccccctttcatctgaaagcagatacctccctcccactcaacctcataggataaccaaagtgtggggacaaaccccagacagttgaagacctttacactatgggtgacccagtgcatttagcaggagtatccactgcccgaatccatgtgtgaagccctaagcactcacagacgaaaagccctgaccggaaccctctgcaaaaacagtaatagctggtggctcctgaacacttgaccctgtagacggagtactggggccacacgtttaaatgagaagtcagagacaagcaatctgtgaaatggtgctatagatttaccattccttgttattactaatcgtttaaaccactcactggaaactcaattaacagttttatgcgatacagcagaatggagacccgatacaaacggttcataactgctttcatacctagctaggctgttgttattactacaataaataaatctcaaagccttcgtcagtcccacagttttctcacggtcggagcatcaggacgagcatctagacccttgggactagcgagttccctggctttctgggtctagagtgttctgtgcctccaaggactgtctggcgatgacttgtattggccaccaactgtagatgtatatacggtgtccttctgatgctaagactccagacctttcttgtttttgcttgctttctctgattttataccaactgtgtggactaagatgcatcaaaataaacatcagagtaactca

SEQ ID NO: 28 - RNA, 86 nt, Artificial Sequence
  Synthetic
cucgagugagcgauccaggauucagaucugguuucuguaaagccacagaugggaaaccagaucugaauccuggacugccuacuagu

SEQ ID NO: 29 - protein, 160 aa, Homo Sapiens
MLLLLLSIIVLHVAVLVLLFVSTIVSQWIVGNGHATDLWQNCSTSSSGNVHHCFSSSPNEWLQSVQATMILSIIFSILSLFLFFCQLFTLTKGGRFYITGIFQILAGLCVMSAAAIYTVRHPEWHLNSDYSYGFAYILAWVAFPLALLSGVIYVILRKRE

SEQ ID NO: 30 - DNA, 1480 bp, Homo Sapiens
tcggccggacttttcttcccctaattcgcacccaagaggagcccgctagatcaatccccgccaatcctaggaagctggcatgcttcgtaggtgcagacagtaatagcggggaccggcgcggggcaggtgtgtccggctaagacgccaggacagggcaggggctccaggacccgagaggagagggacttcttccagcgctcaagcgcccgctgccctctattagtgggaaaggaatccagcctcagccccgcgcgggcgcggtcggcgtcggcgggcccagaagcccagccctgggcatccgctgagctacatttggctgggtcttcccagagtgggctgaggagccagtttctcggtcaacactaggtctccacggggccaggggagaagggaggtgggaggtgagaaagctcagccgcctctggtttcgagtaaaagtcgccgcggttttgcagggaccgactttttcttgaggcgcatttaaggccaagtgactgtctcctgccctccctctctcctgccccctctcctccctgagtcccgccctcccgcacacgctgacccagggacacaccctactgcagcgacgcaaacagggcgttgttcccgttaaaggggaacgccaggagcctcccactgcccccttgcttcgcgcgcgcgcagccccgcagcgcagctttggcggcgccagcagcggagccaacgcacccgagtttgtgtttgaggccaccctgaggatcgggacagctgttcctttgggctgcagaaactccgctgagcagaacttgccgccagaatgctcctcctgttgctgagtatcatcgtcctccacgtcgcggtgctggtgctgctgttcgtctccacgatcgtcagccaatggatcgtgggcaatggacacgcaactgatctctggcagaactgtagcacctcttcctcaggaaatgtccaccactgtttctcatcatcaccaaacgaatggctgcagtctgtccaggccaccatgatcctgtcgatcatcttcagcattctgtctctgttcctgttcttctgccaactcttcaccctcaccaaggggggcaggttttacatcactggaatcttccaaattcttgctggtctgtgcgtgatgagtgctgcggccatctacacggtgaggcacccggagtggcatctcaactcggattactcctacggtttcgcctacatcctggcctgggtggccttccccctggcccttctcagcggtgtcatctatgtgatcttgcggaaacgcgaatgaggcgcccagacggtctgtctgaggctctgagcgtacatagggaagggaggaagggaaaacagaaagcagacaaagaaaaaagagctagcccaaaatcccaaactcaaaccaaaccaaacagaaagcagtggaggtgggggttgctgttgattgaagatgtatataatatctccggtttataaaacctatttataacacttt

SEQ ID NO: 31 - DNA, 22 bp, Homo Sapiens
ggtgggggttgctgttgattga

SEQ ID NO: 32 - DNA, 22 bp, Homo Sapiens
gggggttgctgttgattgaaga

SEQ ID NO: 33 - DNA, 943 bp, Homo Sapiens
ttacatatatgtacatagtattgtttgctttttatgttgaccatcagcctcgtgttgagccttaaagaagtagctaaggaactttacatcctaacagtataatccagctcagtatttttgttttgttttttgtttgtttgttttgttttacccagaaataagataactccatctcgccccttccctttcatctgaaagaagatacctccctcccagtccacctcatttagaaaaccaaagtgtgggtagaaaccccaaatgtccaaaagcccttttctggtgggtgacccagtgcatccaacagaaacagccgctgcccgaacctctgtgtgaagctttacgcgcacacggacaaaatgcccaaactggagcccttgcaaaaacacggcttgtggcattggcatacttgcccttacaggtggagtatcttcgtcacacatctaaatgagaaatcagtgacaacaagtctttgaaatggtgctatggatttaccattccttattatcactaatcatctaaacaactcactggaaatccaattaacaattttacaacataagatagaatggagacctgaataattctgtgtaatataaatggtttataactgcttttgtacctagctaggctgctattattactataatgagtaaatcataaagccttcatcactcccacatttttcttacggtcggagcatcagaacaagcgtctagactccttgggaccgtgagttcctagagcttggctgggtctaggctgttctgtgcctccaaggactgtctggcaatgacttgtattggccaccaactgtagatgtatatatggtgcccttctgatgctaagactccagaccttttgtttttgctttgcattttctgattttataccaactgtgtggactaagatgcattaaaataaacatcagagtaactcactggtc

SEQ ID NO: 34 - DNA, 22 bp, Homo Sapiens
cctccaaggactgtctggcaat

SEQ ID NO: 35 - DNA, 22 bp, Homo Sapiens
ccaccaactgtagatgtatata

SEQ ID NO: 36 - DNA, 22 bp, Homo Sapiens
caccaactgtagatgtatatat

SEQ ID NO: 37 - DNA, 22 bp, Homo Sapiens
gtggactaagatgcattaaaat

SEQ ID NO: 38 - DNA, 1480 bp, Homo Sapiens; identical to SEQ ID NO: 30

SEQ ID NO: 39 - DNA, 22 bp, Homo Sapiens
gtgggggttgctgttgattgaa

SEQ ID NO: 40 - DNA, 22 bp, Homo Sapiens
ggggttgctgttgattgaagat

SEQ ID NO: 41 - DNA, 943 bp, Homo Sapiens; identical to SEQ ID NO: 33

SEQ ID NO: 42 - DNA, 4161 bp, Homo Sapiens
gcccccttgcttcgcgcgcgcgcagccccgcagcgcagctttggcggcgccagcagcggagccaacgcacccgagtttgtgtttgaggccaccctgaggatcgggacagctgttcctttgggctgcagaaactccgctgagcagaacttgccgccagaatgctcctcctgttgctgagtatcatcgtcctccacgtcgcggtgctggtgctgctgttcgtctccacgatcgtcagccaatggatcgtgggcaatggacacgcaactgatctctggcagaactgtagcacctcttcctcaggaaatgtccaccactgtttctcatcatcaccaaacgaatggctgcagtctgtccaggccaccatgatcctgtcgatcatcttcagcattctgtctctgttcctgttcttctgccaactcttcaccctcaccaaggggggcaggttttacatcactggaatcttccaaattcttgctggtaagttgtggatggtaaagtccatgtggaagcggggtgcatccaagtctgcggaatgattagtttagtagaaggatgtggcctcagaatgactgatgttcatgagtctccccactggatgctttccataaagtgagggtgggtgcttgtatgtgtgggtgtgtacctgtatgtgtcttagaacttgggacttagaactctccccttctccctggaatgagatgcatatgaaagagaacttagaggatctggaaggaaggtccccacccaagccaggcgtatcaacaggaatgaaactgcaatctggacacataatcagaggtgaatactgaggctatctgtagagcaaaggtcaggcttgagagctgtttctgtagattacattatgcctccagaaaatggccctgatgtgctaagaactagcaaagtagttatcaggtatgtgtcttccaccaataggtagtgatgaagccacactgacaaattctcaccttccttgcttccagttcctagattctactgggctttgattgactgttgtcatcctctggtgtcttcattttgacactcttgtgtcacatattgtcatttccaaacatggggctatgacaacacatgaaaacacatgagaggtctccttaatctcctgcctaaactgtcttcaagttccctctttaaatacgttattaatatgcatagtgtgcagagtcctagaaacttctgttacacagggtgacatcttccaactttgtctctggattctgcctagcatcttacatgcttacatcttacatcttacatcttacatcttgcattctgcctagcatcttacattagctcttacatgtctgtctgttgacttactgttgactgaaccagcagggcattggagagaagtaagagctagatgtagtggtggattctgtggtccaaattcatagatcacaaacttcatatgtaccagagtatgtctaggtactgggagatgttctcaattctgaccctctgagagggcaaaggatgtagcatctcttctctgagttggttgtcagaatgcccatggtaccatttcaccactctgtccccaggagcagtcattggaaggttgacgtaaatagggttgtatgggaagacacagcccaaggttagatgttggtgaccttgtctagaagacagagagttcccctttcctgaaaaaaggaagtaaatgattaaccacttctcattaaacactcaaatacaacatttcaatactcatggttttgagatttcaaaaccagacagtgctttgctacttacacatgtcttatgacaccaagccaagctcctggatggttgctggctctgttaaatgactaattatgcaaggagatatcatttctaggtacgttaaagtgaagagttacccttactcaattttcagttggaataaaaacaactgtaacatattctggggtttctttttttttttctcactcgttttagtttgatatcaaatcaaataatgatcatatccattgcatcagtggatatgccctcaagataatatggatttagaaccagaactttcataatgtatttctattgaaatgttagtttcataagcgatgattgggttttcatgcccatgtgtgagatgtgcctcgctcaaaccttgttatgatttggcacgttacccatctgatgtgaaaaaaattacattttatttgtacaggctcgttattttactgatgaataatttgagcccaccagaggataaatgaatgaccaaggtcacccagctcatgacagggacggttgagtgttacactgaatatagtgaggtacttcttatattttaaagacagaatgcaccaaaaaatttaaagaacacaaaatccaaggcagaagctctgccttttatattatcttttattggaactgatttacaatggaaggtaaatgcaaatttgcaccatgtattattctgaagttccaaacatctgtgatgaatacaagcctgtactataagacccagtcacattgaaaatatggagctgagaagaggtaagctgctgttgaatgggctccttgggatagccagtaccttcatcttcattcatcctgctgagctgtttcggctttaagttctttaacaatgtctttttagcaacatcattacatcattttaggccaaaactcaaagtccagagataagaacccttaagtcactcatgtaactgcactgtgtgttaaaagtatttcagttcagccaaacactcttctcctaggtattgcgatttaagtatatttactaatccactcttgcttcactattttcattctcctccaaagtcaatacaagatgtttagaactgtgctggaagtgcagaattccgaatgtaaaagcgcatgactttgtcctctttatcccctttacatctagctgcttacgtctcatgaaactgaattttcagttatctgttggtccacatttgaataagaaattatcttgaatttgaaatgctgagctgtaatagcagttgtaatttgtaagtcctgagagtgtcctgtcctccgttgttaatcccagtcaagatcatctgagagttggtctccagggaacctcagatctctaggatgttgcactggaaatggctgcaggatctttccactaattctgagaactgaaagagttaggaactctatttggagagttcctggttcccttatcgtgtgacagttctaagtcaattttgtcatgtggttttctgactcacagactagtaagaagttagtaattagagagctaagtagattagggttgttggagatgagaaacccacgttttgggaaaacctggcaagtgacaacttaacatcaaggaagtagtcagaaaagctaaaactgacaaacagaaggtagaagaaagtagctccacactcatgggatgtgaaatctacaagcgtgcatgcccggcaaatgcctctccaatgcactggagcgttttaagtggaaaccactagaatctctgtgtagtctccggaagtggctgtgagggctgcattatctctgcacagcttcctcttggtgggcccagctgtgatctttatggatggcacacatcagctttcaggaaaagcacatgaaaggtgctagggctcttggagctgactgtaggtttgggagttgtctgtctccttgctctagattacagctctgtgtgttgtgtggggtctccatggtttgccaaattatctcttcctcacttagccacaaggctgacagttaggaactatctcttcttgattgcattaggttggctgcttcctgaatgcatatcaaaaggctccttcctttagttcagtgctttcaacctgagctgtgcatcagaatcacctgaggtcctttaaaaaaaaaaaaaagacagtgggcggggcgcagtggctcacgcctgtaatcccagcactttgggaggctgaggtgggcagatcacttgaggtcaggagttcaagaccagcccggccaacatggtgaaaccctgtctctactaaaaataaaaataaaaaaatagccaggcgtggtggtgcgtgcctgtagtcccagctacttgggaaactgaggcagagaagaatcacttgaacctaggaggtggaggttgcagtgagccaagatcatgccactgcactccagcctgggggtgac

SEQ ID NO: 43 - RNA, 22 nt, Artificial Sequence
  Synthetic
uggggguugcuguugauugacu

SEQ ID NO: 44 - RNA, 22 nt, Artificial Sequence
  Synthetic
ggguugcuguugauugaagacu

SEQ ID NO: 45 - RNA, 22 nt, Artificial Sequence
  Synthetic
ggggguugcuguugauugaacu

SEQ ID NO: 46 - RNA, 22 nt, Artificial Sequence
  Synthetic
gguugcuguugauugaagaucu

SEQ ID NO: 47 - RNA, 22 nt, Artificial Sequence
  Synthetic
uccaaggacugucuggcaaucu

SEQ ID NO: 48 - RNA, 38 nt, Homo Sapiens
guucugugccuccaaggacugucuggcaaugacuugua

SEQ ID NO: 49 - RNA, 38 nt, Mus musculus
guucugugccuccaaggacugucuggcgaugacuugua

SEQ ID NO: 50 - RNA, 22 nt, Artificial Sequence
  Synthetic
accaacuguagauguauauacu

SEQ ID NO: 51 - RNA, 30 nt, Homo Sapiens
uuggccaccaacuguagauguauauauggu

SEQ ID NO: 52 - RNA, 30 nt, Mus musculus
uuggccaccaacuguagauguauauacggu

SEQ ID NO: 53 - RNA, 22 nt, Artificial Sequence
  Synthetic
ccaacuguagauguauauaucu

SEQ ID NO: 54 - RNA, 22 nt, Artificial Sequence
  Synthetic
ggacuaagaugcauuaaaaucu

SEQ ID NO: 55 - RNA, 30 nt, Homo Sapiens
cuguguggacuaagaugcauuaaaauaaac

SEQ ID NO: 56 - RNA, 30 nt, Mus musculus
cuguguggacuaagaugcaucaaaauaaac

SEQ ID NO: 57 - RNA, 39 nt, Homo Sapiens
gcaguggagguggggguugcuguugauugaagauguaua

SEQ ID NO: 58 - RNA, 39 nt, Mus musculus
cgcaguugaguggggauugcuguugauugaagauguaua

SEQ ID NO: 59 - RNA, 19 nt, Artificial Sequence
  Synthetic
gaccagugaguuacucuga

SEQ ID NO: 60 - RNA, 19 nt, Artificial Sequence
  Synthetic
accagugaguuacucugau

SEQ ID NO: 61 - RNA, 19 nt, Artificial Sequence
  Synthetic
ccagugaguuacucugaug

SEQ ID NO: 62 - RNA, 19 nt, Artificial Sequence
  Synthetic
cagugaguuacucugaugu

SEQ ID NO: 63 - RNA, 19 nt, Artificial Sequence
  Synthetic
agugaguuacucugauguu

SEQ ID NO: 64 - RNA, 19 nt, Artificial Sequence
  Synthetic
gugaguuacucugauguuu

SEQ ID NO: 65 - RNA, 19 nt, Artificial Sequence
  Synthetic
ugaguuacucugauguuua

SEQ ID NO: 66 - RNA, 19 nt, Artificial Sequence
  Synthetic
gaguuacucugauguuuau

SEQ ID NO: 67 - RNA, 19 nt, Artificial Sequence
  Synthetic
aguuacucugauguuuauu

SEQ ID NO: 68 - RNA, 19 nt, Artificial Sequence
  Synthetic
guuacucugauguuuauuu

SEQ ID NO: 69 - RNA, 19 nt, Artificial Sequence
  Synthetic
uuacucugauguuuauuuu

SEQ ID NO: 70 - RNA, 19 nt, Artificial Sequence
  Synthetic
uacucugauguuuauuuua

SEQ ID NO: 71 - RNA, 19 nt, Artificial Sequence
  Synthetic
acucugauguuuauuuuaa

SEQ ID NO: 72 - RNA, 19 nt, Artificial Sequence
  Synthetic
cucugauguuuauuuuaau

SEQ ID NO: 73 - RNA, 19 nt, Artificial Sequence
  Synthetic
ucugauguuuauuuuaaug

SEQ ID NO: 74 - RNA, 19 nt, Artificial Sequence
  Synthetic
cugauguuuauuuuaaugc

SEQ ID NO: 75 - RNA, 19 nt, Artificial Sequence
  Synthetic
ugauguuuauuuuaaugca

SEQ ID NO: 76 - RNA, 19 nt, Artificial Sequence
  Synthetic
gauguuuauuuuaaugcau

SEQ ID NO: 77 - RNA, 19 nt, Artificial Sequence
  Synthetic
auguuuauuuuaaugcauc

SEQ ID NO: 78 - RNA, 19 nt, Artificial Sequence
  Synthetic
uguuuauuuuaaugcaucu

SEQ ID NO: 79 - RNA, 19 nt, Artificial Sequence
  Synthetic
guuuauuuuaaugcaucuu

SEQ ID NO: 80 - RNA, 19 nt, Artificial Sequence
  Synthetic
uuuauuuuaaugcaucuua

SEQ ID NO: 81 - RNA, 19 nt, Artificial Sequence
  Synthetic
uuauuuuaaugcaucuuag

SEQ ID NO: 82 - RNA, 19 nt, Artificial Sequence
  Synthetic
uauuuuaaugcaucuuagu

SEQ ID NO: 83 - RNA, 19 nt, Artificial Sequence
  Synthetic
auuuuaaugcaucuuaguc

SEQ ID NO: 84 - RNA, 19 nt, Artificial Sequence
  Synthetic
uuuuaaugcaucuuagucc

SEQ ID NO: 85 - RNA, 19 nt, Artificial Sequence
  Synthetic
uuuaaugcaucuuagucca

SEQ ID NO: 86 - RNA, 19 nt, Artificial Sequence
  Synthetic
uuaaugcaucuuaguccac

SEQ ID NO: 87 - RNA, 19 nt, Artificial Sequence
  Synthetic
uaaugcaucuuaguccaca

SEQ ID NO: 88 - RNA, 19 nt, Artificial Sequence
  Synthetic
aaugcaucuuaguccacac

SEQ ID NO: 89 - RNA, 19 nt, Artificial Sequence
  Synthetic
augcaucuuaguccacaca

SEQ ID NO: 90 - RNA, 19 nt, Artificial Sequence
  Synthetic
ugcaucuuaguccacacag

SEQ ID NO: 91 - RNA, 19 nt, Artificial Sequence
  Synthetic
gcaucuuaguccacacagu

SEQ ID NO: 92 - RNA, 19 nt, Artificial Sequence
  Synthetic
caucuuaguccacacaguu

SEQ ID NO: 93 - RNA, 19 nt, Artificial Sequence
  Synthetic
aucuuaguccacacaguug

SEQ ID NO: 94 - RNA, 19 nt, Artificial Sequence
  Synthetic
ucuuaguccacacaguugg

SEQ ID NO: 95 - RNA, 19 nt, Artificial Sequence
  Synthetic
cuuaguccacacaguuggu

SEQ ID NO: 96 - RNA, 19 nt, Artificial Sequence
  Synthetic
uuaguccacacaguuggua

SEQ ID NO: 97 - RNA, 19 nt, Artificial Sequence
  Synthetic
uaguccacacaguugguau

SEQ ID NO: 98 - RNA, 19 nt, Artificial Sequence
  Synthetic
aguccacacaguugguaua

SEQ ID NO: 99 - RNA, 19 nt, Artificial Sequence
  Synthetic
guccacacaguugguauaa

SEQ ID NO: 100 - RNA, 19 nt, Artificial Sequence
  Synthetic
uccacacaguugguauaaa

SEQ ID NO: 101 - RNA, 19 nt, Artificial Sequence
  Synthetic
ccacacaguugguauaaaa

SEQ ID NO: 102 - RNA, 19 nt, Artificial Sequence
  Synthetic
cacacaguugguauaaaau

SEQ ID NO: 103 - RNA, 19 nt, Artificial Sequence
  Synthetic
acacaguugguauaaaauc

SEQ ID NO: 104 - RNA, 19 nt, Artificial Sequence
  Synthetic
cacaguugguauaaaauca

SEQ ID NO: 105 - RNA, 19 nt, Artificial Sequence
  Synthetic
acaguugguauaaaaucag

SEQ ID NO: 106 - RNA, 19 nt, Artificial Sequence
  Synthetic
caguugguauaaaaucaga

SEQ ID NO: 107 - RNA, 19 nt, Artificial Sequence
  Synthetic
aguugguauaaaaucagaa

SEQ ID NO: 108 - RNA, 19 nt, Artificial Sequence
  Synthetic
guugguauaaaaucagaaa

SEQ ID NO: 109 - RNA, 19 nt, Artificial Sequence
  Synthetic
uugguauaaaaucagaaaa

SEQ ID NO: 110 - RNA, 19 nt, Artificial Sequence
  Synthetic
ugguauaaaaucagaaaau

SEQ ID NO: 111 - RNA, 19 nt, Artificial Sequence
  Synthetic
gguauaaaaucagaaaaug

SEQ ID NO: 112 - RNA, 19 nt, Artificial Sequence
  Synthetic
guauaaaaucagaaaaugc

SEQ ID NO: 113 - RNA, 19 nt, Artificial Sequence
  Synthetic
uauaaaaucagaaaaugca

SEQ ID NO: 114 - RNA, 19 nt, Artificial Sequence
  Synthetic
auaaaaucagaaaaugcaa

SEQ ID NO: 115 - RNA, 19 nt, Artificial Sequence
  Synthetic
uaaaaucagaaaaugcaaa

SEQ ID NO: 116 - RNA, 19 nt, Artificial Sequence
  Synthetic
aaaaucagaaaaugcaaag

SEQ ID NO: 117 - RNA, 19 nt, Artificial Sequence
  Synthetic
aaaucagaaaaugcaaagc

SEQ ID NO: 118 - RNA, 19 nt, Artificial Sequence
  Synthetic
aaucagaaaaugcaaagca

SEQ ID NO: 119 - RNA, 19 nt, Artificial Sequence
  Synthetic
aucagaaaaugcaaagcaa

SEQ ID NO: 120 - RNA, 19 nt, Artificial Sequence
  Synthetic
ucagaaaaugcaaagcaaa

SEQ ID NO: 121 - RNA, 19 nt, Artificial Sequence
  Synthetic
cagaaaaugcaaagcaaaa

SEQ ID NO: 122 - RNA, 19 nt, Artificial Sequence
  Synthetic
agaaaaugcaaagcaaaaa

SEQ ID NO: 123 - RNA, 19 nt, Artificial Sequence
  Synthetic
gaaaaugcaaagcaaaaac

SEQ ID NO: 124 - RNA, 19 nt, Artificial Sequence
  Synthetic
aaaaugcaaagcaaaaaca

SEQ ID NO: 125 - RNA, 19 nt, Artificial Sequence
  Synthetic
aaaugcaaagcaaaaacaa

SEQ ID NO: 126 - RNA, 19 nt, Artificial Sequence
  Synthetic
aaugcaaagcaaaaacaaa

SEQ ID NO: 127 - RNA, 19 nt, Artificial Sequence
  Synthetic
augcaaagcaaaaacaaaa

SEQ ID NO: 128 - RNA, 19 nt, Artificial Sequence
  Synthetic
ugcaaagcaaaaacaaaag

SEQ ID NO: 129 - RNA, 19 nt, Artificial Sequence
  Synthetic
gcaaagcaaaaacaaaagg

SEQ ID NO: 130 - RNA, 19 nt, Artificial Sequence
  Synthetic
caaagcaaaaacaaaaggu

SEQ ID NO: 131 - RNA, 19 nt, Artificial Sequence
  Synthetic
aaagcaaaaacaaaagguc

SEQ ID NO: 132 - RNA, 19 nt, Artificial Sequence
  Synthetic
aagcaaaaacaaaaggucu

SEQ ID NO: 133 - RNA, 19 nt, Artificial Sequence
  Synthetic
agcaaaaacaaaaggucug

SEQ ID NO: 134 - RNA, 19 nt, Artificial Sequence
  Synthetic
gcaaaaacaaaaggucugg

SEQ ID NO: 135 - RNA, 19 nt, Artificial Sequence
  Synthetic
caaaaacaaaaggucugga

SEQ ID NO: 136 - RNA, 19 nt, Artificial Sequence
  Synthetic
aaaaacaaaaggucuggag

SEQ ID NO: 137 - RNA, 19 nt, Artificial Sequence
  Synthetic
aaaacaaaaggucuggagu

SEQ ID NO: 138 - RNA, 19 nt, Artificial Sequence
  Synthetic
aaacaaaaggucuggaguc

SEQ ID NO: 139 - RNA, 19 nt, Artificial Sequence
  Synthetic
aacaaaaggucuggagucu

SEQ ID NO: 140 - RNA, 19 nt, Artificial Sequence
  Synthetic
acaaaaggucuggagucuu

SEQ ID NO: 141 - RNA, 19 nt, Artificial Sequence
  Synthetic
caaaaggucuggagucuua

SEQ ID NO: 142 - RNA, 19 nt, Artificial Sequence
  Synthetic
aaaaggucuggagucuuag

SEQ ID NO: 143 - RNA, 19 nt, Artificial Sequence
  Synthetic
aaaggucuggagucuuagc

SEQ ID NO: 144 - RNA, 19 nt, Artificial Sequence
  Synthetic
aaggucuggagucuuagca

SEQ ID NO: 145 - RNA, 19 nt, Artificial Sequence
  Synthetic
aggucuggagucuuagcau

SEQ ID NO: 146 - RNA, 19 nt, Artificial Sequence
  Synthetic
ggucuggagucuuagcauc

SEQ ID NO: 147 - RNA, 19 nt, Artificial Sequence
  Synthetic
gucuggagucuuagcauca

SEQ ID NO: 148 - RNA, 19 nt, Artificial Sequence
  Synthetic
ucuggagucuuagcaucag

SEQ ID NO: 149 - RNA, 19 nt, Artificial Sequence
  Synthetic
cuggagucuuagcaucaga

SEQ ID NO: 150 - RNA, 19 nt, Artificial Sequence
  Synthetic
uggagucuuagcaucagaa

SEQ ID NO: 151 - RNA, 19 nt, Artificial Sequence
  Synthetic
ggagucuuagcaucagaag

SEQ ID NO: 152 - RNA, 19 nt, Artificial Sequence
  Synthetic
gagucuuagcaucagaagg

SEQ ID NO: 153 - RNA, 19 nt, Artificial Sequence
  Synthetic
agucuuagcaucagaaggg

SEQ ID NO: 154 - RNA, 19 nt, Artificial Sequence
  Synthetic
gucuuagcaucagaagggc

SEQ ID NO: 155 - RNA, 19 nt, Artificial Sequence
  Synthetic
ucuuagcaucagaagggca

SEQ ID NO: 156 - RNA, 19 nt, Artificial Sequence
  Synthetic
cuuagcaucagaagggcac

SEQ ID NO: 157 - RNA, 19 nt, Artificial Sequence
  Synthetic
uuagcaucagaagggcacc

SEQ ID NO: 158 - RNA, 19 nt, Artificial Sequence
  Synthetic
uagcaucagaagggcacca

SEQ ID NO: 159 - RNA, 19 nt, Artificial Sequence
  Synthetic
agcaucagaagggcaccau

SEQ ID NO: 160 - RNA, 19 nt, Artificial Sequence
  Synthetic
gcaucagaagggcaccaua

SEQ ID NO: 161 - RNA, 19 nt, Artificial Sequence
  Synthetic
caucagaagggcaccauau

SEQ ID NO: 162 - RNA, 19 nt, Artificial Sequence
  Synthetic
aucagaagggcaccauaua

SEQ ID NO: 163 - RNA, 19 nt, Artificial Sequence
  Synthetic
ucagaagggcaccauauau

SEQ ID NO: 164 - RNA, 19 nt, Artificial Sequence
  Synthetic
cagaagggcaccauauaua

SEQ ID NO: 165 - RNA, 19 nt, Artificial Sequence
  Synthetic
agaagggcaccauauauac

SEQ ID NO: 166 - RNA, 19 nt, Artificial Sequence
  Synthetic
gaagggcaccauauauaca

SEQ ID NO: 167 - RNA, 19 nt, Artificial Sequence
  Synthetic
aagggcaccauauauacau

SEQ ID NO: 168 - RNA, 19 nt, Artificial Sequence
  Synthetic
agggcaccauauauacauc

SEQ ID NO: 169 - RNA, 19 nt, Artificial Sequence
  Synthetic
gggcaccauauauacaucu

SEQ ID NO: 170 - RNA, 19 nt, Artificial Sequence
  Synthetic
ggcaccauauauacaucua

SEQ ID NO: 171 - RNA, 19 nt, Artificial Sequence
  Synthetic
gcaccauauauacaucuac

SEQ ID NO: 172 - RNA, 19 nt, Artificial Sequence
  Synthetic
caccauauauacaucuaca

SEQ ID NO: 173 - RNA, 19 nt, Artificial Sequence
  Synthetic
accauauauacaucuacag

SEQ ID NO: 174 - RNA, 19 nt, Artificial Sequence
  Synthetic
ccauauauacaucuacagu

SEQ ID NO: 175 - RNA, 19 nt, Artificial Sequence
  Synthetic
cauauauacaucuacaguu

SEQ ID NO: 176 - RNA, 19 nt, Artificial Sequence
  Synthetic
auauauacaucuacaguug

SEQ ID NO: 177 - RNA, 19 nt, Artificial Sequence
  Synthetic
uauauacaucuacaguugg

SEQ ID NO: 178 - RNA, 19 nt, Artificial Sequence
  Synthetic
auauacaucuacaguuggu

SEQ ID NO: 179 - RNA, 19 nt, Artificial Sequence
  Synthetic
uauacaucuacaguuggug

SEQ ID NO: 180 - RNA, 19 nt, Artificial Sequence
  Synthetic
auacaucuacaguuggugg

SEQ ID NO: 181 - RNA, 19 nt, Artificial Sequence
  Synthetic
uacaucuacaguugguggc

SEQ ID NO: 182 - RNA, 19 nt, Artificial Sequence
  Synthetic
acaucuacaguugguggcc

SEQ ID NO: 183 - RNA, 19 nt, Artificial Sequence
  Synthetic
caucuacaguugguggcca

SEQ ID NO: 184 - RNA, 19 nt, Artificial Sequence
  Synthetic
aucuacaguugguggccaa

SEQ ID NO: 185 - RNA, 19 nt, Artificial Sequence
  Synthetic
ucuacaguugguggccaau

SEQ ID NO: 186 - RNA, 19 nt, Artificial Sequence
  Synthetic
cuacaguugguggccaaua

SEQ ID NO: 187 - RNA, 19 nt, Artificial Sequence
  Synthetic
uacaguugguggccaauac

SEQ ID NO: 188 - RNA, 19 nt, Artificial Sequence
  Synthetic
acaguugguggccaauaca

SEQ ID NO: 189 - RNA, 19 nt, Artificial Sequence
  Synthetic
caguugguggccaauacaa

SEQ ID NO: 190 - RNA, 19 nt, Artificial Sequence
  Synthetic
aguugguggccaauacaag

SEQ ID NO: 191 - RNA, 19 nt, Artificial Sequence
  Synthetic
guugguggccaauacaagu

SEQ ID NO: 192 - RNA, 19 nt, Artificial Sequence
  Synthetic
uugguggccaauacaaguc

SEQ ID NO: 193 - RNA, 19 nt, Artificial Sequence
  Synthetic
ugguggccaauacaaguca

SEQ ID NO: 194 - RNA, 19 nt, Artificial Sequence
  Synthetic
gguggccaauacaagucau

SEQ ID NO: 195 - RNA, 19 nt, Artificial Sequence
  Synthetic
guggccaauacaagucauu

SEQ ID NO: 196 - RNA, 19 nt, Artificial Sequence
  Synthetic
uggccaauacaagucauug

SEQ ID NO: 197 - RNA, 19 nt, Artificial Sequence
  Synthetic
ggccaauacaagucauugc

SEQ ID NO: 198 - RNA, 19 nt, Artificial Sequence
  Synthetic
gccaauacaagucauugcc

SEQ ID NO: 199 - RNA, 19 nt, Artificial Sequence
  Synthetic
ccaauacaagucauugcca

SEQ ID NO: 200 - RNA, 19 nt, Artificial Sequence
  Synthetic
caauacaagucauugccag

SEQ ID NO: 201 - RNA, 19 nt, Artificial Sequence
  Synthetic
aauacaagucauugccaga

SEQ ID NO: 202 - RNA, 19 nt, Artificial Sequence
  Synthetic
auacaagucauugccagac

SEQ ID NO: 203 - RNA, 19 nt, Artificial Sequence
  Synthetic
uacaagucauugccagaca

SEQ ID NO: 204 - RNA, 19 nt, Artificial Sequence
  Synthetic
acaagucauugccagacag

SEQ ID NO: 205 - RNA, 19 nt, Artificial Sequence
  Synthetic
caagucauugccagacagu

SEQ ID NO: 206 - RNA, 19 nt, Artificial Sequence
  Synthetic
aagucauugccagacaguc

SEQ ID NO: 207 - RNA, 19 nt, Artificial Sequence
  Synthetic
agucauugccagacagucc

SEQ ID NO: 208 - RNA, 19 nt, Artificial Sequence
  Synthetic
gucauugccagacaguccu

SEQ ID NO: 209 - RNA, 19 nt, Artificial Sequence
  Synthetic
ucauugccagacaguccuu

SEQ ID NO: 210 - RNA, 19 nt, Artificial Sequence
  Synthetic
cauugccagacaguccuug

SEQ ID NO: 211 - RNA, 19 nt, Artificial Sequence
  Synthetic
auugccagacaguccuugg

SEQ ID NO: 212 - RNA, 19 nt, Artificial Sequence
  Synthetic
uugccagacaguccuugga

SEQ ID NO: 213 - RNA, 19 nt, Artificial Sequence
  Synthetic
ugccagacaguccuuggag

SEQ ID NO: 214 - RNA, 19 nt, Artificial Sequence
  Synthetic
gccagacaguccuuggagg

SEQ ID NO: 215 - RNA, 19 nt, Artificial Sequence
  Synthetic
ccagacaguccuuggaggc

SEQ ID NO: 216 - RNA, 19 nt, Artificial Sequence
  Synthetic
cagacaguccuuggaggca

SEQ ID NO: 217 - RNA, 19 nt, Artificial Sequence
  Synthetic
agacaguccuuggaggcac

SEQ ID NO: 218 - RNA, 19 nt, Artificial Sequence
  Synthetic
gacaguccuuggaggcaca

SEQ ID NO: 219 - RNA, 19 nt, Artificial Sequence
  Synthetic
acaguccuuggaggcacag

SEQ ID NO: 220 - RNA, 19 nt, Artificial Sequence
  Synthetic
caguccuuggaggcacaga

SEQ ID NO: 221 - RNA, 19 nt, Artificial Sequence
  Synthetic
aguccuuggaggcacagaa

SEQ ID NO: 222 - RNA, 19 nt, Artificial Sequence
  Synthetic
guccuuggaggcacagaac

SEQ ID NO: 223 - RNA, 19 nt, Artificial Sequence
  Synthetic
uccuuggaggcacagaaca

SEQ ID NO: 224 - RNA, 19 nt, Artificial Sequence
  Synthetic
ccuuggaggcacagaacag

SEQ ID NO: 225 - RNA, 19 nt, Artificial Sequence
  Synthetic
cuuggaggcacagaacagc

SEQ ID NO: 226 - RNA, 19 nt, Artificial Sequence
  Synthetic
uuggaggcacagaacagcc

SEQ ID NO: 227 - RNA, 19 nt, Artificial Sequence
  Synthetic
uggaggcacagaacagccu

SEQ ID NO: 228 - RNA, 19 nt, Artificial Sequence
  Synthetic
ggaggcacagaacagccua

SEQ ID NO: 229 - RNA, 19 nt, Artificial Sequence
  Synthetic
gaggcacagaacagccuag

SEQ ID NO: 230 - RNA, 19 nt, Artificial Sequence
  Synthetic
aggcacagaacagccuaga

SEQ ID NO: 231 - RNA, 19 nt, Artificial Sequence
  Synthetic
ggcacagaacagccuagac

SEQ ID NO: 232 - RNA, 19 nt, Artificial Sequence
  Synthetic
gcacagaacagccuagacc

SEQ ID NO: 233 - RNA, 19 nt, Artificial Sequence
  Synthetic
cacagaacagccuagaccc

SEQ ID NO: 234 - RNA, 19 nt, Artificial Sequence
  Synthetic
acagaacagccuagaccca

SEQ ID NO: 235 - RNA, 19 nt, Artificial Sequence
  Synthetic
cagaacagccuagacccag

SEQ ID NO: 236 - RNA, 19 nt, Artificial Sequence
  Synthetic
agaacagccuagacccagc

SEQ ID NO: 237 - RNA, 19 nt, Artificial Sequence
  Synthetic
gaacagccuagacccagcc

SEQ ID NO: 238 - RNA, 19 nt, Artificial Sequence
  Synthetic
aacagccuagacccagcca

SEQ ID NO: 239 - RNA, 19 nt, Artificial Sequence
  Synthetic
acagccuagacccagccaa

SEQ ID NO: 240 - RNA, 19 nt, Artificial Sequence
  Synthetic
cagccuagacccagccaag

SEQ ID NO: 241 - RNA, 19 nt, Artificial Sequence
  Synthetic
agccuagacccagccaagc

SEQ ID NO: 242 - RNA, 19 nt, Artificial Sequence
  Synthetic
gccuagacccagccaagcu

SEQ ID NO: 243 - RNA, 19 nt, Artificial Sequence
  Synthetic
ccuagacccagccaagcuc

SEQ ID NO: 244 - RNA, 19 nt, Artificial Sequence
  Synthetic
cuagacccagccaagcucu

SEQ ID NO: 245 - RNA, 19 nt, Artificial Sequence
  Synthetic
uagacccagccaagcucua

SEQ ID NO: 246 - RNA, 19 nt, Artificial Sequence
  Synthetic
agacccagccaagcucuag

SEQ ID NO: 247 - RNA, 19 nt, Artificial Sequence
  Synthetic
gacccagccaagcucuagg

SEQ ID NO: 248 - RNA, 19 nt, Artificial Sequence
  Synthetic
acccagccaagcucuagga

SEQ ID NO: 249 - RNA, 19 nt, Artificial Sequence
  Synthetic
cccagccaagcucuaggaa

SEQ ID NO: 250 - RNA, 19 nt, Artificial Sequence
  Synthetic
ccagccaagcucuaggaac

SEQ ID NO: 251 - RNA, 19 nt, Artificial Sequence
  Synthetic
cagccaagcucuaggaacu

SEQ ID NO: 252 - RNA, 19 nt, Artificial Sequence
  Synthetic
agccaagcucuaggaacuc

SEQ ID NO: 253 - RNA, 19 nt, Artificial Sequence
  Synthetic
gccaagcucuaggaacuca

SEQ ID NO: 254 - RNA, 19 nt, Artificial Sequence
  Synthetic
ccaagcucuaggaacucac

SEQ ID NO: 255 - RNA, 19 nt, Artificial Sequence
  Synthetic
caagcucuaggaacucacg

SEQ ID NO: 256 - RNA, 19 nt, Artificial Sequence
  Synthetic
aagcucuaggaacucacgg

SEQ ID NO: 257 - RNA, 19 nt, Artificial Sequence
  Synthetic
agcucuaggaacucacggu

SEQ ID NO: 258 - RNA, 19 nt, Artificial Sequence
  Synthetic
gcucuaggaacucacgguc

SEQ ID NO: 259 - RNA, 19 nt, Artificial Sequence
  Synthetic
cucuaggaacucacggucc

SEQ ID NO: 260 - RNA, 19 nt, Artificial Sequence
  Synthetic
ucuaggaacucacgguccc

SEQ ID NO: 261 - RNA, 19 nt, Artificial Sequence
  Synthetic
cuaggaacucacgguccca

SEQ ID NO: 262 - RNA, 19 nt, Artificial Sequence
  Synthetic
uaggaacucacggucccaa

SEQ ID NO: 263 - RNA, 19 nt, Artificial Sequence
  Synthetic
aggaacucacggucccaag

SEQ ID NO: 264 - RNA, 19 nt, Artificial Sequence
  Synthetic
ggaacucacggucccaagg

SEQ ID NO: 265 - RNA, 19 nt, Artificial Sequence
  Synthetic
gaacucacggucccaagga

SEQ ID NO: 266 - RNA, 19 nt, Artificial Sequence
  Synthetic
aacucacggucccaaggag

SEQ ID NO: 267 - RNA, 19 nt, Artificial Sequence
  Synthetic
acucacggucccaaggagu

SEQ ID NO: 268 - RNA, 19 nt, Artificial Sequence
  Synthetic
cucacggucccaaggaguc

SEQ ID NO: 269 - RNA, 19 nt, Artificial Sequence
  Synthetic
ucacggucccaaggagucu

SEQ ID NO: 270 - RNA, 19 nt, Artificial Sequence
  Synthetic
cacggucccaaggagucua

SEQ ID NO: 271 - RNA, 19 nt, Artificial Sequence
  Synthetic
acggucccaaggagucuag

SEQ ID NO: 272 - RNA, 19 nt, Artificial Sequence
  Synthetic
cggucccaaggagucuaga

SEQ ID NO: 273 - RNA, 19 nt, Artificial Sequence
  Synthetic
ggucccaaggagucuagac

SEQ ID NO: 274 - RNA, 19 nt, Artificial Sequence
  Synthetic
gucccaaggagucuagacg

SEQ ID NO: 275 - RNA, 19 nt, Artificial Sequence
  Synthetic
ucccaaggagucuagacgc

SEQ ID NO: 276 - RNA, 19 nt, Artificial Sequence
  Synthetic
cccaaggagucuagacgcu

SEQ ID NO: 277 - RNA, 19 nt, Artificial Sequence
  Synthetic
ccaaggagucuagacgcuu

SEQ ID NO: 278 - RNA, 19 nt, Artificial Sequence
  Synthetic
caaggagucuagacgcuug

SEQ ID NO: 279 - RNA, 19 nt, Artificial Sequence
  Synthetic
aaggagucuagacgcuugu

SEQ ID NO: 280 - RNA, 19 nt, Artificial Sequence
  Synthetic
aggagucuagacgcuuguu

SEQ ID NO: 281 - RNA, 19 nt, Artificial Sequence
  Synthetic
ggagucuagacgcuuguuc

SEQ ID NO: 282 - RNA, 19 nt, Artificial Sequence
  Synthetic
gagucuagacgcuuguucu

SEQ ID NO: 283 - RNA, 19 nt, Artificial Sequence
  Synthetic
agucuagacgcuuguucug

SEQ ID NO: 284 - RNA, 19 nt, Artificial Sequence
  Synthetic
gucuagacgcuuguucuga

SEQ ID NO: 285 - RNA, 19 nt, Artificial Sequence
  Synthetic
ucuagacgcuuguucugau

SEQ ID NO: 286 - RNA, 19 nt, Artificial Sequence
  Synthetic
cuagacgcuuguucugaug

SEQ ID NO: 287 - RNA, 19 nt, Artificial Sequence
  Synthetic
uagacgcuuguucugaugc

SEQ ID NO: 288 - RNA, 19 nt, Artificial Sequence
  Synthetic
agacgcuuguucugaugcu

SEQ ID NO: 289 - RNA, 19 nt, Artificial Sequence
  Synthetic
gacgcuuguucugaugcuc

SEQ ID NO: 290 - RNA, 19 nt, Artificial Sequence
  Synthetic
acgcuuguucugaugcucc

SEQ ID NO: 291 - RNA, 19 nt, Artificial Sequence
  Synthetic
cgcuuguucugaugcuccg

SEQ ID NO: 292 - RNA, 19 nt, Artificial Sequence
  Synthetic
gcuuguucugaugcuccga

SEQ ID NO: 293 - RNA, 19 nt, Artificial Sequence
  Synthetic
cuuguucugaugcuccgac

SEQ ID NO: 294 - RNA, 19 nt, Artificial Sequence
  Synthetic
uuguucugaugcuccgacc

SEQ ID NO: 295 - RNA, 19 nt, Artificial Sequence
  Synthetic
uguucugaugcuccgaccg

SEQ ID NO: 296 - RNA, 19 nt, Artificial Sequence
  Synthetic
guucugaugcuccgaccgu

SEQ ID NO: 297 - RNA, 19 nt, Artificial Sequence
  Synthetic
uucugaugcuccgaccgua

SEQ ID NO: 298 - RNA, 19 nt, Artificial Sequence
  Synthetic
ucugaugcuccgaccguaa

SEQ ID NO: 299 - RNA, 19 nt, Artificial Sequence
  Synthetic
cugaugcuccgaccguaag

SEQ ID NO: 300 - RNA, 19 nt, Artificial Sequence
  Synthetic
ugaugcuccgaccguaaga

SEQ ID NO: 301 - RNA, 19 nt, Artificial Sequence
  Synthetic
gaugcuccgaccguaagaa

SEQ ID NO: 302 - RNA, 19 nt, Artificial Sequence
  Synthetic
augcuccgaccguaagaaa

SEQ ID NO: 303 - RNA, 19 nt, Artificial Sequence
  Synthetic
ugcuccgaccguaagaaaa

SEQ ID NO: 304 - RNA, 19 nt, Artificial Sequence
  Synthetic
gcuccgaccguaagaaaaa

SEQ ID NO: 305 - RNA, 19 nt, Artificial Sequence
  Synthetic
cuccgaccguaagaaaaau

SEQ ID NO: 306 - RNA, 19 nt, Artificial Sequence
  Synthetic
uccgaccguaagaaaaaug

SEQ ID NO: 307 - RNA, 19 nt, Artificial Sequence
  Synthetic
ccgaccguaagaaaaaugu

SEQ ID NO: 308 - RNA, 19 nt, Artificial Sequence
  Synthetic
cgaccguaagaaaaaugug

SEQ ID NO: 309 - RNA, 19 nt, Artificial Sequence
  Synthetic
gaccguaagaaaaaugugg

SEQ ID NO: 310 - RNA, 19 nt, Artificial Sequence
  Synthetic
accguaagaaaaauguggg

SEQ ID NO: 311 - RNA, 19 nt, Artificial Sequence
  Synthetic
ccguaagaaaaauguggga

SEQ ID NO: 312 - RNA, 19 nt, Artificial Sequence
  Synthetic
cguaagaaaaaugugggag

SEQ ID NO: 313 - RNA, 19 nt, Artificial Sequence
  Synthetic
guaagaaaaaugugggagu

SEQ ID NO: 314 - RNA, 19 nt, Artificial Sequence
  Synthetic
uaagaaaaaugugggagug

SEQ ID NO: 315 - RNA, 19 nt, Artificial Sequence
  Synthetic
aagaaaaaugugggaguga

SEQ ID NO: 316 - RNA, 19 nt, Artificial Sequence
  Synthetic
agaaaaaugugggagugau

SEQ ID NO: 317 - RNA, 19 nt, Artificial Sequence
  Synthetic
gaaaaaugugggagugaug

SEQ ID NO: 318 - RNA, 19 nt, Artificial Sequence
  Synthetic
aaaaaugugggagugauga

SEQ ID NO: 319 - RNA, 19 nt, Artificial Sequence
  Synthetic
aaaaugugggagugaugaa

SEQ ID NO: 320 - RNA, 19 nt, Artificial Sequence
  Synthetic
aaaugugggagugaugaag

SEQ ID NO: 321 - RNA, 19 nt, Artificial Sequence
  Synthetic
aaugugggagugaugaagg

SEQ ID NO: 322 - RNA, 19 nt, Artificial Sequence
  Synthetic
augugggagugaugaaggc

SEQ ID NO: 323 - RNA, 19 nt, Artificial Sequence
  Synthetic
ugugggagugaugaaggcu

SEQ ID NO: 324 - RNA, 19 nt, Artificial Sequence
  Synthetic
gugggagugaugaaggcuu

SEQ ID NO: 325 - RNA, 19 nt, Artificial Sequence
  Synthetic
ugggagugaugaaggcuuu

SEQ ID NO: 326 - RNA, 19 nt, Artificial Sequence
  Synthetic
gggagugaugaaggcuuua

SEQ ID NO: 327 - RNA, 19 nt, Artificial Sequence
  Synthetic
ggagugaugaaggcuuuau

SEQ ID NO: 328 - RNA, 19 nt, Artificial Sequence
  Synthetic
gagugaugaaggcuuuaug

SEQ ID NO: 329 - RNA, 19 nt, Artificial Sequence
  Synthetic
agugaugaaggcuuuauga

SEQ ID NO: 330 - RNA, 19 nt, Artificial Sequence
  Synthetic
gugaugaaggcuuuaugau

SEQ ID NO: 331 - RNA, 19 nt, Artificial Sequence
  Synthetic
ugaugaaggcuuuaugauu

SEQ ID NO: 332 - RNA, 19 nt, Artificial Sequence
  Synthetic
gaugaaggcuuuaugauuu

SEQ ID NO: 333 - RNA, 19 nt, Artificial Sequence
  Synthetic
augaaggcuuuaugauuua

SEQ ID NO: 334 - RNA, 19 nt, Artificial Sequence
  Synthetic
ugaaggcuuuaugauuuac

SEQ ID NO: 335 - RNA, 19 nt, Artificial Sequence
  Synthetic
gaaggcuuuaugauuuacu

SEQ ID NO: 336 - RNA, 19 nt, Artificial Sequence
  Synthetic
aaggcuuuaugauuuacuc

SEQ ID NO: 337 - RNA, 19 nt, Artificial Sequence
  Synthetic
aggcuuuaugauuuacuca

SEQ ID NO: 338 - RNA, 19 nt, Artificial Sequence
  Synthetic
ggcuuuaugauuuacucau

SEQ ID NO: 339 - RNA, 19 nt, Artificial Sequence
  Synthetic
gcuuuaugauuuacucauu

SEQ ID NO: 340 - RNA, 19 nt, Artificial Sequence
  Synthetic
cuuuaugauuuacucauua

SEQ ID NO: 341 - RNA, 19 nt, Artificial Sequence
  Synthetic
uuuaugauuuacucauuau

SEQ ID NO: 342 - RNA, 19 nt, Artificial Sequence
  Synthetic
uuaugauuuacucauuaua

SEQ ID NO: 343 - RNA, 19 nt, Artificial Sequence
  Synthetic
uaugauuuacucauuauag

SEQ ID NO: 344 - RNA, 19 nt, Artificial Sequence
  Synthetic
augauuuacucauuauagu

SEQ ID NO: 345 - RNA, 19 nt, Artificial Sequence
  Synthetic
ugauuuacucauuauagua

SEQ ID NO: 346 - RNA, 19 nt, Artificial Sequence
  Synthetic
gauuuacucauuauaguaa

SEQ ID NO: 347 - RNA, 19 nt, Artificial Sequence
  Synthetic
auuuacucauuauaguaau

SEQ ID NO: 348 - RNA, 19 nt, Artificial Sequence
  Synthetic
uuuacucauuauaguaaua

SEQ ID NO: 349 - RNA, 19 nt, Artificial Sequence
  Synthetic
uuacucauuauaguaauaa

SEQ ID NO: 350 - RNA, 19 nt, Artificial Sequence
  Synthetic
uacucauuauaguaauaau

SEQ ID NO: 351 - RNA, 19 nt, Artificial Sequence
  Synthetic
acucauuauaguaauaaua

SEQ ID NO: 352 - RNA, 19 nt, Artificial Sequence
  Synthetic
cucauuauaguaauaauag

SEQ ID NO: 353 - RNA, 19 nt, Artificial Sequence
  Synthetic
ucauuauaguaauaauagc

SEQ ID NO: 354 - RNA, 19 nt, Artificial Sequence
  Synthetic
cauuauaguaauaauagca

SEQ ID NO: 355 - RNA, 19 nt, Artificial Sequence
  Synthetic
auuauaguaauaauagcag

SEQ ID NO: 356 - RNA, 19 nt, Artificial Sequence
  Synthetic
uuauaguaauaauagcagc

SEQ ID NO: 357 - RNA, 19 nt, Artificial Sequence
  Synthetic
uauaguaauaauagcagcc

SEQ ID NO: 358 - RNA, 19 nt, Artificial Sequence
  Synthetic
auaguaauaauagcagccu

SEQ ID NO: 359 - RNA, 19 nt, Artificial Sequence
  Synthetic
uaguaauaauagcagccua

SEQ ID NO: 360 - RNA, 19 nt, Artificial Sequence
  Synthetic
aguaauaauagcagccuag

SEQ ID NO: 361 - RNA, 19 nt, Artificial Sequence
  Synthetic
guaauaauagcagccuagc

SEQ ID NO: 362 - RNA, 19 nt, Artificial Sequence
  Synthetic
uaauaauagcagccuagcu

SEQ ID NO: 363 - RNA, 19 nt, Artificial Sequence
  Synthetic
aauaauagcagccuagcua

SEQ ID NO: 364 - RNA, 19 nt, Artificial Sequence
  Synthetic
auaauagcagccuagcuag

SEQ ID NO: 365 - RNA, 19 nt, Artificial Sequence
  Synthetic
uaauagcagccuagcuagg

SEQ ID NO: 366 - RNA, 19 nt, Artificial Sequence
  Synthetic
aauagcagccuagcuaggu

SEQ ID NO: 367 - RNA, 19 nt, Artificial Sequence
  Synthetic
auagcagccuagcuaggua

SEQ ID NO: 368 - RNA, 19 nt, Artificial Sequence
  Synthetic
uagcagccuagcuagguac

SEQ ID NO: 369 - RNA, 19 nt, Artificial Sequence
  Synthetic
agcagccuagcuagguaca

SEQ ID NO: 370 - RNA, 19 nt, Artificial Sequence
  Synthetic
gcagccuagcuagguacaa

SEQ ID NO: 371 - RNA, 19 nt, Artificial Sequence
  Synthetic
cagccuagcuagguacaaa

SEQ ID NO: 372 - RNA, 19 nt, Artificial Sequence
  Synthetic
agccuagcuagguacaaaa

SEQ ID NO: 373 - RNA, 19 nt, Artificial Sequence
  Synthetic
gccuagcuagguacaaaag

SEQ ID NO: 374 - RNA, 19 nt, Artificial Sequence
  Synthetic
ccuagcuagguacaaaagc

SEQ ID NO: 375 - RNA, 19 nt, Artificial Sequence
  Synthetic
cuagcuagguacaaaagca

SEQ ID NO: 376 - RNA, 19 nt, Artificial Sequence
  Synthetic
uagcuagguacaaaagcag

SEQ ID NO: 377 - RNA, 19 nt, Artificial Sequence
  Synthetic
agcuagguacaaaagcagu

SEQ ID NO: 378 - RNA, 19 nt, Artificial Sequence
  Synthetic
gcuagguacaaaagcaguu

SEQ ID NO: 379 - RNA, 19 nt, Artificial Sequence
  Synthetic
cuagguacaaaagcaguua

SEQ ID NO: 380 - RNA, 19 nt, Artificial Sequence
  Synthetic
uagguacaaaagcaguuau

SEQ ID NO: 381 - RNA, 19 nt, Artificial Sequence
  Synthetic
agguacaaaagcaguuaua

SEQ ID NO: 382 - RNA, 19 nt, Artificial Sequence
  Synthetic
gguacaaaagcaguuauaa

SEQ ID NO: 383 - RNA, 19 nt, Artificial Sequence
  Synthetic
guacaaaagcaguuauaaa

SEQ ID NO: 384 - RNA, 19 nt, Artificial Sequence
  Synthetic
uacaaaagcaguuauaaac

SEQ ID NO: 385 - RNA, 19 nt, Artificial Sequence
  Synthetic
acaaaagcaguuauaaacc

SEQ ID NO: 386 - RNA, 19 nt, Artificial Sequence
  Synthetic
caaaagcaguuauaaacca

SEQ ID NO: 387 - RNA, 19 nt, Artificial Sequence
  Synthetic
aaaagcaguuauaaaccau

SEQ ID NO: 388 - RNA, 19 nt, Artificial Sequence
  Synthetic
aaagcaguuauaaaccauu

SEQ ID NO: 389 - RNA, 19 nt, Artificial Sequence
  Synthetic
aagcaguuauaaaccauuu

SEQ ID NO: 390 - RNA, 19 nt, Artificial Sequence
  Synthetic
agcaguuauaaaccauuua

SEQ ID NO: 391 - RNA, 19 nt, Artificial Sequence
  Synthetic
gcaguuauaaaccauuuau

SEQ ID NO: 392 - RNA, 19 nt, Artificial Sequence
  Synthetic
caguuauaaaccauuuaua

SEQ ID NO: 393 - RNA, 19 nt, Artificial Sequence
  Synthetic
aguuauaaaccauuuauau

SEQ ID NO: 394 - RNA, 19 nt, Artificial Sequence
  Synthetic
guuauaaaccauuuauauu

SEQ ID NO: 395 - RNA, 19 nt, Artificial Sequence
  Synthetic
uuauaaaccauuuauauua

SEQ ID NO: 396 - RNA, 19 nt, Artificial Sequence
  Synthetic
uauaaaccauuuauauuac

SEQ ID NO: 397 - RNA, 19 nt, Artificial Sequence
  Synthetic
auaaaccauuuauauuaca

SEQ ID NO: 398 - RNA, 19 nt, Artificial Sequence
  Synthetic
uaaaccauuuauauuacac

SEQ ID NO: 399 - RNA, 19 nt, Artificial Sequence
  Synthetic
aaaccauuuauauuacaca

SEQ ID NO: 400 - RNA, 19 nt, Artificial Sequence
  Synthetic
aaccauuuauauuacacag

SEQ ID NO: 401 - RNA, 19 nt, Artificial Sequence
  Synthetic
accauuuauauuacacaga

SEQ ID NO: 402 - RNA, 19 nt, Artificial Sequence
  Synthetic
ccauuuauauuacacagaa

SEQ ID NO: 403 - RNA, 19 nt, Artificial Sequence
  Synthetic
cauuuauauuacacagaau

SEQ ID NO: 404 - RNA, 19 nt, Artificial Sequence
  Synthetic
auuuauauuacacagaauu

SEQ ID NO: 405 - RNA, 19 nt, Artificial Sequence
  Synthetic
uuuauauuacacagaauua

SEQ ID NO: 406 - RNA, 19 nt, Artificial Sequence
  Synthetic
uuauauuacacagaauuau

SEQ ID NO: 407 - RNA, 19 nt, Artificial Sequence
  Synthetic
uauauuacacagaauuauu

SEQ ID NO: 408 - RNA, 19 nt, Artificial Sequence
  Synthetic
auauuacacagaauuauuc

SEQ ID NO: 409 - RNA, 19 nt, Artificial Sequence
  Synthetic
uauuacacagaauuauuca

SEQ ID NO: 410 - RNA, 19 nt, Artificial Sequence
  Synthetic
auuacacagaauuauucag

SEQ ID NO: 411 - RNA, 19 nt, Artificial Sequence
  Synthetic
uuacacagaauuauucagg

SEQ ID NO: 412 - RNA, 19 nt, Artificial Sequence
  Synthetic
uacacagaauuauucaggu

SEQ ID NO: 413 - RNA, 19 nt, Artificial Sequence
  Synthetic
acacagaauuauucagguc

SEQ ID NO: 414 - RNA, 19 nt, Artificial Sequence
  Synthetic
cacagaauuauucaggucu

SEQ ID NO: 415 - RNA, 19 nt, Artificial Sequence
  Synthetic
acagaauuauucaggucuc

SEQ ID NO: 416 - RNA, 19 nt, Artificial Sequence
  Synthetic
cagaauuauucaggucucc

SEQ ID NO: 417 - RNA, 19 nt, Artificial Sequence
  Synthetic
agaauuauucaggucucca

SEQ ID NO: 418 - RNA, 19 nt, Artificial Sequence
  Synthetic
gaauuauucaggucuccau

SEQ ID NO: 419 - RNA, 19 nt, Artificial Sequence
  Synthetic
aauuauucaggucuccauu

SEQ ID NO: 420 - RNA, 19 nt, Artificial Sequence
  Synthetic
auuauucaggucuccauuc

SEQ ID NO: 421 - RNA, 19 nt, Artificial Sequence
  Synthetic
uuauucaggucuccauucu

SEQ ID NO: 422 - RNA, 19 nt, Artificial Sequence
  Synthetic
uauucaggucuccauucua

SEQ ID NO: 423 - RNA, 19 nt, Artificial Sequence
  Synthetic
auucaggucuccauucuau

SEQ ID NO: 424 - RNA, 19 nt, Artificial Sequence
  Synthetic
uucaggucuccauucuauc

SEQ ID NO: 425 - RNA, 19 nt, Artificial Sequence
  Synthetic
ucaggucuccauucuaucu

SEQ ID NO: 426 - RNA, 19 nt, Artificial Sequence
  Synthetic
caggucuccauucuaucuu

SEQ ID NO: 427 - RNA, 19 nt, Artificial Sequence
  Synthetic
aggucuccauucuaucuua

SEQ ID NO: 428 - RNA, 19 nt, Artificial Sequence
  Synthetic
ggucuccauucuaucuuau

SEQ ID NO: 429 - RNA, 19 nt, Artificial Sequence
  Synthetic
gucuccauucuaucuuaug

SEQ ID NO: 430 - RNA, 19 nt, Artificial Sequence
  Synthetic
ucuccauucuaucuuaugu

SEQ ID NO: 431 - RNA, 19 nt, Artificial Sequence
  Synthetic
cuccauucuaucuuauguu

SEQ ID NO: 432 - RNA, 19 nt, Artificial Sequence
  Synthetic
uccauucuaucuuauguug

SEQ ID NO: 433 - RNA, 19 nt, Artificial Sequence
  Synthetic
ccauucuaucuuauguugu

SEQ ID NO: 434 - RNA, 19 nt, Artificial Sequence
  Synthetic
cauucuaucuuauguugua

SEQ ID NO: 435 - RNA, 19 nt, Artificial Sequence
  Synthetic
auucuaucuuauguuguaa

SEQ ID NO: 436 - RNA, 19 nt, Artificial Sequence
  Synthetic
uucuaucuuauguuguaaa

SEQ ID NO: 437 - RNA, 19 nt, Artificial Sequence
  Synthetic
ucuaucuuauguuguaaaa

SEQ ID NO: 438 - RNA, 19 nt, Artificial Sequence
  Synthetic
cuaucuuauguuguaaaau

SEQ ID NO: 439 - RNA, 19 nt, Artificial Sequence
  Synthetic
uaucuuauguuguaaaauu

SEQ ID NO: 440 - RNA, 19 nt, Artificial Sequence
  Synthetic
aucuuauguuguaaaauug

SEQ ID NO: 441 - RNA, 19 nt, Artificial Sequence
  Synthetic
ucuuauguuguaaaauugu

SEQ ID NO: 442 - RNA, 19 nt, Artificial Sequence
  Synthetic
cuuauguuguaaaauuguu

SEQ ID NO: 443 - RNA, 19 nt, Artificial Sequence
  Synthetic
uuauguuguaaaauuguua

SEQ ID NO: 444 - RNA, 19 nt, Artificial Sequence
  Synthetic
uauguuguaaaauuguuaa

SEQ ID NO: 445 - RNA, 19 nt, Artificial Sequence
  Synthetic
auguuguaaaauuguuaau

SEQ ID NO: 446 - RNA, 19 nt, Artificial Sequence
  Synthetic
uguuguaaaauuguuaauu

SEQ ID NO: 447 - RNA, 19 nt, Artificial Sequence
  Synthetic
guuguaaaauuguuaauug

SEQ ID NO: 448 - RNA, 19 nt, Artificial Sequence
  Synthetic
uuguaaaauuguuaauugg

SEQ ID NO: 449 - RNA, 19 nt, Artificial Sequence
  Synthetic
uguaaaauuguuaauugga

SEQ ID NO: 450 - RNA, 19 nt, Artificial Sequence
  Synthetic
guaaaauuguuaauuggau

SEQ ID NO: 451 - RNA, 19 nt, Artificial Sequence
  Synthetic
uaaaauuguuaauuggauu

SEQ ID NO: 452 - RNA, 19 nt, Artificial Sequence
  Synthetic
aaaauuguuaauuggauuu

SEQ ID NO: 453 - RNA, 19 nt, Artificial Sequence
  Synthetic
aaauuguuaauuggauuuc

SEQ ID NO: 454 - RNA, 19 nt, Artificial Sequence
  Synthetic
aauuguuaauuggauuucc

SEQ ID NO: 455 - RNA, 19 nt, Artificial Sequence
  Synthetic
auuguuaauuggauuucca

SEQ ID NO: 456 - RNA, 19 nt, Artificial Sequence
  Synthetic
uuguuaauuggauuuccag

SEQ ID NO: 457 - RNA, 19 nt, Artificial Sequence
  Synthetic
uguuaauuggauuuccagu

SEQ ID NO: 458 - RNA, 19 nt, Artificial Sequence
  Synthetic
guuaauuggauuuccagug

SEQ ID NO: 459 - RNA, 19 nt, Artificial Sequence
  Synthetic
uuaauuggauuuccaguga

SEQ ID NO: 460 - RNA, 19 nt, Artificial Sequence
  Synthetic
uaauuggauuuccagugag

SEQ ID NO: 461 - RNA, 19 nt, Artificial Sequence
  Synthetic
aauuggauuuccagugagu

SEQ ID NO: 462 - RNA, 19 nt, Artificial Sequence
  Synthetic
auuggauuuccagugaguu

SEQ ID NO: 463 - RNA, 19 nt, Artificial Sequence
  Synthetic
uuggauuuccagugaguug

SEQ ID NO: 464 - RNA, 19 nt, Artificial Sequence
  Synthetic
uggauuuccagugaguugu

SEQ ID NO: 465 - RNA, 19 nt, Artificial Sequence
  Synthetic
ggauuuccagugaguuguu

SEQ ID NO: 466 - RNA, 19 nt, Artificial Sequence
  Synthetic
gauuuccagugaguuguuu

SEQ ID NO: 467 - RNA, 19 nt, Artificial Sequence
  Synthetic
auuuccagugaguuguuua

SEQ ID NO: 468 - RNA, 19 nt, Artificial Sequence
  Synthetic
uuuccagugaguuguuuag

SEQ ID NO: 469 - RNA, 19 nt, Artificial Sequence
  Synthetic
uuccagugaguuguuuaga

SEQ ID NO: 470 - RNA, 19 nt, Artificial Sequence
  Synthetic
uccagugaguuguuuagau

SEQ ID NO: 471 - RNA, 19 nt, Artificial Sequence
  Synthetic
ccagugaguuguuuagaug

SEQ ID NO: 472 - RNA, 19 nt, Artificial Sequence
  Synthetic
cagugaguuguuuagauga

SEQ ID NO: 473 - RNA, 19 nt, Artificial Sequence
  Synthetic
agugaguuguuuagaugau

SEQ ID NO: 474 - RNA, 19 nt, Artificial Sequence
  Synthetic
gugaguuguuuagaugauu

SEQ ID NO: 475 - RNA, 19 nt, Artificial Sequence
  Synthetic
ugaguuguuuagaugauua

SEQ ID NO: 476 - RNA, 19 nt, Artificial Sequence
  Synthetic
gaguuguuuagaugauuag

SEQ ID NO: 477 - RNA, 19 nt, Artificial Sequence
  Synthetic
aguuguuuagaugauuagu

SEQ ID NO: 478 - RNA, 19 nt, Artificial Sequence
  Synthetic
guuguuuagaugauuagug

SEQ ID NO: 479 - RNA, 19 nt, Artificial Sequence
  Synthetic
uuguuuagaugauuaguga

SEQ ID NO: 480 - RNA, 19 nt, Artificial Sequence
  Synthetic
uguuuagaugauuagugau

SEQ ID NO: 481 - RNA, 19 nt, Artificial Sequence
  Synthetic
guuuagaugauuagugaua

SEQ ID NO: 482 - RNA, 19 nt, Artificial Sequence
  Synthetic
uuuagaugauuagugauaa

SEQ ID NO: 483 - RNA, 19 nt, Artificial Sequence
  Synthetic
uuagaugauuagugauaau

SEQ ID NO: 484 - RNA, 19 nt, Artificial Sequence
  Synthetic
uagaugauuagugauaaua

SEQ ID NO: 485 - RNA, 19 nt, Artificial Sequence
  Synthetic
agaugauuagugauaauaa

SEQ ID NO: 486 - RNA, 19 nt, Artificial Sequence
  Synthetic
gaugauuagugauaauaag

SEQ ID NO: 487 - RNA, 19 nt, Artificial Sequence
  Synthetic
augauuagugauaauaagg

SEQ ID NO: 488 - RNA, 19 nt, Artificial Sequence
  Synthetic
ugauuagugauaauaagga

SEQ ID NO: 489 - RNA, 19 nt, Artificial Sequence
  Synthetic
gauuagugauaauaaggaa

SEQ ID NO: 490 - RNA, 19 nt, Artificial Sequence
  Synthetic
auuagugauaauaaggaau

SEQ ID NO: 491 - RNA, 19 nt, Artificial Sequence
  Synthetic
uuagugauaauaaggaaug

SEQ ID NO: 492 - RNA, 19 nt, Artificial Sequence
  Synthetic
uagugauaauaaggaaugg

SEQ ID NO: 493 - RNA, 19 nt, Artificial Sequence
  Synthetic
agugauaauaaggaauggu

SEQ ID NO: 494 - RNA, 19 nt, Artificial Sequence
  Synthetic
gugauaauaaggaauggua

SEQ ID NO: 495 - RNA, 19 nt, Artificial Sequence
  Synthetic
ugauaauaaggaaugguaa

SEQ ID NO: 496 - RNA, 19 nt, Artificial Sequence
  Synthetic
gauaauaaggaaugguaaa

SEQ ID NO: 497 - RNA, 19 nt, Artificial Sequence
  Synthetic
auaauaaggaaugguaaau

SEQ ID NO: 498 - RNA, 19 nt, Artificial Sequence
  Synthetic
uaauaaggaaugguaaauc

SEQ ID NO: 499 - RNA, 19 nt, Artificial Sequence
  Synthetic
aauaaggaaugguaaaucc

SEQ ID NO: 500 - RNA, 19 nt, Artificial Sequence
  Synthetic
auaaggaaugguaaaucca

SEQ ID NO: 501 - RNA, 19 nt, Artificial Sequence
  Synthetic
uaaggaaugguaaauccau

SEQ ID NO: 502 - RNA, 19 nt, Artificial Sequence
  Synthetic
aaggaaugguaaauccaua

SEQ ID NO: 503 - RNA, 19 nt, Artificial Sequence
  Synthetic
aggaaugguaaauccauag

SEQ ID NO: 504 - RNA, 19 nt, Artificial Sequence
  Synthetic
ggaaugguaaauccauagc

SEQ ID NO: 505 - RNA, 19 nt, Artificial Sequence
  Synthetic
gaaugguaaauccauagca

SEQ ID NO: 506 - RNA, 19 nt, Artificial Sequence
  Synthetic
aaugguaaauccauagcac

SEQ ID NO: 507 - RNA, 19 nt, Artificial Sequence
  Synthetic
augguaaauccauagcacc

SEQ ID NO: 508 - RNA, 19 nt, Artificial Sequence
  Synthetic
ugguaaauccauagcacca

SEQ ID NO: 509 - RNA, 19 nt, Artificial Sequence
  Synthetic
gguaaauccauagcaccau

SEQ ID NO: 510 - RNA, 19 nt, Artificial Sequence
  Synthetic
guaaauccauagcaccauu

SEQ ID NO: 511 - RNA, 19 nt, Artificial Sequence
  Synthetic
uaaauccauagcaccauuu

SEQ ID NO: 512 - RNA, 19 nt, Artificial Sequence
  Synthetic
aaauccauagcaccauuuc

SEQ ID NO: 513 - RNA, 19 nt, Artificial Sequence
  Synthetic
aauccauagcaccauuuca

SEQ ID NO: 514 - RNA, 19 nt, Artificial Sequence
  Synthetic
auccauagcaccauuucaa

SEQ ID NO: 515 - RNA, 19 nt, Artificial Sequence
  Synthetic
uccauagcaccauuucaaa

SEQ ID NO: 516 - RNA, 19 nt, Artificial Sequence
  Synthetic
ccauagcaccauuucaaag

SEQ ID NO: 517 - RNA, 19 nt, Artificial Sequence
  Synthetic
cauagcaccauuucaaaga

SEQ ID NO: 518 - RNA, 19 nt, Artificial Sequence
  Synthetic
auagcaccauuucaaagac

SEQ ID NO: 519 - RNA, 19 nt, Artificial Sequence
  Synthetic
uagcaccauuucaaagacu

SEQ ID NO: 520 - RNA, 19 nt, Artificial Sequence
  Synthetic
agcaccauuucaaagacuu

SEQ ID NO: 521 - RNA, 19 nt, Artificial Sequence
  Synthetic
gcaccauuucaaagacuug

SEQ ID NO: 522 - RNA, 19 nt, Artificial Sequence
  Synthetic
caccauuucaaagacuugu

SEQ ID NO: 523 - RNA, 19 nt, Artificial Sequence
  Synthetic
accauuucaaagacuuguu

SEQ ID NO: 524 - RNA, 19 nt, Artificial Sequence
  Synthetic
ccauuucaaagacuuguug

SEQ ID NO: 525 - RNA, 19 nt, Artificial Sequence
  Synthetic
cauuucaaagacuuguugu

SEQ ID NO: 526 - RNA, 19 nt, Artificial Sequence
  Synthetic
auuucaaagacuuguuguc

SEQ ID NO: 527 - RNA, 19 nt, Artificial Sequence
  Synthetic
uuucaaagacuuguuguca

SEQ ID NO: 528 - RNA, 19 nt, Artificial Sequence
  Synthetic
uucaaagacuuguugucac

SEQ ID NO: 529 - RNA, 19 nt, Artificial Sequence
  Synthetic
ucaaagacuuguugucacu

SEQ ID NO: 530 - RNA, 19 nt, Artificial Sequence
  Synthetic
caaagacuuguugucacug

SEQ ID NO: 531 - RNA, 19 nt, Artificial Sequence
  Synthetic
aaagacuuguugucacuga

SEQ ID NO: 532 - RNA, 19 nt, Artificial Sequence
  Synthetic
aagacuuguugucacugau

SEQ ID NO: 533 - RNA, 19 nt, Artificial Sequence
  Synthetic
agacuuguugucacugauu

SEQ ID NO: 534 - RNA, 19 nt, Artificial Sequence
  Synthetic
gacuuguugucacugauuu

SEQ ID NO: 535 - RNA, 19 nt, Artificial Sequence
  Synthetic
acuuguugucacugauuuc

SEQ ID NO: 536 - RNA, 19 nt, Artificial Sequence
  Synthetic
cuuguugucacugauuucu

SEQ ID NO: 537 - RNA, 19 nt, Artificial Sequence
  Synthetic
uuguugucacugauuucuc

SEQ ID NO: 538 - RNA, 19 nt, Artificial Sequence
  Synthetic
uguugucacugauuucuca

SEQ ID NO: 539 - RNA, 19 nt, Artificial Sequence
  Synthetic
guugucacugauuucucau

SEQ ID NO: 540 - RNA, 19 nt, Artificial Sequence
  Synthetic
uugucacugauuucucauu

SEQ ID NO: 541 - RNA, 19 nt, Artificial Sequence
  Synthetic
ugucacugauuucucauuu

SEQ ID NO: 542 - RNA, 19 nt, Artificial Sequence
  Synthetic
gucacugauuucucauuua

SEQ ID NO: 543 - RNA, 19 nt, Artificial Sequence
  Synthetic
ucacugauuucucauuuag

SEQ ID NO: 544 - RNA, 19 nt, Artificial Sequence
  Synthetic
cacugauuucucauuuaga

SEQ ID NO: 545 - RNA, 19 nt, Artificial Sequence
  Synthetic
acugauuucucauuuagau

SEQ ID NO: 546 - RNA, 19 nt, Artificial Sequence
  Synthetic
cugauuucucauuuagaug

SEQ ID NO: 547 - RNA, 19 nt, Artificial Sequence
  Synthetic
ugauuucucauuuagaugu

SEQ ID NO: 548 - RNA, 19 nt, Artificial Sequence
  Synthetic
gauuucucauuuagaugug

SEQ ID NO: 549 - RNA, 19 nt, Artificial Sequence
  Synthetic
auuucucauuuagaugugu

SEQ ID NO: 550 - RNA, 19 nt, Artificial Sequence
  Synthetic
uuucucauuuagaugugug

SEQ ID NO: 551 - RNA, 19 nt, Artificial Sequence
  Synthetic
uucucauuuagauguguga

SEQ ID NO: 552 - RNA, 19 nt, Artificial Sequence
  Synthetic
ucucauuuagaugugugac

SEQ ID NO: 553 - RNA, 19 nt, Artificial Sequence
  Synthetic
cucauuuagaugugugacg

SEQ ID NO: 554 - RNA, 19 nt, Artificial Sequence
  Synthetic
ucauuuagaugugugacga

SEQ ID NO: 555 - RNA, 19 nt, Artificial Sequence
  Synthetic
cauuuagaugugugacgaa

SEQ ID NO: 556 - RNA, 19 nt, Artificial Sequence
  Synthetic
auuuagaugugugacgaag

SEQ ID NO: 557 - RNA, 19 nt, Artificial Sequence
  Synthetic
uuuagaugugugacgaaga

SEQ ID NO: 558 - RNA, 19 nt, Artificial Sequence
  Synthetic
uuagaugugugacgaagau

SEQ ID NO: 559 - RNA, 19 nt, Artificial Sequence
  Synthetic
uagaugugugacgaagaua

SEQ ID NO: 560 - RNA, 19 nt, Artificial Sequence
  Synthetic
agaugugugacgaagauac

SEQ ID NO: 561 - RNA, 19 nt, Artificial Sequence
  Synthetic
gaugugugacgaagauacu

SEQ ID NO: 562 - RNA, 19 nt, Artificial Sequence
  Synthetic
augugugacgaagauacuc

SEQ ID NO: 563 - RNA, 19 nt, Artificial Sequence
  Synthetic
ugugugacgaagauacucc

SEQ ID NO: 564 - RNA, 19 nt, Artificial Sequence
  Synthetic
gugugacgaagauacucca

SEQ ID NO: 565 - RNA, 19 nt, Artificial Sequence
  Synthetic
ugugacgaagauacuccac

SEQ ID NO: 566 - RNA, 19 nt, Artificial Sequence
  Synthetic
gugacgaagauacuccacc

SEQ ID NO: 567 - RNA, 19 nt, Artificial Sequence
  Synthetic
ugacgaagauacuccaccu

SEQ ID NO: 568 - RNA, 19 nt, Artificial Sequence
  Synthetic
gacgaagauacuccaccug

SEQ ID NO: 569 - RNA, 19 nt, Artificial Sequence
  Synthetic
acgaagauacuccaccugu

SEQ ID NO: 570 - RNA, 19 nt, Artificial Sequence
  Synthetic
cgaagauacuccaccugua

SEQ ID NO: 571 - RNA, 19 nt, Artificial Sequence
  Synthetic
gaagauacuccaccuguaa

SEQ ID NO: 572 - RNA, 19 nt, Artificial Sequence
  Synthetic
aagauacuccaccuguaag

SEQ ID NO: 573 - RNA, 19 nt, Artificial Sequence
  Synthetic
agauacuccaccuguaagg

SEQ ID NO: 574 - RNA, 19 nt, Artificial Sequence
  Synthetic
gauacuccaccuguaaggg

SEQ ID NO: 575 - RNA, 19 nt, Artificial Sequence
  Synthetic
auacuccaccuguaagggc

SEQ ID NO: 576 - RNA, 19 nt, Artificial Sequence
  Synthetic
uacuccaccuguaagggca

SEQ ID NO: 577 - RNA, 19 nt, Artificial Sequence
  Synthetic
acuccaccuguaagggcaa

SEQ ID NO: 578 - RNA, 19 nt, Artificial Sequence
  Synthetic
cuccaccuguaagggcaag

SEQ ID NO: 579 - RNA, 19 nt, Artificial Sequence
  Synthetic
uccaccuguaagggcaagu

SEQ ID NO: 580 - RNA, 19 nt, Artificial Sequence
  Synthetic
ccaccuguaagggcaagua

SEQ ID NO: 581 - RNA, 19 nt, Artificial Sequence
  Synthetic
caccuguaagggcaaguau

SEQ ID NO: 582 - RNA, 19 nt, Artificial Sequence
  Synthetic
accuguaagggcaaguaug

SEQ ID NO: 583 - RNA, 19 nt, Artificial Sequence
  Synthetic
ccuguaagggcaaguaugc

SEQ ID NO: 584 - RNA, 19 nt, Artificial Sequence
  Synthetic
cuguaagggcaaguaugcc

SEQ ID NO: 585 - RNA, 19 nt, Artificial Sequence
  Synthetic
uguaagggcaaguaugcca

SEQ ID NO: 586 - RNA, 19 nt, Artificial Sequence
  Synthetic
guaagggcaaguaugccaa

SEQ ID NO: 587 - RNA, 19 nt, Artificial Sequence
  Synthetic
uaagggcaaguaugccaau

SEQ ID NO: 588 - RNA, 19 nt, Artificial Sequence
  Synthetic
aagggcaaguaugccaaug

SEQ ID NO: 589 - RNA, 19 nt, Artificial Sequence
  Synthetic
agggcaaguaugccaaugc

SEQ ID NO: 590 - RNA, 19 nt, Artificial Sequence
  Synthetic
gggcaaguaugccaaugcc

SEQ ID NO: 591 - RNA, 19 nt, Artificial Sequence
  Synthetic
ggcaaguaugccaaugcca

SEQ ID NO: 592 - RNA, 19 nt, Artificial Sequence
  Synthetic
gcaaguaugccaaugccac

SEQ ID NO: 593 - RNA, 19 nt, Artificial Sequence
  Synthetic
caaguaugccaaugccaca

SEQ ID NO: 594 - RNA, 19 nt, Artificial Sequence
  Synthetic
aaguaugccaaugccacaa

SEQ ID NO: 595 - RNA, 19 nt, Artificial Sequence
  Synthetic
aguaugccaaugccacaag

SEQ ID NO: 596 - RNA, 19 nt, Artificial Sequence
  Synthetic
guaugccaaugccacaagc

SEQ ID NO: 597 - RNA, 19 nt, Artificial Sequence
  Synthetic
uaugccaaugccacaagcc

SEQ ID NO: 598 - RNA, 19 nt, Artificial Sequence
  Synthetic
augccaaugccacaagccg

SEQ ID NO: 599 - RNA, 19 nt, Artificial Sequence
  Synthetic
ugccaaugccacaagccgu

SEQ ID NO: 600 - RNA, 19 nt, Artificial Sequence
  Synthetic
gccaaugccacaagccgug

SEQ ID NO: 601 - RNA, 19 nt, Artificial Sequence
  Synthetic
ccaaugccacaagccgugu

SEQ ID NO: 602 - RNA, 19 nt, Artificial Sequence
  Synthetic
caaugccacaagccguguu

SEQ ID NO: 603 - RNA, 19 nt, Artificial Sequence
  Synthetic
aaugccacaagccguguuu

SEQ ID NO: 604 - RNA, 19 nt, Artificial Sequence
  Synthetic
augccacaagccguguuuu

SEQ ID NO: 605 - RNA, 19 nt, Artificial Sequence
  Synthetic
ugccacaagccguguuuuu

SEQ ID NO: 606 - RNA, 19 nt, Artificial Sequence
  Synthetic
gccacaagccguguuuuug

SEQ ID NO: 607 - RNA, 19 nt, Artificial Sequence
  Synthetic
ccacaagccguguuuuugc

SEQ ID NO: 608 - RNA, 19 nt, Artificial Sequence
  Synthetic
cacaagccguguuuuugca

SEQ ID NO: 609 - RNA, 19 nt, Artificial Sequence
  Synthetic
acaagccguguuuuugcaa

SEQ ID NO: 610 - RNA, 19 nt, Artificial Sequence
  Synthetic
caagccguguuuuugcaag

SEQ ID NO: 611 - RNA, 19 nt, Artificial Sequence
  Synthetic
aagccguguuuuugcaagg

SEQ ID NO: 612 - RNA, 19 nt, Artificial Sequence
  Synthetic
agccguguuuuugcaaggg

SEQ ID NO: 613 - RNA, 19 nt, Artificial Sequence
  Synthetic
gccguguuuuugcaagggc

SEQ ID NO: 614 - RNA, 19 nt, Artificial Sequence
  Synthetic
ccguguuuuugcaagggcu

SEQ ID NO: 615 - RNA, 19 nt, Artificial Sequence
  Synthetic
cguguuuuugcaagggcuc

SEQ ID NO: 616 - RNA, 19 nt, Artificial Sequence
  Synthetic
guguuuuugcaagggcucc

SEQ ID NO: 617 - RNA, 19 nt, Artificial Sequence
  Synthetic
uguuuuugcaagggcucca

SEQ ID NO: 618 - RNA, 19 nt, Artificial Sequence
  Synthetic
guuuuugcaagggcuccag

SEQ ID NO: 619 - RNA, 19 nt, Artificial Sequence
  Synthetic
uuuuugcaagggcuccagu

SEQ ID NO: 620 - RNA, 19 nt, Artificial Sequence
  Synthetic
uuuugcaagggcuccaguu

SEQ ID NO: 621 - RNA, 19 nt, Artificial Sequence
  Synthetic
uuugcaagggcuccaguuu

SEQ ID NO: 622 - RNA, 19 nt, Artificial Sequence
  Synthetic
uugcaagggcuccaguuug

SEQ ID NO: 623 - RNA, 19 nt, Artificial Sequence
  Synthetic
ugcaagggcuccaguuugg

SEQ ID NO: 624 - RNA, 19 nt, Artificial Sequence
  Synthetic
gcaagggcuccaguuuggg

SEQ ID NO: 625 - RNA, 19 nt, Artificial Sequence
  Synthetic
caagggcuccaguuugggc

SEQ ID NO: 626 - RNA, 19 nt, Artificial Sequence
  Synthetic
aagggcuccaguuugggca

SEQ ID NO: 627 - RNA, 19 nt, Artificial Sequence
  Synthetic
agggcuccaguuugggcau

SEQ ID NO: 628 - RNA, 19 nt, Artificial Sequence
  Synthetic
gggcuccaguuugggcauu

SEQ ID NO: 629 - RNA, 19 nt, Artificial Sequence
  Synthetic
ggcuccaguuugggcauuu

SEQ ID NO: 630 - RNA, 19 nt, Artificial Sequence
  Synthetic
gcuccaguuugggcauuuu

SEQ ID NO: 631 - RNA, 19 nt, Artificial Sequence
  Synthetic
cuccaguuugggcauuuug

SEQ ID NO: 632 - RNA, 19 nt, Artificial Sequence
  Synthetic
uccaguuugggcauuuugu

SEQ ID NO: 633 - RNA, 19 nt, Artificial Sequence
  Synthetic
ccaguuugggcauuuuguc

SEQ ID NO: 634 - RNA, 19 nt, Artificial Sequence
  Synthetic
caguuugggcauuuugucc

SEQ ID NO: 635 - RNA, 19 nt, Artificial Sequence
  Synthetic
aguuugggcauuuuguccg

SEQ ID NO: 636 - RNA, 19 nt, Artificial Sequence
  Synthetic
guuugggcauuuuguccgu

SEQ ID NO: 637 - RNA, 19 nt, Artificial Sequence
  Synthetic
uuugggcauuuuguccgug

SEQ ID NO: 638 - RNA, 19 nt, Artificial Sequence
  Synthetic
uugggcauuuuguccgugu

SEQ ID NO: 639 - RNA, 19 nt, Artificial Sequence
  Synthetic
ugggcauuuuguccgugug

SEQ ID NO: 640 - RNA, 19 nt, Artificial Sequence
  Synthetic
gggcauuuuguccgugugc

SEQ ID NO: 641 - RNA, 19 nt, Artificial Sequence
  Synthetic
ggcauuuuguccgugugcg

SEQ ID NO: 642 - RNA, 19 nt, Artificial Sequence
  Synthetic
gcauuuuguccgugugcgc

SEQ ID NO: 643 - RNA, 19 nt, Artificial Sequence
  Synthetic
cauuuuguccgugugcgcg

SEQ ID NO: 644 - RNA, 19 nt, Artificial Sequence
  Synthetic
auuuuguccgugugcgcgu

SEQ ID NO: 645 - RNA, 19 nt, Artificial Sequence
  Synthetic
uuuuguccgugugcgcgua

SEQ ID NO: 646 - RNA, 19 nt, Artificial Sequence
  Synthetic
uuuguccgugugcgcguaa

SEQ ID NO: 647 - RNA, 19 nt, Artificial Sequence
  Synthetic
uuguccgugugcgcguaaa

SEQ ID NO: 648 - RNA, 19 nt, Artificial Sequence
  Synthetic
uguccgugugcgcguaaag

SEQ ID NO: 649 - RNA, 19 nt, Artificial Sequence
  Synthetic
guccgugugcgcguaaagc

SEQ ID NO: 650 - RNA, 19 nt, Artificial Sequence
  Synthetic
uccgugugcgcguaaagcu

SEQ ID NO: 651 - RNA, 19 nt, Artificial Sequence
  Synthetic
ccgugugcgcguaaagcuu

SEQ ID NO: 652 - RNA, 19 nt, Artificial Sequence
  Synthetic
cgugugcgcguaaagcuuc

SEQ ID NO: 653 - RNA, 19 nt, Artificial Sequence
  Synthetic
gugugcgcguaaagcuuca

SEQ ID NO: 654 - RNA, 19 nt, Artificial Sequence
  Synthetic
ugugcgcguaaagcuucac

SEQ ID NO: 655 - RNA, 19 nt, Artificial Sequence
  Synthetic
gugcgcguaaagcuucaca

SEQ ID NO: 656 - RNA, 19 nt, Artificial Sequence
  Synthetic
ugcgcguaaagcuucacac

SEQ ID NO: 657 - RNA, 19 nt, Artificial Sequence
  Synthetic
gcgcguaaagcuucacaca

SEQ ID NO: 658 - RNA, 19 nt, Artificial Sequence
  Synthetic
cgcguaaagcuucacacag

SEQ ID NO: 659 - RNA, 19 nt, Artificial Sequence
  Synthetic
gcguaaagcuucacacaga

SEQ ID NO: 660 - RNA, 19 nt, Artificial Sequence
  Synthetic
cguaaagcuucacacagag

SEQ ID NO: 661 - RNA, 19 nt, Artificial Sequence
  Synthetic
guaaagcuucacacagagg

SEQ ID NO: 662 - RNA, 19 nt, Artificial Sequence
  Synthetic
uaaagcuucacacagaggu

SEQ ID NO: 663 - RNA, 19 nt, Artificial Sequence
  Synthetic
aaagcuucacacagagguu

SEQ ID NO: 664 - RNA, 19 nt, Artificial Sequence
  Synthetic
aagcuucacacagagguuc

SEQ ID NO: 665 - RNA, 19 nt, Artificial Sequence
  Synthetic
agcuucacacagagguucg

SEQ ID NO: 666 - RNA, 19 nt, Artificial Sequence
  Synthetic
gcuucacacagagguucgg

SEQ ID NO: 667 - RNA, 19 nt, Artificial Sequence
  Synthetic
cuucacacagagguucggg

SEQ ID NO: 668 - RNA, 19 nt, Artificial Sequence
  Synthetic
uucacacagagguucgggc

SEQ ID NO: 669 - RNA, 19 nt, Artificial Sequence
  Synthetic
ucacacagagguucgggca

SEQ ID NO: 670 - RNA, 19 nt, Artificial Sequence
  Synthetic
cacacagagguucgggcag

SEQ ID NO: 671 - RNA, 19 nt, Artificial Sequence
  Synthetic
acacagagguucgggcagc

SEQ ID NO: 672 - RNA, 19 nt, Artificial Sequence
  Synthetic
cacagagguucgggcagcg

SEQ ID NO: 673 - RNA, 19 nt, Artificial Sequence
  Synthetic
acagagguucgggcagcgg

SEQ ID NO: 674 - RNA, 19 nt, Artificial Sequence
  Synthetic
cagagguucgggcagcggc

SEQ ID NO: 675 - RNA, 19 nt, Artificial Sequence
  Synthetic
agagguucgggcagcggcu

SEQ ID NO: 676 - RNA, 19 nt, Artificial Sequence
  Synthetic
gagguucgggcagcggcug

SEQ ID NO: 677 - RNA, 19 nt, Artificial Sequence
  Synthetic
agguucgggcagcggcugu

SEQ ID NO: 678 - RNA, 19 nt, Artificial Sequence
  Synthetic
gguucgggcagcggcuguu

SEQ ID NO: 679 - RNA, 19 nt, Artificial Sequence
  Synthetic
guucgggcagcggcuguuu

SEQ ID NO: 680 - RNA, 19 nt, Artificial Sequence
  Synthetic
uucgggcagcggcuguuuc

SEQ ID NO: 681 - RNA, 19 nt, Artificial Sequence
  Synthetic
ucgggcagcggcuguuucu

SEQ ID NO: 682 - RNA, 19 nt, Artificial Sequence
  Synthetic
cgggcagcggcuguuucug

SEQ ID NO: 683 - RNA, 19 nt, Artificial Sequence
  Synthetic
gggcagcggcuguuucugu

SEQ ID NO: 684 - RNA, 19 nt, Artificial Sequence
  Synthetic
ggcagcggcuguuucuguu

SEQ ID NO: 685 - RNA, 19 nt, Artificial Sequence
  Synthetic
gcagcggcuguuucuguug

SEQ ID NO: 686 - RNA, 19 nt, Artificial Sequence
  Synthetic
cagcggcuguuucuguugg

SEQ ID NO: 687 - RNA, 19 nt, Artificial Sequence
  Synthetic
agcggcuguuucuguugga

SEQ ID NO: 688 - RNA, 19 nt, Artificial Sequence
  Synthetic
gcggcuguuucuguuggau

SEQ ID NO: 689 - RNA, 19 nt, Artificial Sequence
  Synthetic
cggcuguuucuguuggaug

SEQ ID NO: 690 - RNA, 19 nt, Artificial Sequence
  Synthetic
ggcuguuucuguuggaugc

SEQ ID NO: 691 - RNA, 19 nt, Artificial Sequence
  Synthetic
gcuguuucuguuggaugca

SEQ ID NO: 692 - RNA, 19 nt, Artificial Sequence
  Synthetic
cuguuucuguuggaugcac

SEQ ID NO: 693 - RNA, 19 nt, Artificial Sequence
  Synthetic
uguuucuguuggaugcacu

SEQ ID NO: 694 - RNA, 19 nt, Artificial Sequence
  Synthetic
guuucuguuggaugcacug

SEQ ID NO: 695 - RNA, 19 nt, Artificial Sequence
  Synthetic
uuucuguuggaugcacugg

SEQ ID NO: 696 - RNA, 19 nt, Artificial Sequence
  Synthetic
uucuguuggaugcacuggg

SEQ ID NO: 697 - RNA, 19 nt, Artificial Sequence
  Synthetic
ucuguuggaugcacugggu

SEQ ID NO: 698 - RNA, 19 nt, Artificial Sequence
  Synthetic
cuguuggaugcacuggguc

SEQ ID NO: 699 - RNA, 19 nt, Artificial Sequence
  Synthetic
uguuggaugcacuggguca

SEQ ID NO: 700 - RNA, 19 nt, Artificial Sequence
  Synthetic
guuggaugcacugggucac

SEQ ID NO: 701 - RNA, 19 nt, Artificial Sequence
  Synthetic
uuggaugcacugggucacc

SEQ ID NO: 702 - RNA, 19 nt, Artificial Sequence
  Synthetic
uggaugcacugggucaccc

SEQ ID NO: 703 - RNA, 19 nt, Artificial Sequence
  Synthetic
ggaugcacugggucaccca

SEQ ID NO: 704 - RNA, 19 nt, Artificial Sequence
  Synthetic
gaugcacugggucacccac

SEQ ID NO: 705 - RNA, 19 nt, Artificial Sequence
  Synthetic
augcacugggucacccacc

SEQ ID NO: 706 - RNA, 19 nt, Artificial Sequence
  Synthetic
ugcacugggucacccacca

SEQ ID NO: 707 - RNA, 19 nt, Artificial Sequence
  Synthetic
gcacugggucacccaccag

SEQ ID NO: 708 - RNA, 19 nt, Artificial Sequence
  Synthetic
cacugggucacccaccaga

SEQ ID NO: 709 - RNA, 19 nt, Artificial Sequence
  Synthetic
acugggucacccaccagaa

SEQ ID NO: 710 - RNA, 19 nt, Artificial Sequence
  Synthetic
cugggucacccaccagaaa

SEQ ID NO: 711 - RNA, 19 nt, Artificial Sequence
  Synthetic
ugggucacccaccagaaaa

SEQ ID NO: 712 - RNA, 19 nt, Artificial Sequence
  Synthetic
gggucacccaccagaaaag

SEQ ID NO: 713 - RNA, 19 nt, Artificial Sequence
  Synthetic
ggucacccaccagaaaagg

SEQ ID NO: 714 - RNA, 19 nt, Artificial Sequence
  Synthetic
gucacccaccagaaaaggg

SEQ ID NO: 715 - RNA, 19 nt, Artificial Sequence
  Synthetic
ucacccaccagaaaagggc

SEQ ID NO: 716 - RNA, 19 nt, Artificial Sequence
  Synthetic
cacccaccagaaaagggcu

SEQ ID NO: 717 - RNA, 19 nt, Artificial Sequence
  Synthetic
acccaccagaaaagggcuu

SEQ ID NO: 718 - RNA, 19 nt, Artificial Sequence
  Synthetic
cccaccagaaaagggcuuu

SEQ ID NO: 719 - RNA, 19 nt, Artificial Sequence
  Synthetic
ccaccagaaaagggcuuuu

SEQ ID NO: 720 - RNA, 19 nt, Artificial Sequence
  Synthetic
caccagaaaagggcuuuug

SEQ ID NO: 721 - RNA, 19 nt, Artificial Sequence
  Synthetic
accagaaaagggcuuuugg

SEQ ID NO: 722 - RNA, 19 nt, Artificial Sequence
  Synthetic
ccagaaaagggcuuuugga

SEQ ID NO: 723 - RNA, 19 nt, Artificial Sequence
  Synthetic
cagaaaagggcuuuuggac

SEQ ID NO: 724 - RNA, 19 nt, Artificial Sequence
  Synthetic
agaaaagggcuuuuggaca

SEQ ID NO: 725 - RNA, 19 nt, Artificial Sequence
  Synthetic
gaaaagggcuuuuggacau

SEQ ID NO: 726 - RNA, 19 nt, Artificial Sequence
  Synthetic
aaaagggcuuuuggacauu

SEQ ID NO: 727 - RNA, 19 nt, Artificial Sequence
  Synthetic
aaagggcuuuuggacauuu

SEQ ID NO: 728 - RNA, 19 nt, Artificial Sequence
  Synthetic
aagggcuuuuggacauuug

SEQ ID NO: 729 - RNA, 19 nt, Artificial Sequence
  Synthetic
agggcuuuuggacauuugg

SEQ ID NO: 730 - RNA, 19 nt, Artificial Sequence
  Synthetic
gggcuuuuggacauuuggg

SEQ ID NO: 731 - RNA, 19 nt, Artificial Sequence
  Synthetic
ggcuuuuggacauuugggg

SEQ ID NO: 732 - RNA, 19 nt, Artificial Sequence
  Synthetic
gcuuuuggacauuuggggu

SEQ ID NO: 733 - RNA, 19 nt, Artificial Sequence
  Synthetic
cuuuuggacauuugggguu

SEQ ID NO: 734 - RNA, 19 nt, Artificial Sequence
  Synthetic
uuuuggacauuugggguuu

SEQ ID NO: 735 - RNA, 19 nt, Artificial Sequence
  Synthetic
uuuggacauuugggguuuc

SEQ ID NO: 736 - RNA, 19 nt, Artificial Sequence
  Synthetic
uuggacauuugggguuucu

SEQ ID NO: 737 - RNA, 19 nt, Artificial Sequence
  Synthetic
uggacauuugggguuucua

SEQ ID NO: 738 - RNA, 19 nt, Artificial Sequence
  Synthetic
ggacauuugggguuucuac

SEQ ID NO: 739 - RNA, 19 nt, Artificial Sequence
  Synthetic
gacauuugggguuucuacc

SEQ ID NO: 740 - RNA, 19 nt, Artificial Sequence
  Synthetic
acauuugggguuucuaccc

SEQ ID NO: 741 - RNA, 19 nt, Artificial Sequence
  Synthetic
cauuugggguuucuaccca

SEQ ID NO: 742 - RNA, 19 nt, Artificial Sequence
  Synthetic
auuugggguuucuacccac

SEQ ID NO: 743 - RNA, 19 nt, Artificial Sequence
  Synthetic
uuugggguuucuacccaca

SEQ ID NO: 744 - RNA, 19 nt, Artificial Sequence
  Synthetic
uugggguuucuacccacac

SEQ ID NO: 745 - RNA, 19 nt, Artificial Sequence
  Synthetic
ugggguuucuacccacacu

SEQ ID NO: 746 - RNA, 19 nt, Artificial Sequence
  Synthetic
gggguuucuacccacacuu

SEQ ID NO: 747 - RNA, 19 nt, Artificial Sequence
  Synthetic
ggguuucuacccacacuuu

SEQ ID NO: 748 - RNA, 19 nt, Artificial Sequence
  Synthetic
gguuucuacccacacuuug

SEQ ID NO: 749 - RNA, 19 nt, Artificial Sequence
  Synthetic
guuucuacccacacuuugg

SEQ ID NO: 750 - RNA, 19 nt, Artificial Sequence
  Synthetic
uuucuacccacacuuuggu

SEQ ID NO: 751 - RNA, 19 nt, Artificial Sequence
  Synthetic
uucuacccacacuuugguu

SEQ ID NO: 752 - RNA, 19 nt, Artificial Sequence
  Synthetic
ucuacccacacuuugguuu

SEQ ID NO: 753 - RNA, 19 nt, Artificial Sequence
  Synthetic
cuacccacacuuugguuuu

SEQ ID NO: 754 - RNA, 19 nt, Artificial Sequence
  Synthetic
uacccacacuuugguuuuc

SEQ ID NO: 755 - RNA, 19 nt, Artificial Sequence
  Synthetic
acccacacuuugguuuucu

SEQ ID NO: 756 - RNA, 19 nt, Artificial Sequence
  Synthetic
cccacacuuugguuuucua

SEQ ID NO: 757 - RNA, 19 nt, Artificial Sequence
  Synthetic
ccacacuuugguuuucuaa

SEQ ID NO: 758 - RNA, 19 nt, Artificial Sequence
  Synthetic
cacacuuugguuuucuaaa

SEQ ID NO: 759 - RNA, 19 nt, Artificial Sequence
  Synthetic
acacuuugguuuucuaaau

SEQ ID NO: 760 - RNA, 19 nt, Artificial Sequence
  Synthetic
cacuuugguuuucuaaaug

SEQ ID NO: 761 - RNA, 19 nt, Artificial Sequence
  Synthetic
acuuugguuuucuaaauga

SEQ ID NO: 762 - RNA, 19 nt, Artificial Sequence
  Synthetic
cuuugguuuucuaaaugag

SEQ ID NO: 763 - RNA, 19 nt, Artificial Sequence
  Synthetic
uuugguuuucuaaaugagg

SEQ ID NO: 764 - RNA, 19 nt, Artificial Sequence
  Synthetic
uugguuuucuaaaugaggu

SEQ ID NO: 765 - RNA, 19 nt, Artificial Sequence
  Synthetic
ugguuuucuaaaugaggug

SEQ ID NO: 766 - RNA, 19 nt, Artificial Sequence
  Synthetic
gguuuucuaaaugaggugg

SEQ ID NO: 767 - RNA, 19 nt, Artificial Sequence
  Synthetic
guuuucuaaaugaggugga

SEQ ID NO: 768 - RNA, 19 nt, Artificial Sequence
  Synthetic
uuuucuaaaugagguggac

SEQ ID NO: 769 - RNA, 19 nt, Artificial Sequence
  Synthetic
uuucuaaaugagguggacu

SEQ ID NO: 770 - RNA, 19 nt, Artificial Sequence
  Synthetic
uucuaaaugagguggacug

SEQ ID NO: 771 - RNA, 19 nt, Artificial Sequence
  Synthetic
ucuaaaugagguggacugg

SEQ ID NO: 772 - RNA, 19 nt, Artificial Sequence
  Synthetic
cuaaaugagguggacuggg

SEQ ID NO: 773 - RNA, 19 nt, Artificial Sequence
  Synthetic
uaaaugagguggacuggga

SEQ ID NO: 774 - RNA, 19 nt, Artificial Sequence
  Synthetic
aaaugagguggacugggag

SEQ ID NO: 775 - RNA, 19 nt, Artificial Sequence
  Synthetic
aaugagguggacugggagg

SEQ ID NO: 776 - RNA, 19 nt, Artificial Sequence
  Synthetic
augagguggacugggaggg

SEQ ID NO: 777 - RNA, 19 nt, Artificial Sequence
  Synthetic
ugagguggacugggaggga

SEQ ID NO: 778 - RNA, 19 nt, Artificial Sequence
  Synthetic
gagguggacugggagggag

SEQ ID NO: 779 - RNA, 19 nt, Artificial Sequence
  Synthetic
agguggacugggagggagg

SEQ ID NO: 780 - RNA, 19 nt, Artificial Sequence
  Synthetic
gguggacugggagggaggu

SEQ ID NO: 781 - RNA, 19 nt, Artificial Sequence
  Synthetic
guggacugggagggaggua

SEQ ID NO: 782 - RNA, 19 nt, Artificial Sequence
  Synthetic
uggacugggagggagguau

SEQ ID NO: 783 - RNA, 19 nt, Artificial Sequence
  Synthetic
ggacugggagggagguauc

SEQ ID NO: 784 - RNA, 19 nt, Artificial Sequence
  Synthetic
gacugggagggagguaucu

SEQ ID NO: 785 - RNA, 19 nt, Artificial Sequence
  Synthetic
acugggagggagguaucuu

SEQ ID NO: 786 - RNA, 19 nt, Artificial Sequence
  Synthetic
cugggagggagguaucuuc

SEQ ID NO: 787 - RNA, 19 nt, Artificial Sequence
  Synthetic
ugggagggagguaucuucu

SEQ ID NO: 788 - RNA, 19 nt, Artificial Sequence
  Synthetic
gggagggagguaucuucuu

SEQ ID NO: 789 - RNA, 19 nt, Artificial Sequence
  Synthetic
ggagggagguaucuucuuu

SEQ ID NO: 790 - RNA, 19 nt, Artificial Sequence
  Synthetic
gagggagguaucuucuuuc

SEQ ID NO: 791 - RNA, 19 nt, Artificial Sequence
  Synthetic
agggagguaucuucuuuca

SEQ ID NO: 792 - RNA, 19 nt, Artificial Sequence
  Synthetic
gggagguaucuucuuucag

SEQ ID NO: 793 - RNA, 19 nt, Artificial Sequence
  Synthetic
ggagguaucuucuuucaga

SEQ ID NO: 794 - RNA, 19 nt, Artificial Sequence
  Synthetic
gagguaucuucuuucagau

SEQ ID NO: 795 - RNA, 19 nt, Artificial Sequence
  Synthetic
agguaucuucuuucagaug

SEQ ID NO: 796 - RNA, 19 nt, Artificial Sequence
  Synthetic
gguaucuucuuucagauga

SEQ ID NO: 797 - RNA, 19 nt, Artificial Sequence
  Synthetic
guaucuucuuucagaugaa

SEQ ID NO: 798 - RNA, 19 nt, Artificial Sequence
  Synthetic
uaucuucuuucagaugaaa

SEQ ID NO: 799 - RNA, 19 nt, Artificial Sequence
  Synthetic
aucuucuuucagaugaaag

SEQ ID NO: 800 - RNA, 19 nt, Artificial Sequence
  Synthetic
ucuucuuucagaugaaagg

SEQ ID NO: 801 - RNA, 19 nt, Artificial Sequence
  Synthetic
cuucuuucagaugaaaggg

SEQ ID NO: 802 - RNA, 19 nt, Artificial Sequence
  Synthetic
uucuuucagaugaaaggga

SEQ ID NO: 803 - RNA, 19 nt, Artificial Sequence
  Synthetic
ucuuucagaugaaagggaa

SEQ ID NO: 804 - RNA, 19 nt, Artificial Sequence
  Synthetic
cuuucagaugaaagggaag

SEQ ID NO: 805 - RNA, 19 nt, Artificial Sequence
  Synthetic
uuucagaugaaagggaagg

SEQ ID NO: 806 - RNA, 19 nt, Artificial Sequence
  Synthetic
uucagaugaaagggaaggg

SEQ ID NO: 807 - RNA, 19 nt, Artificial Sequence
  Synthetic
ucagaugaaagggaagggg

SEQ ID NO: 808 - RNA, 19 nt, Artificial Sequence
  Synthetic
cagaugaaagggaaggggc

SEQ ID NO: 809 - RNA, 19 nt, Artificial Sequence
  Synthetic
agaugaaagggaaggggcg

SEQ ID NO: 810 - RNA, 19 nt, Artificial Sequence
  Synthetic
gaugaaagggaaggggcga

SEQ ID NO: 811 - RNA, 19 nt, Artificial Sequence
  Synthetic
augaaagggaaggggcgag

SEQ ID NO: 812 - RNA, 19 nt, Artificial Sequence
  Synthetic
ugaaagggaaggggcgaga

SEQ ID NO: 813 - RNA, 19 nt, Artificial Sequence
  Synthetic
gaaagggaaggggcgagau

SEQ ID NO: 814 - RNA, 19 nt, Artificial Sequence
  Synthetic
aaagggaaggggcgagaug

SEQ ID NO: 815 - RNA, 19 nt, Artificial Sequence
  Synthetic
aagggaaggggcgagaugg

SEQ ID NO: 816 - RNA, 19 nt, Artificial Sequence
  Synthetic
agggaaggggcgagaugga

SEQ ID NO: 817 - RNA, 19 nt, Artificial Sequence
  Synthetic
gggaaggggcgagauggag

SEQ ID NO: 818 - RNA, 19 nt, Artificial Sequence
  Synthetic
ggaaggggcgagauggagu

SEQ ID NO: 819 - RNA, 19 nt, Artificial Sequence
  Synthetic
gaaggggcgagauggaguu

SEQ ID NO: 820 - RNA, 19 nt, Artificial Sequence
  Synthetic
aaggggcgagauggaguua

SEQ ID NO: 821 - RNA, 19 nt, Artificial Sequence
  Synthetic
aggggcgagauggaguuau

SEQ ID NO: 822 - RNA, 19 nt, Artificial Sequence
  Synthetic
ggggcgagauggaguuauc

SEQ ID NO: 823 - RNA, 19 nt, Artificial Sequence
  Synthetic
gggcgagauggaguuaucu

SEQ ID NO: 824 - RNA, 19 nt, Artificial Sequence
  Synthetic
ggcgagauggaguuaucuu

SEQ ID NO: 825 - RNA, 19 nt, Artificial Sequence
  Synthetic
gcgagauggaguuaucuua

SEQ ID NO: 826 - RNA, 19 nt, Artificial Sequence
  Synthetic
cgagauggaguuaucuuau

SEQ ID NO: 827 - RNA, 19 nt, Artificial Sequence
  Synthetic
gagauggaguuaucuuauu

SEQ ID NO: 828 - RNA, 19 nt, Artificial Sequence
  Synthetic
agauggaguuaucuuauuu

SEQ ID NO: 829 - RNA, 19 nt, Artificial Sequence
  Synthetic
gauggaguuaucuuauuuc

SEQ ID NO: 830 - RNA, 19 nt, Artificial Sequence
  Synthetic
auggaguuaucuuauuucu

SEQ ID NO: 831 - RNA, 19 nt, Artificial Sequence
  Synthetic
uggaguuaucuuauuucug

SEQ ID NO: 832 - RNA, 19 nt, Artificial Sequence
  Synthetic
ggaguuaucuuauuucugg

SEQ ID NO: 833 - RNA, 19 nt, Artificial Sequence
  Synthetic
gaguuaucuuauuucuggg

SEQ ID NO: 834 - RNA, 19 nt, Artificial Sequence
  Synthetic
aguuaucuuauuucugggu

SEQ ID NO: 835 - RNA, 19 nt, Artificial Sequence
  Synthetic
guuaucuuauuucugggua

SEQ ID NO: 836 - RNA, 19 nt, Artificial Sequence
  Synthetic
uuaucuuauuucuggguaa

SEQ ID NO: 837 - RNA, 19 nt, Artificial Sequence
  Synthetic
uaucuuauuucuggguaaa

SEQ ID NO: 838 - RNA, 19 nt, Artificial Sequence
  Synthetic
aucuuauuucuggguaaaa

SEQ ID NO: 839 - RNA, 19 nt, Artificial Sequence
  Synthetic
ucuuauuucuggguaaaac

SEQ ID NO: 840 - RNA, 19 nt, Artificial Sequence
  Synthetic
cuuauuucuggguaaaaca

SEQ ID NO: 841 - RNA, 19 nt, Artificial Sequence
  Synthetic
uuauuucuggguaaaacaa

SEQ ID NO: 842 - RNA, 19 nt, Artificial Sequence
  Synthetic
uauuucuggguaaaacaaa

SEQ ID NO: 843 - RNA, 19 nt, Artificial Sequence
  Synthetic
auuucuggguaaaacaaaa

SEQ ID NO: 844 - RNA, 19 nt, Artificial Sequence
  Synthetic
uuucuggguaaaacaaaac

SEQ ID NO: 845 - RNA, 19 nt, Artificial Sequence
  Synthetic
uucuggguaaaacaaaaca

SEQ ID NO: 846 - RNA, 19 nt, Artificial Sequence
  Synthetic
ucuggguaaaacaaaacaa

SEQ ID NO: 847 - RNA, 19 nt, Artificial Sequence
  Synthetic
cuggguaaaacaaaacaaa

SEQ ID NO: 848 - RNA, 19 nt, Artificial Sequence
  Synthetic
uggguaaaacaaaacaaac

SEQ ID NO: 849 - RNA, 19 nt, Artificial Sequence
  Synthetic
ggguaaaacaaaacaaaca

SEQ ID NO: 850 - RNA, 19 nt, Artificial Sequence
  Synthetic
gguaaaacaaaacaaacaa

SEQ ID NO: 851 - RNA, 19 nt, Artificial Sequence
  Synthetic
guaaaacaaaacaaacaaa

SEQ ID NO: 852 - RNA, 19 nt, Artificial Sequence
  Synthetic
uaaaacaaaacaaacaaac

SEQ ID NO: 853 - RNA, 19 nt, Artificial Sequence
  Synthetic
aaaacaaaacaaacaaaca

SEQ ID NO: 854 - RNA, 19 nt, Artificial Sequence
  Synthetic
aaacaaaacaaacaaacaa

SEQ ID NO: 855 - RNA, 19 nt, Artificial Sequence
  Synthetic
aacaaaacaaacaaacaaa

SEQ ID NO: 856 - RNA, 19 nt, Artificial Sequence
  Synthetic
acaaaacaaacaaacaaaa

SEQ ID NO: 857 - RNA, 19 nt, Artificial Sequence
  Synthetic
caaaacaaacaaacaaaaa

SEQ ID NO: 858 - RNA, 19 nt, Artificial Sequence
  Synthetic
aaaacaaacaaacaaaaaa

SEQ ID NO: 859 - RNA, 19 nt, Artificial Sequence
  Synthetic
aaacaaacaaacaaaaaac

SEQ ID NO: 860 - RNA, 19 nt, Artificial Sequence
  Synthetic
aacaaacaaacaaaaaaca

SEQ ID NO: 861 - RNA, 19 nt, Artificial Sequence
  Synthetic
acaaacaaacaaaaaacaa

SEQ ID NO: 862 - RNA, 19 nt, Artificial Sequence
  Synthetic
caaacaaacaaaaaacaaa

SEQ ID NO: 863 - RNA, 19 nt, Artificial Sequence
  Synthetic
aaacaaacaaaaaacaaaa

SEQ ID NO: 864 - RNA, 19 nt, Artificial Sequence
  Synthetic
aacaaacaaaaaacaaaac

SEQ ID NO: 865 - RNA, 19 nt, Artificial Sequence
  Synthetic
acaaacaaaaaacaaaaca

SEQ ID NO: 866 - RNA, 19 nt, Artificial Sequence
  Synthetic
caaacaaaaaacaaaacaa

SEQ ID NO: 867 - RNA, 19 nt, Artificial Sequence
  Synthetic
aaacaaaaaacaaaacaaa

SEQ ID NO: 868 - RNA, 19 nt, Artificial Sequence
  Synthetic
aacaaaaaacaaaacaaaa

SEQ ID NO: 869 - RNA, 19 nt, Artificial Sequence
  Synthetic
acaaaaaacaaaacaaaaa

SEQ ID NO: 870 - RNA, 19 nt, Artificial Sequence
  Synthetic
caaaaaacaaaacaaaaau

SEQ ID NO: 871 - RNA, 19 nt, Artificial Sequence
  Synthetic
aaaaaacaaaacaaaaaua

SEQ ID NO: 872 - RNA, 19 nt, Artificial Sequence
  Synthetic
aaaaacaaaacaaaaauac

SEQ ID NO: 873 - RNA, 19 nt, Artificial Sequence
  Synthetic
aaaacaaaacaaaaauacu

SEQ ID NO: 874 - RNA, 19 nt, Artificial Sequence
  Synthetic
aaacaaaacaaaaauacug

SEQ ID NO: 875 - RNA, 19 nt, Artificial Sequence
  Synthetic
aacaaaacaaaaauacuga

SEQ ID NO: 876 - RNA, 19 nt, Artificial Sequence
  Synthetic
acaaaacaaaaauacugag

SEQ ID NO: 877 - RNA, 19 nt, Artificial Sequence
  Synthetic
caaaacaaaaauacugagc

SEQ ID NO: 878 - RNA, 19 nt, Artificial Sequence
  Synthetic
aaaacaaaaauacugagcu

SEQ ID NO: 879 - RNA, 19 nt, Artificial Sequence
  Synthetic
aaacaaaaauacugagcug

SEQ ID NO: 880 - RNA, 19 nt, Artificial Sequence
  Synthetic
aacaaaaauacugagcugg

SEQ ID NO: 881 - RNA, 19 nt, Artificial Sequence
  Synthetic
acaaaaauacugagcugga

SEQ ID NO: 882 - RNA, 19 nt, Artificial Sequence
  Synthetic
caaaaauacugagcuggau

SEQ ID NO: 883 - RNA, 19 nt, Artificial Sequence
  Synthetic
aaaaauacugagcuggauu

SEQ ID NO: 884 - RNA, 19 nt, Artificial Sequence
  Synthetic
aaaauacugagcuggauua

SEQ ID NO: 885 - RNA, 19 nt, Artificial Sequence
  Synthetic
aaauacugagcuggauuau

SEQ ID NO: 886 - RNA, 19 nt, Artificial Sequence
  Synthetic
aauacugagcuggauuaua

SEQ ID NO: 887 - RNA, 19 nt, Artificial Sequence
  Synthetic
auacugagcuggauuauac

SEQ ID NO: 888 - RNA, 19 nt, Artificial Sequence
  Synthetic
uacugagcuggauuauacu

SEQ ID NO: 889 - RNA, 19 nt, Artificial Sequence
  Synthetic
acugagcuggauuauacug

SEQ ID NO: 890 - RNA, 19 nt, Artificial Sequence
  Synthetic
cugagcuggauuauacugu

SEQ ID NO: 891 - RNA, 19 nt, Artificial Sequence
  Synthetic
ugagcuggauuauacuguu

SEQ ID NO: 892 - RNA, 19 nt, Artificial Sequence
  Synthetic
gagcuggauuauacuguua

SEQ ID NO: 893 - RNA, 19 nt, Artificial Sequence
  Synthetic
agcuggauuauacuguuag

SEQ ID NO: 894 - RNA, 19 nt, Artificial Sequence
  Synthetic
gcuggauuauacuguuagg

SEQ ID NO: 895 - RNA, 19 nt, Artificial Sequence
  Synthetic
cuggauuauacuguuagga

SEQ ID NO: 896 - RNA, 19 nt, Artificial Sequence
  Synthetic
uggauuauacuguuaggau

SEQ ID NO: 897 - RNA, 19 nt, Artificial Sequence
  Synthetic
ggauuauacuguuaggaug

SEQ ID NO: 898 - RNA, 19 nt, Artificial Sequence
  Synthetic
gauuauacuguuaggaugu

SEQ ID NO: 899 - RNA, 19 nt, Artificial Sequence
  Synthetic
auuauacuguuaggaugua

SEQ ID NO: 900 - RNA, 19 nt, Artificial Sequence
  Synthetic
uuauacuguuaggauguaa

SEQ ID NO: 901 - RNA, 19 nt, Artificial Sequence
  Synthetic
uauacuguuaggauguaaa

SEQ ID NO: 902 - RNA, 19 nt, Artificial Sequence
  Synthetic
auacuguuaggauguaaag

SEQ ID NO: 903 - RNA, 19 nt, Artificial Sequence
  Synthetic
uacuguuaggauguaaagu

SEQ ID NO: 904 - RNA, 19 nt, Artificial Sequence
  Synthetic
acuguuaggauguaaaguu

SEQ ID NO: 905 - RNA, 19 nt, Artificial Sequence
  Synthetic
cuguuaggauguaaaguuc

SEQ ID NO: 906 - RNA, 19 nt, Artificial Sequence
  Synthetic
uguuaggauguaaaguucc

SEQ ID NO: 907 - RNA, 19 nt, Artificial Sequence
  Synthetic
guuaggauguaaaguuccu

SEQ ID NO: 908 - RNA, 19 nt, Artificial Sequence
  Synthetic
uuaggauguaaaguuccuu

SEQ ID NO: 909 - RNA, 19 nt, Artificial Sequence
  Synthetic
uaggauguaaaguuccuua

SEQ ID NO: 910 - RNA, 19 nt, Artificial Sequence
  Synthetic
aggauguaaaguuccuuag

SEQ ID NO: 911 - RNA, 19 nt, Artificial Sequence
  Synthetic
ggauguaaaguuccuuagc

SEQ ID NO: 912 - RNA, 19 nt, Artificial Sequence
  Synthetic
gauguaaaguuccuuagcu

SEQ ID NO: 913 - RNA, 19 nt, Artificial Sequence
  Synthetic
auguaaaguuccuuagcua

SEQ ID NO: 914 - RNA, 19 nt, Artificial Sequence
  Synthetic
uguaaaguuccuuagcuac

SEQ ID NO: 915 - RNA, 19 nt, Artificial Sequence
  Synthetic
guaaaguuccuuagcuacu

SEQ ID NO: 916 - RNA, 19 nt, Artificial Sequence
  Synthetic
uaaaguuccuuagcuacuu

SEQ ID NO: 917 - RNA, 19 nt, Artificial Sequence
  Synthetic
aaaguuccuuagcuacuuc

SEQ ID NO: 918 - RNA, 19 nt, Artificial Sequence
  Synthetic
aaguuccuuagcuacuucu

SEQ ID NO: 919 - RNA, 19 nt, Artificial Sequence
  Synthetic
aguuccuuagcuacuucuu

SEQ ID NO: 920 - RNA, 19 nt, Artificial Sequence
  Synthetic
guuccuuagcuacuucuuu

SEQ ID NO: 921 - RNA, 19 nt, Artificial Sequence
  Synthetic
uuccuuagcuacuucuuua

SEQ ID NO: 922 - RNA, 19 nt, Artificial Sequence
  Synthetic
uccuuagcuacuucuuuaa

SEQ ID NO: 923 - RNA, 19 nt, Artificial Sequence
  Synthetic
ccuuagcuacuucuuuaag

SEQ ID NO: 924 - RNA, 19 nt, Artificial Sequence
  Synthetic
cuuagcuacuucuuuaagg

SEQ ID NO: 925 - RNA, 19 nt, Artificial Sequence
  Synthetic
uuagcuacuucuuuaaggc

SEQ ID NO: 926 - RNA, 19 nt, Artificial Sequence
  Synthetic
uagcuacuucuuuaaggcu

SEQ ID NO: 927 - RNA, 19 nt, Artificial Sequence
  Synthetic
agcuacuucuuuaaggcuc

SEQ ID NO: 928 - RNA, 19 nt, Artificial Sequence
  Synthetic
gcuacuucuuuaaggcuca

SEQ ID NO: 929 - RNA, 19 nt, Artificial Sequence
  Synthetic
cuacuucuuuaaggcucaa

SEQ ID NO: 930 - RNA, 19 nt, Artificial Sequence
  Synthetic
uacuucuuuaaggcucaac

SEQ ID NO: 931 - RNA, 19 nt, Artificial Sequence
  Synthetic
acuucuuuaaggcucaaca

SEQ ID NO: 932 - RNA, 19 nt, Artificial Sequence
  Synthetic
cuucuuuaaggcucaacac

SEQ ID NO: 933 - RNA, 19 nt, Artificial Sequence
  Synthetic
uucuuuaaggcucaacacg

SEQ ID NO: 934 - RNA, 19 nt, Artificial Sequence
  Synthetic
ucuuuaaggcucaacacga

SEQ ID NO: 935 - RNA, 19 nt, Artificial Sequence
  Synthetic
cuuuaaggcucaacacgag

SEQ ID NO: 936 - RNA, 19 nt, Artificial Sequence
  Synthetic
uuuaaggcucaacacgagg

SEQ ID NO: 937 - RNA, 19 nt, Artificial Sequence
  Synthetic
uuaaggcucaacacgaggc

SEQ ID NO: 938 - RNA, 19 nt, Artificial Sequence
  Synthetic
uaaggcucaacacgaggcu

SEQ ID NO: 939 - RNA, 19 nt, Artificial Sequence
  Synthetic
aaggcucaacacgaggcug

SEQ ID NO: 940 - RNA, 19 nt, Artificial Sequence
  Synthetic
aggcucaacacgaggcuga

SEQ ID NO: 941 - RNA, 19 nt, Artificial Sequence
  Synthetic
ggcucaacacgaggcugau

SEQ ID NO: 942 - RNA, 19 nt, Artificial Sequence
  Synthetic
gcucaacacgaggcugaug

SEQ ID NO: 943 - RNA, 19 nt, Artificial Sequence
  Synthetic
cucaacacgaggcugaugg

SEQ ID NO: 944 - RNA, 19 nt, Artificial Sequence
  Synthetic
ucaacacgaggcugauggu

SEQ ID NO: 945 - RNA, 19 nt, Artificial Sequence
  Synthetic
caacacgaggcugaugguc

SEQ ID NO: 946 - RNA, 19 nt, Artificial Sequence
  Synthetic
aacacgaggcugaugguca

SEQ ID NO: 947 - RNA, 19 nt, Artificial Sequence
  Synthetic
acacgaggcugauggucaa

SEQ ID NO: 948 - RNA, 19 nt, Artificial Sequence
  Synthetic
cacgaggcugauggucaac

SEQ ID NO: 949 - RNA, 19 nt, Artificial Sequence
  Synthetic
acgaggcugauggucaaca

SEQ ID NO: 950 - RNA, 19 nt, Artificial Sequence
  Synthetic
cgaggcugauggucaacau

SEQ ID NO: 951 - RNA, 19 nt, Artificial Sequence
  Synthetic
gaggcugauggucaacaua

SEQ ID NO: 952 - RNA, 19 nt, Artificial Sequence
  Synthetic
aggcugauggucaacauaa

SEQ ID NO: 953 - RNA, 19 nt, Artificial Sequence
  Synthetic
ggcugauggucaacauaaa

SEQ ID NO: 954 - RNA, 19 nt, Artificial Sequence
  Synthetic
gcugauggucaacauaaaa

SEQ ID NO: 955 - RNA, 19 nt, Artificial Sequence
  Synthetic
cugauggucaacauaaaaa

SEQ ID NO: 956 - RNA, 19 nt, Artificial Sequence
  Synthetic
ugauggucaacauaaaaag

SEQ ID NO: 957 - RNA, 19 nt, Artificial Sequence
  Synthetic
gauggucaacauaaaaagc

SEQ ID NO: 958 - RNA, 19 nt, Artificial Sequence
  Synthetic
auggucaacauaaaaagca

SEQ ID NO: 959 - RNA, 19 nt, Artificial Sequence
  Synthetic
uggucaacauaaaaagcaa

SEQ ID NO: 960 - RNA, 19 nt, Artificial Sequence
  Synthetic
ggucaacauaaaaagcaaa

SEQ ID NO: 961 - RNA, 19 nt, Artificial Sequence
  Synthetic
gucaacauaaaaagcaaac

SEQ ID NO: 962 - RNA, 19 nt, Artificial Sequence
  Synthetic
ucaacauaaaaagcaaaca

SEQ ID NO: 963 - RNA, 19 nt, Artificial Sequence
  Synthetic
caacauaaaaagcaaacaa

SEQ ID NO: 964 - RNA, 19 nt, Artificial Sequence
  Synthetic
aacauaaaaagcaaacaau

SEQ ID NO: 965 - RNA, 19 nt, Artificial Sequence
  Synthetic
acauaaaaagcaaacaaua

SEQ ID NO: 966 - RNA, 19 nt, Artificial Sequence
  Synthetic
cauaaaaagcaaacaauac

SEQ ID NO: 967 - RNA, 19 nt, Artificial Sequence
  Synthetic
auaaaaagcaaacaauacu

SEQ ID NO: 968 - RNA, 19 nt, Artificial Sequence
  Synthetic
uaaaaagcaaacaauacua

SEQ ID NO: 969 - RNA, 19 nt, Artificial Sequence
  Synthetic
aaaaagcaaacaauacuau

SEQ ID NO: 970 - RNA, 19 nt, Artificial Sequence
  Synthetic
aaaagcaaacaauacuaug

SEQ ID NO: 971 - RNA, 19 nt, Artificial Sequence
  Synthetic
aaagcaaacaauacuaugu

SEQ ID NO: 972 - RNA, 19 nt, Artificial Sequence
  Synthetic
aagcaaacaauacuaugua

SEQ ID NO: 973 - RNA, 19 nt, Artificial Sequence
  Synthetic
agcaaacaauacuauguac

SEQ ID NO: 974 - RNA, 19 nt, Artificial Sequence
  Synthetic
gcaaacaauacuauguaca

SEQ ID NO: 975 - RNA, 19 nt, Artificial Sequence
  Synthetic
caaacaauacuauguacau

SEQ ID NO: 976 - RNA, 19 nt, Artificial Sequence
  Synthetic
aaacaauacuauguacaua

SEQ ID NO: 977 - RNA, 19 nt, Artificial Sequence
  Synthetic
aacaauacuauguacauau

SEQ ID NO: 978 - RNA, 19 nt, Artificial Sequence
  Synthetic
acaauacuauguacauaua

SEQ ID NO: 979 - RNA, 19 nt, Artificial Sequence
  Synthetic
caauacuauguacauauau

SEQ ID NO: 980 - RNA, 19 nt, Artificial Sequence
  Synthetic
aauacuauguacauauaug

SEQ ID NO: 981 - RNA, 19 nt, Artificial Sequence
  Synthetic
auacuauguacauauaugu

SEQ ID NO: 982 - RNA, 19 nt, Artificial Sequence
  Synthetic
uacuauguacauauaugua

SEQ ID NO: 983 - RNA, 19 nt, Artificial Sequence
  Synthetic
acuauguacauauauguaa

SEQ ID NO: 984 - RNA, 19 nt, Artificial Sequence
  Synthetic
cuauguacauauauguaaa

SEQ ID NO: 985 - RNA, 19 nt, Artificial Sequence
  Synthetic
uauguacauauauguaaaa

SEQ ID NO: 986 - RNA, 19 nt, Artificial Sequence
  Synthetic
auguacauauauguaaaaa

SEQ ID NO: 987 - RNA, 19 nt, Artificial Sequence
  Synthetic
uguacauauauguaaaaag

SEQ ID NO: 988 - RNA, 19 nt, Artificial Sequence
  Synthetic
guacauauauguaaaaagu

SEQ ID NO: 989 - RNA, 19 nt, Artificial Sequence
  Synthetic
uacauauauguaaaaagug

SEQ ID NO: 990 - RNA, 19 nt, Artificial Sequence
  Synthetic
acauauauguaaaaagugu

SEQ ID NO: 991 - RNA, 19 nt, Artificial Sequence
  Synthetic
cauauauguaaaaaguguu

SEQ ID NO: 992 - RNA, 19 nt, Artificial Sequence
  Synthetic
auauauguaaaaaguguua

SEQ ID NO: 993 - RNA, 19 nt, Artificial Sequence
  Synthetic
uauauguaaaaaguguuau

SEQ ID NO: 994 - RNA, 19 nt, Artificial Sequence
  Synthetic
auauguaaaaaguguuaua

SEQ ID NO: 995 - RNA, 19 nt, Artificial Sequence
  Synthetic
uauguaaaaaguguuauaa

SEQ ID NO: 996 - RNA, 19 nt, Artificial Sequence
  Synthetic
auguaaaaaguguuauaaa

SEQ ID NO: 997 - RNA, 19 nt, Artificial Sequence
  Synthetic
uguaaaaaguguuauaaau

SEQ ID NO: 998 - RNA, 19 nt, Artificial Sequence
  Synthetic
guaaaaaguguuauaaaua

SEQ ID NO: 999 - RNA, 19 nt, Artificial Sequence
  Synthetic
uaaaaaguguuauaaauag

SEQ ID NO: 1000 - RNA, 19 nt, Artificial Sequence
  Synthetic
aaaaaguguuauaaauagg

SEQ ID NO: 1001 - RNA, 19 nt, Artificial Sequence
  Synthetic
aaaaguguuauaaauaggu

SEQ ID NO: 1002 - RNA, 19 nt, Artificial Sequence
  Synthetic
aaaguguuauaaauagguu

SEQ ID NO: 1003 - RNA, 19 nt, Artificial Sequence
  Synthetic
aaguguuauaaauagguuu

SEQ ID NO: 1004 - RNA, 19 nt, Artificial Sequence
  Synthetic
aguguuauaaauagguuuu

SEQ ID NO: 1005 - RNA, 19 nt, Artificial Sequence
  Synthetic
guguuauaaauagguuuua

SEQ ID NO: 1006 - RNA, 19 nt, Artificial Sequence
  Synthetic
uguuauaaauagguuuuau

SEQ ID NO: 1007 - RNA, 19 nt, Artificial Sequence
  Synthetic
guuauaaauagguuuuaua

SEQ ID NO: 1008 - RNA, 19 nt, Artificial Sequence
  Synthetic
uuauaaauagguuuuauaa

SEQ ID NO: 1009 - RNA, 19 nt, Artificial Sequence
  Synthetic
uauaaauagguuuuauaaa

SEQ ID NO: 1010 - RNA, 19 nt, Artificial Sequence
  Synthetic
auaaauagguuuuauaaac

SEQ ID NO: 1011 - RNA, 19 nt, Artificial Sequence
  Synthetic
uaaauagguuuuauaaacc

SEQ ID NO: 1012 - RNA, 19 nt, Artificial Sequence
  Synthetic
aaauagguuuuauaaaccg

SEQ ID NO: 1013 - RNA, 19 nt, Artificial Sequence
  Synthetic
aauagguuuuauaaaccgg

SEQ ID NO: 1014 - RNA, 19 nt, Artificial Sequence
  Synthetic
auagguuuuauaaaccgga

SEQ ID NO: 1015 - RNA, 19 nt, Artificial Sequence
  Synthetic
uagguuuuauaaaccggag

SEQ ID NO: 1016 - RNA, 19 nt, Artificial Sequence
  Synthetic
agguuuuauaaaccggaga

SEQ ID NO: 1017 - RNA, 19 nt, Artificial Sequence
  Synthetic
gguuuuauaaaccggagau

SEQ ID NO: 1018 - RNA, 19 nt, Artificial Sequence
  Synthetic
guuuuauaaaccggagaua

SEQ ID NO: 1019 - RNA, 19 nt, Artificial Sequence
  Synthetic
uuuuauaaaccggagauau

SEQ ID NO: 1020 - RNA, 19 nt, Artificial Sequence
  Synthetic
uuuauaaaccggagauauu

SEQ ID NO: 1021 - RNA, 19 nt, Artificial Sequence
  Synthetic
uuauaaaccggagauauua

SEQ ID NO: 1022 - RNA, 19 nt, Artificial Sequence
  Synthetic
uauaaaccggagauauuau

SEQ ID NO: 1023 - RNA, 19 nt, Artificial Sequence
  Synthetic
auaaaccggagauauuaua

SEQ ID NO: 1024 - RNA, 19 nt, Artificial Sequence
  Synthetic
uaaaccggagauauuauau

SEQ ID NO: 1025 - RNA, 19 nt, Artificial Sequence
  Synthetic
aaaccggagauauuauaua

SEQ ID NO: 1026 - RNA, 19 nt, Artificial Sequence
  Synthetic
aaccggagauauuauauac

SEQ ID NO: 1027 - RNA, 19 nt, Artificial Sequence
  Synthetic
accggagauauuauauaca

SEQ ID NO: 1028 - RNA, 19 nt, Artificial Sequence
  Synthetic
ccggagauauuauauacau

SEQ ID NO: 1029 - RNA, 19 nt, Artificial Sequence
  Synthetic
cggagauauuauauacauc

SEQ ID NO: 1030 - RNA, 19 nt, Artificial Sequence
  Synthetic
ggagauauuauauacaucu

SEQ ID NO: 1031 - RNA, 19 nt, Artificial Sequence
  Synthetic
gagauauuauauacaucuu

SEQ ID NO: 1032 - RNA, 19 nt, Artificial Sequence
  Synthetic
agauauuauauacaucuuc

SEQ ID NO: 1033 - RNA, 19 nt, Artificial Sequence
  Synthetic
gauauuauauacaucuuca

SEQ ID NO: 1034 - RNA, 19 nt, Artificial Sequence
  Synthetic
auauuauauacaucuucaa

SEQ ID NO: 1035 - RNA, 19 nt, Artificial Sequence
  Synthetic
uauuauauacaucuucaau

SEQ ID NO: 1036 - RNA, 19 nt, Artificial Sequence
  Synthetic
auuauauacaucuucaauc

SEQ ID NO: 1037 - RNA, 19 nt, Artificial Sequence
  Synthetic
uuauauacaucuucaauca

SEQ ID NO: 1038 - RNA, 19 nt, Artificial Sequence
  Synthetic
uauauacaucuucaaucaa

SEQ ID NO: 1039 - RNA, 19 nt, Artificial Sequence
  Synthetic
auauacaucuucaaucaac

SEQ ID NO: 1040 - RNA, 19 nt, Artificial Sequence
  Synthetic
uauacaucuucaaucaaca

SEQ ID NO: 1041 - RNA, 19 nt, Artificial Sequence
  Synthetic
auacaucuucaaucaacag

SEQ ID NO: 1042 - RNA, 19 nt, Artificial Sequence
  Synthetic
uacaucuucaaucaacagc

SEQ ID NO: 1043 - RNA, 19 nt, Artificial Sequence
  Synthetic
acaucuucaaucaacagca

SEQ ID NO: 1044 - RNA, 19 nt, Artificial Sequence
  Synthetic
caucuucaaucaacagcaa

SEQ ID NO: 1045 - RNA, 19 nt, Artificial Sequence
  Synthetic
aucuucaaucaacagcaac

SEQ ID NO: 1046 - RNA, 19 nt, Artificial Sequence
  Synthetic
ucuucaaucaacagcaacc

SEQ ID NO: 1047 - RNA, 19 nt, Artificial Sequence
  Synthetic
cuucaaucaacagcaaccc

SEQ ID NO: 1048 - RNA, 19 nt, Artificial Sequence
  Synthetic
uucaaucaacagcaacccc

SEQ ID NO: 1049 - RNA, 19 nt, Artificial Sequence
  Synthetic
ucaaucaacagcaaccccc

SEQ ID NO: 1050 - RNA, 19 nt, Artificial Sequence
  Synthetic
caaucaacagcaaccccca

SEQ ID NO: 1051 - RNA, 19 nt, Artificial Sequence
  Synthetic
aaucaacagcaacccccac

SEQ ID NO: 1052 - RNA, 19 nt, Artificial Sequence
  Synthetic
aucaacagcaacccccacc

SEQ ID NO: 1053 - RNA, 19 nt, Artificial Sequence
  Synthetic
ucaacagcaacccccaccu

SEQ ID NO: 1054 - RNA, 19 nt, Artificial Sequence
  Synthetic
caacagcaacccccaccuc

SEQ ID NO: 1055 - RNA, 19 nt, Artificial Sequence
  Synthetic
aacagcaacccccaccucc

SEQ ID NO: 1056 - RNA, 19 nt, Artificial Sequence
  Synthetic
acagcaacccccaccucca

SEQ ID NO: 1057 - RNA, 19 nt, Artificial Sequence
  Synthetic
cagcaacccccaccuccac

SEQ ID NO: 1058 - RNA, 19 nt, Artificial Sequence
  Synthetic
agcaacccccaccuccacu

SEQ ID NO: 1059 - RNA, 19 nt, Artificial Sequence
  Synthetic
gcaacccccaccuccacug

SEQ ID NO: 1060 - RNA, 19 nt, Artificial Sequence
  Synthetic
caacccccaccuccacugc

SEQ ID NO: 1061 - RNA, 19 nt, Artificial Sequence
  Synthetic
aacccccaccuccacugcu

SEQ ID NO: 1062 - RNA, 19 nt, Artificial Sequence
  Synthetic
acccccaccuccacugcuu

SEQ ID NO: 1063 - RNA, 19 nt, Artificial Sequence
  Synthetic
cccccaccuccacugcuuu

SEQ ID NO: 1064 - RNA, 19 nt, Artificial Sequence
  Synthetic
ccccaccuccacugcuuuc

SEQ ID NO: 1065 - RNA, 19 nt, Artificial Sequence
  Synthetic
cccaccuccacugcuuucu

SEQ ID NO: 1066 - RNA, 19 nt, Artificial Sequence
  Synthetic
ccaccuccacugcuuucug

SEQ ID NO: 1067 - RNA, 19 nt, Artificial Sequence
  Synthetic
caccuccacugcuuucugu

SEQ ID NO: 1068 - RNA, 19 nt, Artificial Sequence
  Synthetic
accuccacugcuuucuguu

SEQ ID NO: 1069 - RNA, 19 nt, Artificial Sequence
  Synthetic
ccuccacugcuuucuguuu

SEQ ID NO: 1070 - RNA, 19 nt, Artificial Sequence
  Synthetic
cuccacugcuuucuguuug

SEQ ID NO: 1071 - RNA, 19 nt, Artificial Sequence
  Synthetic
uccacugcuuucuguuugg

SEQ ID NO: 1072 - RNA, 19 nt, Artificial Sequence
  Synthetic
ccacugcuuucuguuuggu

SEQ ID NO: 1073 - RNA, 19 nt, Artificial Sequence
  Synthetic
cacugcuuucuguuugguu

SEQ ID NO: 1074 - RNA, 19 nt, Artificial Sequence
  Synthetic
acugcuuucuguuugguuu

SEQ ID NO: 1075 - RNA, 19 nt, Artificial Sequence
  Synthetic
cugcuuucuguuugguuug

SEQ ID NO: 1076 - RNA, 19 nt, Artificial Sequence
  Synthetic
ugcuuucuguuugguuugg

SEQ ID NO: 1077 - RNA, 19 nt, Artificial Sequence
  Synthetic
gcuuucuguuugguuuggu

SEQ ID NO: 1078 - RNA, 19 nt, Artificial Sequence
  Synthetic
cuuucuguuugguuugguu

SEQ ID NO: 1079 - RNA, 19 nt, Artificial Sequence
  Synthetic
uuucuguuugguuugguuu

SEQ ID NO: 1080 - RNA, 19 nt, Artificial Sequence
  Synthetic
uucuguuugguuugguuug

SEQ ID NO: 1081 - RNA, 19 nt, Artificial Sequence
  Synthetic
ucuguuugguuugguuuga

SEQ ID NO: 1082 - RNA, 19 nt, Artificial Sequence
  Synthetic
cuguuugguuugguuugag

SEQ ID NO: 1083 - RNA, 19 nt, Artificial Sequence
  Synthetic
uguuugguuugguuugagu

SEQ ID NO: 1084 - RNA, 19 nt, Artificial Sequence
  Synthetic
guuugguuugguuugaguu

SEQ ID NO: 1085 - RNA, 19 nt, Artificial Sequence
  Synthetic
uuugguuugguuugaguuu

SEQ ID NO: 1086 - RNA, 19 nt, Artificial Sequence
  Synthetic
uugguuugguuugaguuug

SEQ ID NO: 1087 - RNA, 19 nt, Artificial Sequence
  Synthetic
ugguuugguuugaguuugg

SEQ ID NO: 1088 - RNA, 19 nt, Artificial Sequence
  Synthetic
gguuugguuugaguuuggg

SEQ ID NO: 1089 - RNA, 19 nt, Artificial Sequence
  Synthetic
guuugguuugaguuuggga

SEQ ID NO: 1090 - RNA, 19 nt, Artificial Sequence
  Synthetic
uuugguuugaguuugggau

SEQ ID NO: 1091 - RNA, 19 nt, Artificial Sequence
  Synthetic
uugguuugaguuugggauu

SEQ ID NO: 1092 - RNA, 19 nt, Artificial Sequence
  Synthetic
ugguuugaguuugggauuu

SEQ ID NO: 1093 - RNA, 19 nt, Artificial Sequence
  Synthetic
gguuugaguuugggauuuu

SEQ ID NO: 1094 - RNA, 19 nt, Artificial Sequence
  Synthetic
guuugaguuugggauuuug

SEQ ID NO: 1095 - RNA, 19 nt, Artificial Sequence
  Synthetic
uuugaguuugggauuuugg

SEQ ID NO: 1096 - RNA, 19 nt, Artificial Sequence
  Synthetic
uugaguuugggauuuuggg

SEQ ID NO: 1097 - RNA, 19 nt, Artificial Sequence
  Synthetic
ugaguuugggauuuugggc

SEQ ID NO: 1098 - RNA, 19 nt, Artificial Sequence
  Synthetic
gaguuugggauuuugggcu

SEQ ID NO: 1099 - RNA, 19 nt, Artificial Sequence
  Synthetic
aguuugggauuuugggcua

SEQ ID NO: 1100 - RNA, 19 nt, Artificial Sequence
  Synthetic
guuugggauuuugggcuag

SEQ ID NO: 1101 - RNA, 19 nt, Artificial Sequence
  Synthetic
uuugggauuuugggcuagc

SEQ ID NO: 1102 - RNA, 19 nt, Artificial Sequence
  Synthetic
uugggauuuugggcuagcu

SEQ ID NO: 1103 - RNA, 19 nt, Artificial Sequence
  Synthetic
ugggauuuugggcuagcuc

SEQ ID NO: 1104 - RNA, 19 nt, Artificial Sequence
  Synthetic
gggauuuugggcuagcucu

SEQ ID NO: 1105 - RNA, 19 nt, Artificial Sequence
  Synthetic
ggauuuugggcuagcucuu

SEQ ID NO: 1106 - RNA, 19 nt, Artificial Sequence
  Synthetic
gauuuugggcuagcucuuu

SEQ ID NO: 1107 - RNA, 19 nt, Artificial Sequence
  Synthetic
auuuugggcuagcucuuuu

SEQ ID NO: 1108 - RNA, 19 nt, Artificial Sequence
  Synthetic
uuuugggcuagcucuuuuu

SEQ ID NO: 1109 - RNA, 19 nt, Artificial Sequence
  Synthetic
uuugggcuagcucuuuuuu

SEQ ID NO: 1110 - RNA, 19 nt, Artificial Sequence
  Synthetic
uugggcuagcucuuuuuuc

SEQ ID NO: 1111 - RNA, 19 nt, Artificial Sequence
  Synthetic
ugggcuagcucuuuuuucu

SEQ ID NO: 1112 - RNA, 19 nt, Artificial Sequence
  Synthetic
gggcuagcucuuuuuucuu

SEQ ID NO: 1113 - RNA, 19 nt, Artificial Sequence
  Synthetic
ggcuagcucuuuuuucuuu

SEQ ID NO: 1114 - RNA, 19 nt, Artificial Sequence
  Synthetic
gcuagcucuuuuuucuuug

SEQ ID NO: 1115 - RNA, 19 nt, Artificial Sequence
  Synthetic
cuagcucuuuuuucuuugu

SEQ ID NO: 1116 - RNA, 19 nt, Artificial Sequence
  Synthetic
uagcucuuuuuucuuuguc

SEQ ID NO: 1117 - RNA, 19 nt, Artificial Sequence
  Synthetic
agcucuuuuuucuuugucu

SEQ ID NO: 1118 - RNA, 19 nt, Artificial Sequence
  Synthetic
gcucuuuuuucuuugucug

SEQ ID NO: 1119 - RNA, 19 nt, Artificial Sequence
  Synthetic
cucuuuuuucuuugucugc

SEQ ID NO: 1120 - RNA, 19 nt, Artificial Sequence
  Synthetic
ucuuuuuucuuugucugcu

SEQ ID NO: 1121 - RNA, 19 nt, Artificial Sequence
  Synthetic
cuuuuuucuuugucugcuu

SEQ ID NO: 1122 - RNA, 19 nt, Artificial Sequence
  Synthetic
uuuuuucuuugucugcuuu

SEQ ID NO: 1123 - RNA, 19 nt, Artificial Sequence
  Synthetic
uuuuucuuugucugcuuuc

SEQ ID NO: 1124 - RNA, 19 nt, Artificial Sequence
  Synthetic
uuuucuuugucugcuuucu

SEQ ID NO: 1125 - RNA, 19 nt, Artificial Sequence
  Synthetic
uuucuuugucugcuuucug

SEQ ID NO: 1126 - RNA, 19 nt, Artificial Sequence
  Synthetic
uucuuugucugcuuucugu

SEQ ID NO: 1127 - RNA, 19 nt, Artificial Sequence
  Synthetic
ucuuugucugcuuucuguu

SEQ ID NO: 1128 - RNA, 19 nt, Artificial Sequence
  Synthetic
cuuugucugcuuucuguuu

SEQ ID NO: 1129 - RNA, 19 nt, Artificial Sequence
  Synthetic
uuugucugcuuucuguuuu

SEQ ID NO: 1130 - RNA, 19 nt, Artificial Sequence
  Synthetic
uugucugcuuucuguuuuc

SEQ ID NO: 1131 - RNA, 19 nt, Artificial Sequence
  Synthetic
ugucugcuuucuguuuucc

SEQ ID NO: 1132 - RNA, 19 nt, Artificial Sequence
  Synthetic
gucugcuuucuguuuuccc

SEQ ID NO: 1133 - RNA, 19 nt, Artificial Sequence
  Synthetic
ucugcuuucuguuuucccu

SEQ ID NO: 1134 - RNA, 19 nt, Artificial Sequence
  Synthetic
cugcuuucuguuuucccuu

SEQ ID NO: 1135 - RNA, 19 nt, Artificial Sequence
  Synthetic
ugcuuucuguuuucccuuc

SEQ ID NO: 1136 - RNA, 19 nt, Artificial Sequence
  Synthetic
gcuuucuguuuucccuucc

SEQ ID NO: 1137 - RNA, 19 nt, Artificial Sequence
  Synthetic
cuuucuguuuucccuuccu

SEQ ID NO: 1138 - RNA, 19 nt, Artificial Sequence
  Synthetic
uuucuguuuucccuuccuc

SEQ ID NO: 1139 - RNA, 19 nt, Artificial Sequence
  Synthetic
uucuguuuucccuuccucc

SEQ ID NO: 1140 - RNA, 19 nt, Artificial Sequence
  Synthetic
ucuguuuucccuuccuccc

SEQ ID NO: 1141 - RNA, 19 nt, Artificial Sequence
  Synthetic
cuguuuucccuuccucccu

SEQ ID NO: 1142 - RNA, 19 nt, Artificial Sequence
  Synthetic
uguuuucccuuccucccuu

SEQ ID NO: 1143 - RNA, 19 nt, Artificial Sequence
  Synthetic
guuuucccuuccucccuuc

SEQ ID NO: 1144 - RNA, 19 nt, Artificial Sequence
  Synthetic
uuuucccuuccucccuucc

SEQ ID NO: 1145 - RNA, 19 nt, Artificial Sequence
  Synthetic
uuucccuuccucccuuccc

SEQ ID NO: 1146 - RNA, 19 nt, Artificial Sequence
  Synthetic
uucccuuccucccuucccu

SEQ ID NO: 1147 - RNA, 19 nt, Artificial Sequence
  Synthetic
ucccuuccucccuucccua

SEQ ID NO: 1148 - RNA, 19 nt, Artificial Sequence
  Synthetic
cccuuccucccuucccuau

SEQ ID NO: 1149 - RNA, 19 nt, Artificial Sequence
  Synthetic
ccuuccucccuucccuaug

SEQ ID NO: 1150 - RNA, 19 nt, Artificial Sequence
  Synthetic
cuuccucccuucccuaugu

SEQ ID NO: 1151 - RNA, 19 nt, Artificial Sequence
  Synthetic
uuccucccuucccuaugua

SEQ ID NO: 1152 - RNA, 19 nt, Artificial Sequence
  Synthetic
uccucccuucccuauguac

SEQ ID NO: 1153 - RNA, 19 nt, Artificial Sequence
  Synthetic
ccucccuucccuauguacg

SEQ ID NO: 1154 - RNA, 19 nt, Artificial Sequence
  Synthetic
cucccuucccuauguacgc

SEQ ID NO: 1155 - RNA, 19 nt, Artificial Sequence
  Synthetic
ucccuucccuauguacgcu

SEQ ID NO: 1156 - RNA, 19 nt, Artificial Sequence
  Synthetic
cccuucccuauguacgcuc

SEQ ID NO: 1157 - RNA, 19 nt, Artificial Sequence
  Synthetic
ccuucccuauguacgcuca

SEQ ID NO: 1158 - RNA, 19 nt, Artificial Sequence
  Synthetic
cuucccuauguacgcucag

SEQ ID NO: 1159 - RNA, 19 nt, Artificial Sequence
  Synthetic
uucccuauguacgcucaga

SEQ ID NO: 1160 - RNA, 19 nt, Artificial Sequence
  Synthetic
ucccuauguacgcucagag

SEQ ID NO: 1161 - RNA, 19 nt, Artificial Sequence
  Synthetic
cccuauguacgcucagagc

SEQ ID NO: 1162 - RNA, 19 nt, Artificial Sequence
  Synthetic
ccuauguacgcucagagcc

SEQ ID NO: 1163 - RNA, 19 nt, Artificial Sequence
  Synthetic
cuauguacgcucagagccu

SEQ ID NO: 1164 - RNA, 19 nt, Artificial Sequence
  Synthetic
uauguacgcucagagccuc

SEQ ID NO: 1165 - RNA, 19 nt, Artificial Sequence
  Synthetic
auguacgcucagagccuca

SEQ ID NO: 1166 - RNA, 19 nt, Artificial Sequence
  Synthetic
uguacgcucagagccucag

SEQ ID NO: 1167 - RNA, 19 nt, Artificial Sequence
  Synthetic
guacgcucagagccucaga

SEQ ID NO: 1168 - RNA, 19 nt, Artificial Sequence
  Synthetic
uacgcucagagccucagac

SEQ ID NO: 1169 - RNA, 19 nt, Artificial Sequence
  Synthetic
acgcucagagccucagaca

SEQ ID NO: 1170 - RNA, 19 nt, Artificial Sequence
  Synthetic
cgcucagagccucagacag

SEQ ID NO: 1171 - RNA, 19 nt, Artificial Sequence
  Synthetic
gcucagagccucagacaga

SEQ ID NO: 1172 - RNA, 19 nt, Artificial Sequence
  Synthetic
cucagagccucagacagac

SEQ ID NO: 1173 - RNA, 19 nt, Artificial Sequence
  Synthetic
ucagagccucagacagacc

SEQ ID NO: 1174 - RNA, 19 nt, Artificial Sequence
  Synthetic
cagagccucagacagaccg

SEQ ID NO: 1175 - RNA, 19 nt, Artificial Sequence
  Synthetic
agagccucagacagaccgu

SEQ ID NO: 1176 - RNA, 19 nt, Artificial Sequence
  Synthetic
gagccucagacagaccguc

SEQ ID NO: 1177 - RNA, 19 nt, Artificial Sequence
  Synthetic
agccucagacagaccgucu

SEQ ID NO: 1178 - RNA, 19 nt, Artificial Sequence
  Synthetic
gccucagacagaccgucug

SEQ ID NO: 1179 - RNA, 19 nt, Artificial Sequence
  Synthetic
ccucagacagaccgucugg

SEQ ID NO: 1180 - RNA, 19 nt, Artificial Sequence
  Synthetic
cucagacagaccgucuggg

SEQ ID NO: 1181 - RNA, 19 nt, Artificial Sequence
  Synthetic
ucagacagaccgucugggc

SEQ ID NO: 1182 - RNA, 19 nt, Artificial Sequence
  Synthetic
cagacagaccgucugggcg

SEQ ID NO: 1183 - RNA, 19 nt, Artificial Sequence
  Synthetic
agacagaccgucugggcgc

SEQ ID NO: 1184 - RNA, 19 nt, Artificial Sequence
  Synthetic
gacagaccgucugggcgcc

SEQ ID NO: 1185 - RNA, 19 nt, Artificial Sequence
  Synthetic
acagaccgucugggcgccu

SEQ ID NO: 1186 - RNA, 19 nt, Artificial Sequence
  Synthetic
cagaccgucugggcgccuc

SEQ ID NO: 1187 - RNA, 19 nt, Artificial Sequence
  Synthetic
agaccgucugggcgccuca

SEQ ID NO: 1188 - RNA, 19 nt, Artificial Sequence
  Synthetic
gaccgucugggcgccucau

SEQ ID NO: 1189 - RNA, 19 nt, Artificial Sequence
  Synthetic
accgucugggcgccucauu

SEQ ID NO: 1190 - RNA, 19 nt, Artificial Sequence
  Synthetic
ccgucugggcgccucauuc

SEQ ID NO: 1191 - RNA, 19 nt, Artificial Sequence
  Synthetic
cgucugggcgccucauucg

SEQ ID NO: 1192 - RNA, 19 nt, Artificial Sequence
  Synthetic
gucugggcgccucauucgc

SEQ ID NO: 1193 - RNA, 19 nt, Artificial Sequence
  Synthetic
ucugggcgccucauucgcg

SEQ ID NO: 1194 - RNA, 19 nt, Artificial Sequence
  Synthetic
cugggcgccucauucgcgu

SEQ ID NO: 1195 - RNA, 19 nt, Artificial Sequence
  Synthetic
ugggcgccucauucgcguu

SEQ ID NO: 1196 - RNA, 19 nt, Artificial Sequence
  Synthetic
gggcgccucauucgcguuu

SEQ ID NO: 1197 - RNA, 19 nt, Artificial Sequence
  Synthetic
ggcgccucauucgcguuuc

SEQ ID NO: 1198 - RNA, 19 nt, Artificial Sequence
  Synthetic
gcgccucauucgcguuucc

SEQ ID NO: 1199 - RNA, 19 nt, Artificial Sequence
  Synthetic
cgccucauucgcguuuccg

SEQ ID NO: 1200 - RNA, 19 nt, Artificial Sequence
  Synthetic
gccucauucgcguuuccgc

SEQ ID NO: 1201 - RNA, 19 nt, Artificial Sequence
  Synthetic
ccucauucgcguuuccgca

SEQ ID NO: 1202 - RNA, 19 nt, Artificial Sequence
  Synthetic
cucauucgcguuuccgcaa

SEQ ID NO: 1203 - RNA, 19 nt, Artificial Sequence
  Synthetic
ucauucgcguuuccgcaag

SEQ ID NO: 1204 - RNA, 19 nt, Artificial Sequence
  Synthetic
cauucgcguuuccgcaaga

SEQ ID NO: 1205 - RNA, 19 nt, Artificial Sequence
  Synthetic
auucgcguuuccgcaagau

SEQ ID NO: 1206 - RNA, 19 nt, Artificial Sequence
  Synthetic
uucgcguuuccgcaagauc

SEQ ID NO: 1207 - RNA, 19 nt, Artificial Sequence
  Synthetic
ucgcguuuccgcaagauca

SEQ ID NO: 1208 - RNA, 19 nt, Artificial Sequence
  Synthetic
cgcguuuccgcaagaucac

SEQ ID NO: 1209 - RNA, 19 nt, Artificial Sequence
  Synthetic
gcguuuccgcaagaucaca

SEQ ID NO: 1210 - RNA, 19 nt, Artificial Sequence
  Synthetic
cguuuccgcaagaucacau

SEQ ID NO: 1211 - RNA, 19 nt, Artificial Sequence
  Synthetic
guuuccgcaagaucacaua

SEQ ID NO: 1212 - RNA, 19 nt, Artificial Sequence
  Synthetic
uuuccgcaagaucacauag

SEQ ID NO: 1213 - RNA, 19 nt, Artificial Sequence
  Synthetic
uuccgcaagaucacauaga

SEQ ID NO: 1214 - RNA, 19 nt, Artificial Sequence
  Synthetic
uccgcaagaucacauagau

SEQ ID NO: 1215 - RNA, 19 nt, Artificial Sequence
  Synthetic
ccgcaagaucacauagaug

SEQ ID NO: 1216 - RNA, 19 nt, Artificial Sequence
  Synthetic
cgcaagaucacauagauga

SEQ ID NO: 1217 - RNA, 19 nt, Artificial Sequence
  Synthetic
gcaagaucacauagaugac

SEQ ID NO: 1218 - RNA, 19 nt, Artificial Sequence
  Synthetic
caagaucacauagaugaca

SEQ ID NO: 1219 - RNA, 19 nt, Artificial Sequence
  Synthetic
aagaucacauagaugacac

SEQ ID NO: 1220 - RNA, 19 nt, Artificial Sequence
  Synthetic
agaucacauagaugacacc

SEQ ID NO: 1221 - RNA, 19 nt, Artificial Sequence
  Synthetic
gaucacauagaugacaccg

SEQ ID NO: 1222 - RNA, 19 nt, Artificial Sequence
  Synthetic
aucacauagaugacaccgc

SEQ ID NO: 1223 - RNA, 19 nt, Artificial Sequence
  Synthetic
ucacauagaugacaccgcu

SEQ ID NO: 1224 - RNA, 19 nt, Artificial Sequence
  Synthetic
cacauagaugacaccgcug

SEQ ID NO: 1225 - RNA, 19 nt, Artificial Sequence
  Synthetic
acauagaugacaccgcuga

SEQ ID NO: 1226 - RNA, 19 nt, Artificial Sequence
  Synthetic
cauagaugacaccgcugag

SEQ ID NO: 1227 - RNA, 19 nt, Artificial Sequence
  Synthetic
auagaugacaccgcugaga

SEQ ID NO: 1228 - RNA, 19 nt, Artificial Sequence
  Synthetic
uagaugacaccgcugagaa

SEQ ID NO: 1229 - RNA, 19 nt, Artificial Sequence
  Synthetic
agaugacaccgcugagaag

SEQ ID NO: 1230 - RNA, 19 nt, Artificial Sequence
  Synthetic
gaugacaccgcugagaagg

SEQ ID NO: 1231 - RNA, 19 nt, Artificial Sequence
  Synthetic
augacaccgcugagaaggg

SEQ ID NO: 1232 - RNA, 19 nt, Artificial Sequence
  Synthetic
ugacaccgcugagaagggc

SEQ ID NO: 1233 - RNA, 19 nt, Artificial Sequence
  Synthetic
gacaccgcugagaagggcc

SEQ ID NO: 1234 - RNA, 19 nt, Artificial Sequence
  Synthetic
acaccgcugagaagggcca

SEQ ID NO: 1235 - RNA, 19 nt, Artificial Sequence
  Synthetic
caccgcugagaagggccag

SEQ ID NO: 1236 - RNA, 19 nt, Artificial Sequence
  Synthetic
accgcugagaagggccagg

SEQ ID NO: 1237 - RNA, 19 nt, Artificial Sequence
  Synthetic
ccgcugagaagggccaggg

SEQ ID NO: 1238 - RNA, 19 nt, Artificial Sequence
  Synthetic
cgcugagaagggccagggg

SEQ ID NO: 1239 - RNA, 19 nt, Artificial Sequence
  Synthetic
gcugagaagggccaggggg

SEQ ID NO: 1240 - RNA, 19 nt, Artificial Sequence
  Synthetic
cugagaagggccaggggga

SEQ ID NO: 1241 - RNA, 19 nt, Artificial Sequence
  Synthetic
ugagaagggccagggggaa

SEQ ID NO: 1242 - RNA, 19 nt, Artificial Sequence
  Synthetic
gagaagggccagggggaag

SEQ ID NO: 1243 - RNA, 19 nt, Artificial Sequence
  Synthetic
agaagggccagggggaagg

SEQ ID NO: 1244 - RNA, 19 nt, Artificial Sequence
  Synthetic
gaagggccagggggaaggc

SEQ ID NO: 1245 - RNA, 19 nt, Artificial Sequence
  Synthetic
aagggccagggggaaggcc

SEQ ID NO: 1246 - RNA, 19 nt, Artificial Sequence
  Synthetic
agggccagggggaaggcca

SEQ ID NO: 1247 - RNA, 19 nt, Artificial Sequence
  Synthetic
gggccagggggaaggccac

SEQ ID NO: 1248 - RNA, 19 nt, Artificial Sequence
  Synthetic
ggccagggggaaggccacc

SEQ ID NO: 1249 - RNA, 19 nt, Artificial Sequence
  Synthetic
gccagggggaaggccaccc

SEQ ID NO: 1250 - RNA, 19 nt, Artificial Sequence
  Synthetic
ccagggggaaggccaccca

SEQ ID NO: 1251 - RNA, 19 nt, Artificial Sequence
  Synthetic
cagggggaaggccacccag

SEQ ID NO: 1252 - RNA, 19 nt, Artificial Sequence
  Synthetic
agggggaaggccacccagg

SEQ ID NO: 1253 - RNA, 19 nt, Artificial Sequence
  Synthetic
gggggaaggccacccaggc

SEQ ID NO: 1254 - RNA, 19 nt, Artificial Sequence
  Synthetic
ggggaaggccacccaggcc

SEQ ID NO: 1255 - RNA, 19 nt, Artificial Sequence
  Synthetic
gggaaggccacccaggcca

SEQ ID NO: 1256 - RNA, 19 nt, Artificial Sequence
  Synthetic
ggaaggccacccaggccag

SEQ ID NO: 1257 - RNA, 19 nt, Artificial Sequence
  Synthetic
gaaggccacccaggccagg

SEQ ID NO: 1258 - RNA, 19 nt, Artificial Sequence
  Synthetic
aaggccacccaggccagga

SEQ ID NO: 1259 - RNA, 19 nt, Artificial Sequence
  Synthetic
aggccacccaggccaggau

SEQ ID NO: 1260 - RNA, 19 nt, Artificial Sequence
  Synthetic
ggccacccaggccaggaug

SEQ ID NO: 1261 - RNA, 19 nt, Artificial Sequence
  Synthetic
gccacccaggccaggaugu

SEQ ID NO: 1262 - RNA, 19 nt, Artificial Sequence
  Synthetic
ccacccaggccaggaugua

SEQ ID NO: 1263 - RNA, 19 nt, Artificial Sequence
  Synthetic
cacccaggccaggauguag

SEQ ID NO: 1264 - RNA, 19 nt, Artificial Sequence
  Synthetic
acccaggccaggauguagg

SEQ ID NO: 1265 - RNA, 19 nt, Artificial Sequence
  Synthetic
cccaggccaggauguaggc

SEQ ID NO: 1266 - RNA, 19 nt, Artificial Sequence
  Synthetic
ccaggccaggauguaggcg

SEQ ID NO: 1267 - RNA, 19 nt, Artificial Sequence
  Synthetic
caggccaggauguaggcga

SEQ ID NO: 1268 - RNA, 19 nt, Artificial Sequence
  Synthetic
aggccaggauguaggcgaa

SEQ ID NO: 1269 - RNA, 19 nt, Artificial Sequence
  Synthetic
ggccaggauguaggcgaaa

SEQ ID NO: 1270 - RNA, 19 nt, Artificial Sequence
  Synthetic
gccaggauguaggcgaaac

SEQ ID NO: 1271 - RNA, 19 nt, Artificial Sequence
  Synthetic
ccaggauguaggcgaaacc

SEQ ID NO: 1272 - RNA, 19 nt, Artificial Sequence
  Synthetic
caggauguaggcgaaaccg

SEQ ID NO: 1273 - RNA, 19 nt, Artificial Sequence
  Synthetic
aggauguaggcgaaaccgu

SEQ ID NO: 1274 - RNA, 19 nt, Artificial Sequence
  Synthetic
ggauguaggcgaaaccgua

SEQ ID NO: 1275 - RNA, 19 nt, Artificial Sequence
  Synthetic
gauguaggcgaaaccguag

SEQ ID NO: 1276 - RNA, 19 nt, Artificial Sequence
  Synthetic
auguaggcgaaaccguagg

SEQ ID NO: 1277 - RNA, 19 nt, Artificial Sequence
  Synthetic
uguaggcgaaaccguagga

SEQ ID NO: 1278 - RNA, 19 nt, Artificial Sequence
  Synthetic
guaggcgaaaccguaggag

SEQ ID NO: 1279 - RNA, 19 nt, Artificial Sequence
  Synthetic
uaggcgaaaccguaggagu

SEQ ID NO: 1280 - RNA, 19 nt, Artificial Sequence
  Synthetic
aggcgaaaccguaggagua

SEQ ID NO: 1281 - RNA, 19 nt, Artificial Sequence
  Synthetic
ggcgaaaccguaggaguaa

SEQ ID NO: 1282 - RNA, 19 nt, Artificial Sequence
  Synthetic
gcgaaaccguaggaguaau

SEQ ID NO: 1283 - RNA, 19 nt, Artificial Sequence
  Synthetic
cgaaaccguaggaguaauc

SEQ ID NO: 1284 - RNA, 19 nt, Artificial Sequence
  Synthetic
gaaaccguaggaguaaucc

SEQ ID NO: 1285 - RNA, 19 nt, Artificial Sequence
  Synthetic
aaaccguaggaguaauccg

SEQ ID NO: 1286 - RNA, 19 nt, Artificial Sequence
  Synthetic
aaccguaggaguaauccga

SEQ ID NO: 1287 - RNA, 19 nt, Artificial Sequence
  Synthetic
accguaggaguaauccgag

SEQ ID NO: 1288 - RNA, 19 nt, Artificial Sequence
  Synthetic
ccguaggaguaauccgagu

SEQ ID NO: 1289 - RNA, 19 nt, Artificial Sequence
  Synthetic
cguaggaguaauccgaguu

SEQ ID NO: 1290 - RNA, 19 nt, Artificial Sequence
  Synthetic
guaggaguaauccgaguug

SEQ ID NO: 1291 - RNA, 19 nt, Artificial Sequence
  Synthetic
uaggaguaauccgaguuga

SEQ ID NO: 1292 - RNA, 19 nt, Artificial Sequence
  Synthetic
aggaguaauccgaguugag

SEQ ID NO: 1293 - RNA, 19 nt, Artificial Sequence
  Synthetic
ggaguaauccgaguugaga

SEQ ID NO: 1294 - RNA, 19 nt, Artificial Sequence
  Synthetic
gaguaauccgaguugagau

SEQ ID NO: 1295 - RNA, 19 nt, Artificial Sequence
  Synthetic
aguaauccgaguugagaug

SEQ ID NO: 1296 - RNA, 19 nt, Artificial Sequence
  Synthetic
guaauccgaguugagaugc

SEQ ID NO: 1297 - RNA, 19 nt, Artificial Sequence
  Synthetic
uaauccgaguugagaugcc

SEQ ID NO: 1298 - RNA, 19 nt, Artificial Sequence
  Synthetic
aauccgaguugagaugcca

SEQ ID NO: 1299 - RNA, 19 nt, Artificial Sequence
  Synthetic
auccgaguugagaugccac

SEQ ID NO: 1300 - RNA, 19 nt, Artificial Sequence
  Synthetic
uccgaguugagaugccacu

SEQ ID NO: 1301 - RNA, 19 nt, Artificial Sequence
  Synthetic
ccgaguugagaugccacuc

SEQ ID NO: 1302 - RNA, 19 nt, Artificial Sequence
  Synthetic
cgaguugagaugccacucc

SEQ ID NO: 1303 - RNA, 19 nt, Artificial Sequence
  Synthetic
gaguugagaugccacuccg

SEQ ID NO: 1304 - RNA, 19 nt, Artificial Sequence
  Synthetic
aguugagaugccacuccgg

SEQ ID NO: 1305 - RNA, 19 nt, Artificial Sequence
  Synthetic
guugagaugccacuccggg

SEQ ID NO: 1306 - RNA, 19 nt, Artificial Sequence
  Synthetic
uugagaugccacuccgggu

SEQ ID NO: 1307 - RNA, 19 nt, Artificial Sequence
  Synthetic
ugagaugccacuccgggug

SEQ ID NO: 1308 - RNA, 19 nt, Artificial Sequence
  Synthetic
gagaugccacuccgggugc

SEQ ID NO: 1309 - RNA, 19 nt, Artificial Sequence
  Synthetic
agaugccacuccgggugcc

SEQ ID NO: 1310 - RNA, 19 nt, Artificial Sequence
  Synthetic
gaugccacuccgggugccu

SEQ ID NO: 1311 - RNA, 19 nt, Artificial Sequence
  Synthetic
augccacuccgggugccuc

SEQ ID NO: 1312 - RNA, 19 nt, Artificial Sequence
  Synthetic
ugccacuccgggugccuca

SEQ ID NO: 1313 - RNA, 19 nt, Artificial Sequence
  Synthetic
gccacuccgggugccucac

SEQ ID NO: 1314 - RNA, 19 nt, Artificial Sequence
  Synthetic
ccacuccgggugccucacc

SEQ ID NO: 1315 - RNA, 19 nt, Artificial Sequence
  Synthetic
cacuccgggugccucaccg

SEQ ID NO: 1316 - RNA, 19 nt, Artificial Sequence
  Synthetic
acuccgggugccucaccgu

SEQ ID NO: 1317 - RNA, 19 nt, Artificial Sequence
  Synthetic
cuccgggugccucaccgug

SEQ ID NO: 1318 - RNA, 19 nt, Artificial Sequence
  Synthetic
uccgggugccucaccgugu

SEQ ID NO: 1319 - RNA, 19 nt, Artificial Sequence
  Synthetic
ccgggugccucaccgugua

SEQ ID NO: 1320 - RNA, 19 nt, Artificial Sequence
  Synthetic
cgggugccucaccguguag

SEQ ID NO: 1321 - RNA, 19 nt, Artificial Sequence
  Synthetic
gggugccucaccguguaga

SEQ ID NO: 1322 - RNA, 19 nt, Artificial Sequence
  Synthetic
ggugccucaccguguagau

SEQ ID NO: 1323 - RNA, 19 nt, Artificial Sequence
  Synthetic
gugccucaccguguagaug

SEQ ID NO: 1324 - RNA, 19 nt, Artificial Sequence
  Synthetic
ugccucaccguguagaugg

SEQ ID NO: 1325 - RNA, 19 nt, Artificial Sequence
  Synthetic
gccucaccguguagauggc

SEQ ID NO: 1326 - RNA, 19 nt, Artificial Sequence
  Synthetic
ccucaccguguagauggcc

SEQ ID NO: 1327 - RNA, 19 nt, Artificial Sequence
  Synthetic
cucaccguguagauggccg

SEQ ID NO: 1328 - RNA, 19 nt, Artificial Sequence
  Synthetic
ucaccguguagauggccgc

SEQ ID NO: 1329 - RNA, 19 nt, Artificial Sequence
  Synthetic
caccguguagauggccgca

SEQ ID NO: 1330 - RNA, 19 nt, Artificial Sequence
  Synthetic
accguguagauggccgcag

SEQ ID NO: 1331 - RNA, 19 nt, Artificial Sequence
  Synthetic
ccguguagauggccgcagc

SEQ ID NO: 1332 - RNA, 19 nt, Artificial Sequence
  Synthetic
cguguagauggccgcagca

SEQ ID NO: 1333 - RNA, 19 nt, Artificial Sequence
  Synthetic
guguagauggccgcagcac

SEQ ID NO: 1334 - RNA, 19 nt, Artificial Sequence
  Synthetic
uguagauggccgcagcacu

SEQ ID NO: 1335 - RNA, 19 nt, Artificial Sequence
  Synthetic
guagauggccgcagcacuc

SEQ ID NO: 1336 - RNA, 19 nt, Artificial Sequence
  Synthetic
uagauggccgcagcacuca

SEQ ID NO: 1337 - RNA, 19 nt, Artificial Sequence
  Synthetic
agauggccgcagcacucau

SEQ ID NO: 1338 - RNA, 19 nt, Artificial Sequence
  Synthetic
gauggccgcagcacucauc

SEQ ID NO: 1339 - RNA, 19 nt, Artificial Sequence
  Synthetic
auggccgcagcacucauca

SEQ ID NO: 1340 - RNA, 19 nt, Artificial Sequence
  Synthetic
uggccgcagcacucaucac

SEQ ID NO: 1341 - RNA, 19 nt, Artificial Sequence
  Synthetic
ggccgcagcacucaucacg

SEQ ID NO: 1342 - RNA, 19 nt, Artificial Sequence
  Synthetic
gccgcagcacucaucacgc

SEQ ID NO: 1343 - RNA, 19 nt, Artificial Sequence
  Synthetic
ccgcagcacucaucacgca

SEQ ID NO: 1344 - RNA, 19 nt, Artificial Sequence
  Synthetic
cgcagcacucaucacgcac

SEQ ID NO: 1345 - RNA, 19 nt, Artificial Sequence
  Synthetic
gcagcacucaucacgcaca

SEQ ID NO: 1346 - RNA, 19 nt, Artificial Sequence
  Synthetic
cagcacucaucacgcacag

SEQ ID NO: 1347 - RNA, 19 nt, Artificial Sequence
  Synthetic
agcacucaucacgcacaga

SEQ ID NO: 1348 - RNA, 19 nt, Artificial Sequence
  Synthetic
gcacucaucacgcacagac

SEQ ID NO: 1349 - RNA, 19 nt, Artificial Sequence
  Synthetic
cacucaucacgcacagacc

SEQ ID NO: 1350 - RNA, 19 nt, Artificial Sequence
  Synthetic
acucaucacgcacagacca

SEQ ID NO: 1351 - RNA, 19 nt, Artificial Sequence
  Synthetic
cucaucacgcacagaccag

SEQ ID NO: 1352 - RNA, 19 nt, Artificial Sequence
  Synthetic
ucaucacgcacagaccagc

SEQ ID NO: 1353 - RNA, 19 nt, Artificial Sequence
  Synthetic
caucacgcacagaccagca

SEQ ID NO: 1354 - RNA, 19 nt, Artificial Sequence
  Synthetic
aucacgcacagaccagcaa

SEQ ID NO: 1355 - RNA, 19 nt, Artificial Sequence
  Synthetic
ucacgcacagaccagcaag

SEQ ID NO: 1356 - RNA, 19 nt, Artificial Sequence
  Synthetic
cacgcacagaccagcaaga

SEQ ID NO: 1357 - RNA, 19 nt, Artificial Sequence
  Synthetic
acgcacagaccagcaagaa

SEQ ID NO: 1358 - RNA, 19 nt, Artificial Sequence
  Synthetic
cgcacagaccagcaagaau

SEQ ID NO: 1359 - RNA, 19 nt, Artificial Sequence
  Synthetic
gcacagaccagcaagaauu

SEQ ID NO: 1360 - RNA, 19 nt, Artificial Sequence
  Synthetic
cacagaccagcaagaauuu

SEQ ID NO: 1361 - RNA, 19 nt, Artificial Sequence
  Synthetic
acagaccagcaagaauuug

SEQ ID NO: 1362 - RNA, 19 nt, Artificial Sequence
  Synthetic
cagaccagcaagaauuugg

SEQ ID NO: 1363 - RNA, 19 nt, Artificial Sequence
  Synthetic
agaccagcaagaauuugga

SEQ ID NO: 1364 - RNA, 19 nt, Artificial Sequence
  Synthetic
gaccagcaagaauuuggaa

SEQ ID NO: 1365 - RNA, 19 nt, Artificial Sequence
  Synthetic
accagcaagaauuuggaag

SEQ ID NO: 1366 - RNA, 19 nt, Artificial Sequence
  Synthetic
ccagcaagaauuuggaaga

SEQ ID NO: 1367 - RNA, 19 nt, Artificial Sequence
  Synthetic
cagcaagaauuuggaagau

SEQ ID NO: 1368 - RNA, 19 nt, Artificial Sequence
  Synthetic
agcaagaauuuggaagauu

SEQ ID NO: 1369 - RNA, 19 nt, Artificial Sequence
  Synthetic
gcaagaauuuggaagauuc

SEQ ID NO: 1370 - RNA, 19 nt, Artificial Sequence
  Synthetic
caagaauuuggaagauucc

SEQ ID NO: 1371 - RNA, 19 nt, Artificial Sequence
  Synthetic
aagaauuuggaagauucca

SEQ ID NO: 1372 - RNA, 19 nt, Artificial Sequence
  Synthetic
agaauuuggaagauuccag

SEQ ID NO: 1373 - RNA, 19 nt, Artificial Sequence
  Synthetic
gaauuuggaagauuccagu

SEQ ID NO: 1374 - RNA, 19 nt, Artificial Sequence
  Synthetic
aauuuggaagauuccagug

SEQ ID NO: 1375 - RNA, 19 nt, Artificial Sequence
  Synthetic
auuuggaagauuccaguga

SEQ ID NO: 1376 - RNA, 19 nt, Artificial Sequence
  Synthetic
uuuggaagauuccagugau

SEQ ID NO: 1377 - RNA, 19 nt, Artificial Sequence
  Synthetic
uuggaagauuccagugaug

SEQ ID NO: 1378 - RNA, 19 nt, Artificial Sequence
  Synthetic
uggaagauuccagugaugu

SEQ ID NO: 1379 - RNA, 19 nt, Artificial Sequence
  Synthetic
ggaagauuccagugaugua

SEQ ID NO: 1380 - RNA, 19 nt, Artificial Sequence
  Synthetic
gaagauuccagugauguaa

SEQ ID NO: 1381 - RNA, 19 nt, Artificial Sequence
  Synthetic
aagauuccagugauguaaa

SEQ ID NO: 1382 - RNA, 19 nt, Artificial Sequence
  Synthetic
agauuccagugauguaaaa

SEQ ID NO: 1383 - RNA, 19 nt, Artificial Sequence
  Synthetic
gauuccagugauguaaaac

SEQ ID NO: 1384 - RNA, 19 nt, Artificial Sequence
  Synthetic
auuccagugauguaaaacc

SEQ ID NO: 1385 - RNA, 19 nt, Artificial Sequence
  Synthetic
uuccagugauguaaaaccu

SEQ ID NO: 1386 - RNA, 19 nt, Artificial Sequence
  Synthetic
uccagugauguaaaaccug

SEQ ID NO: 1387 - RNA, 19 nt, Artificial Sequence
  Synthetic
ccagugauguaaaaccugc

SEQ ID NO: 1388 - RNA, 19 nt, Artificial Sequence
  Synthetic
cagugauguaaaaccugcc

SEQ ID NO: 1389 - RNA, 19 nt, Artificial Sequence
  Synthetic
agugauguaaaaccugccc

SEQ ID NO: 1390 - RNA, 19 nt, Artificial Sequence
  Synthetic
gugauguaaaaccugcccc

SEQ ID NO: 1391 - RNA, 19 nt, Artificial Sequence
  Synthetic
ugauguaaaaccugccccc

SEQ ID NO: 1392 - RNA, 19 nt, Artificial Sequence
  Synthetic
gauguaaaaccugcccccc

SEQ ID NO: 1393 - RNA, 19 nt, Artificial Sequence
  Synthetic
auguaaaaccugccccccu

SEQ ID NO: 1394 - RNA, 19 nt, Artificial Sequence
  Synthetic
uguaaaaccugccccccuu

SEQ ID NO: 1395 - RNA, 19 nt, Artificial Sequence
  Synthetic
guaaaaccugccccccuug

SEQ ID NO: 1396 - RNA, 19 nt, Artificial Sequence
  Synthetic
uaaaaccugccccccuugg

SEQ ID NO: 1397 - RNA, 19 nt, Artificial Sequence
  Synthetic
aaaaccugccccccuuggu

SEQ ID NO: 1398 - RNA, 19 nt, Artificial Sequence
  Synthetic
aaaccugccccccuuggug

SEQ ID NO: 1399 - RNA, 19 nt, Artificial Sequence
  Synthetic
aaccugccccccuugguga

SEQ ID NO: 1400 - RNA, 19 nt, Artificial Sequence
  Synthetic
accugccccccuuggugag

SEQ ID NO: 1401 - RNA, 19 nt, Artificial Sequence
  Synthetic
ccugccccccuuggugagg

SEQ ID NO: 1402 - RNA, 19 nt, Artificial Sequence
  Synthetic
cugccccccuuggugaggg

SEQ ID NO: 1403 - RNA, 19 nt, Artificial Sequence
  Synthetic
ugccccccuuggugagggu

SEQ ID NO: 1404 - RNA, 19 nt, Artificial Sequence
  Synthetic
gccccccuuggugagggug

SEQ ID NO: 1405 - RNA, 19 nt, Artificial Sequence
  Synthetic
ccccccuuggugaggguga

SEQ ID NO: 1406 - RNA, 19 nt, Artificial Sequence
  Synthetic
cccccuuggugagggugaa

SEQ ID NO: 1407 - RNA, 19 nt, Artificial Sequence
  Synthetic
ccccuuggugagggugaag

SEQ ID NO: 1408 - RNA, 19 nt, Artificial Sequence
  Synthetic
cccuuggugagggugaaga

SEQ ID NO: 1409 - RNA, 19 nt, Artificial Sequence
  Synthetic
ccuuggugagggugaagag

SEQ ID NO: 1410 - RNA, 19 nt, Artificial Sequence
  Synthetic
cuuggugagggugaagagu

SEQ ID NO: 1411 - RNA, 19 nt, Artificial Sequence
  Synthetic
uuggugagggugaagaguu

SEQ ID NO: 1412 - RNA, 19 nt, Artificial Sequence
  Synthetic
uggugagggugaagaguug

SEQ ID NO: 1413 - RNA, 19 nt, Artificial Sequence
  Synthetic
ggugagggugaagaguugg

SEQ ID NO: 1414 - RNA, 19 nt, Artificial Sequence
  Synthetic
gugagggugaagaguuggc

SEQ ID NO: 1415 - RNA, 19 nt, Artificial Sequence
  Synthetic
ugagggugaagaguuggca

SEQ ID NO: 1416 - RNA, 19 nt, Artificial Sequence
  Synthetic
gagggugaagaguuggcag

SEQ ID NO: 1417 - RNA, 19 nt, Artificial Sequence
  Synthetic
agggugaagaguuggcaga

SEQ ID NO: 1418 - RNA, 19 nt, Artificial Sequence
  Synthetic
gggugaagaguuggcagaa

SEQ ID NO: 1419 - RNA, 19 nt, Artificial Sequence
  Synthetic
ggugaagaguuggcagaag

SEQ ID NO: 1420 - RNA, 19 nt, Artificial Sequence
  Synthetic
gugaagaguuggcagaaga

SEQ ID NO: 1421 - RNA, 19 nt, Artificial Sequence
  Synthetic
ugaagaguuggcagaagaa

SEQ ID NO: 1422 - RNA, 19 nt, Artificial Sequence
  Synthetic
gaagaguuggcagaagaac

SEQ ID NO: 1423 - RNA, 19 nt, Artificial Sequence
  Synthetic
aagaguuggcagaagaaca

SEQ ID NO: 1424 - RNA, 19 nt, Artificial Sequence
  Synthetic
agaguuggcagaagaacag

SEQ ID NO: 1425 - RNA, 19 nt, Artificial Sequence
  Synthetic
gaguuggcagaagaacagg

SEQ ID NO: 1426 - RNA, 19 nt, Artificial Sequence
  Synthetic
aguuggcagaagaacagga

SEQ ID NO: 1427 - RNA, 19 nt, Artificial Sequence
  Synthetic
guuggcagaagaacaggaa

SEQ ID NO: 1428 - RNA, 19 nt, Artificial Sequence
  Synthetic
uuggcagaagaacaggaac

SEQ ID NO: 1429 - RNA, 19 nt, Artificial Sequence
  Synthetic
uggcagaagaacaggaaca

SEQ ID NO: 1430 - RNA, 19 nt, Artificial Sequence
  Synthetic
ggcagaagaacaggaacag

SEQ ID NO: 1431 - RNA, 19 nt, Artificial Sequence
  Synthetic
gcagaagaacaggaacaga

SEQ ID NO: 1432 - RNA, 19 nt, Artificial Sequence
  Synthetic
cagaagaacaggaacagag

SEQ ID NO: 1433 - RNA, 19 nt, Artificial Sequence
  Synthetic
agaagaacaggaacagaga

SEQ ID NO: 1434 - RNA, 19 nt, Artificial Sequence
  Synthetic
gaagaacaggaacagagac

SEQ ID NO: 1435 - RNA, 19 nt, Artificial Sequence
  Synthetic
aagaacaggaacagagaca

SEQ ID NO: 1436 - RNA, 19 nt, Artificial Sequence
  Synthetic
agaacaggaacagagacag

SEQ ID NO: 1437 - RNA, 19 nt, Artificial Sequence
  Synthetic
gaacaggaacagagacaga

SEQ ID NO: 1438 - RNA, 19 nt, Artificial Sequence
  Synthetic
aacaggaacagagacagaa

SEQ ID NO: 1439 - RNA, 19 nt, Artificial Sequence
  Synthetic
acaggaacagagacagaau

SEQ ID NO: 1440 - RNA, 19 nt, Artificial Sequence
  Synthetic
caggaacagagacagaaug

SEQ ID NO: 1441 - RNA, 19 nt, Artificial Sequence
  Synthetic
aggaacagagacagaaugc

SEQ ID NO: 1442 - RNA, 19 nt, Artificial Sequence
  Synthetic
ggaacagagacagaaugcu

SEQ ID NO: 1443 - RNA, 19 nt, Artificial Sequence
  Synthetic
gaacagagacagaaugcug

SEQ ID NO: 1444 - RNA, 19 nt, Artificial Sequence
  Synthetic
aacagagacagaaugcuga

SEQ ID NO: 1445 - RNA, 19 nt, Artificial Sequence
  Synthetic
acagagacagaaugcugaa

SEQ ID NO: 1446 - RNA, 19 nt, Artificial Sequence
  Synthetic
cagagacagaaugcugaag

SEQ ID NO: 1447 - RNA, 19 nt, Artificial Sequence
  Synthetic
agagacagaaugcugaaga

SEQ ID NO: 1448 - RNA, 19 nt, Artificial Sequence
  Synthetic
gagacagaaugcugaagau

SEQ ID NO: 1449 - RNA, 19 nt, Artificial Sequence
  Synthetic
agacagaaugcugaagaug

SEQ ID NO: 1450 - RNA, 19 nt, Artificial Sequence
  Synthetic
gacagaaugcugaagauga

SEQ ID NO: 1451 - RNA, 19 nt, Artificial Sequence
  Synthetic
acagaaugcugaagaugau

SEQ ID NO: 1452 - RNA, 19 nt, Artificial Sequence
  Synthetic
cagaaugcugaagaugauc

SEQ ID NO: 1453 - RNA, 19 nt, Artificial Sequence
  Synthetic
agaaugcugaagaugaucg

SEQ ID NO: 1454 - RNA, 19 nt, Artificial Sequence
  Synthetic
gaaugcugaagaugaucga

SEQ ID NO: 1455 - RNA, 19 nt, Artificial Sequence
  Synthetic
aaugcugaagaugaucgac

SEQ ID NO: 1456 - RNA, 19 nt, Artificial Sequence
  Synthetic
augcugaagaugaucgaca

SEQ ID NO: 1457 - RNA, 19 nt, Artificial Sequence
  Synthetic
ugcugaagaugaucgacag

SEQ ID NO: 1458 - RNA, 19 nt, Artificial Sequence
  Synthetic
gcugaagaugaucgacagg

SEQ ID NO: 1459 - RNA, 19 nt, Artificial Sequence
  Synthetic
cugaagaugaucgacagga

SEQ ID NO: 1460 - RNA, 19 nt, Artificial Sequence
  Synthetic
ugaagaugaucgacaggau

SEQ ID NO: 1461 - RNA, 19 nt, Artificial Sequence
  Synthetic
gaagaugaucgacaggauc

SEQ ID NO: 1462 - RNA, 19 nt, Artificial Sequence
  Synthetic
aagaugaucgacaggauca

SEQ ID NO: 1463 - RNA, 19 nt, Artificial Sequence
  Synthetic
agaugaucgacaggaucau

SEQ ID NO: 1464 - RNA, 19 nt, Artificial Sequence
  Synthetic
gaugaucgacaggaucaug

SEQ ID NO: 1465 - RNA, 19 nt, Artificial Sequence
  Synthetic
augaucgacaggaucaugg

SEQ ID NO: 1466 - RNA, 19 nt, Artificial Sequence
  Synthetic
ugaucgacaggaucauggu

SEQ ID NO: 1467 - RNA, 19 nt, Artificial Sequence
  Synthetic
gaucgacaggaucauggug

SEQ ID NO: 1468 - RNA, 19 nt, Artificial Sequence
  Synthetic
aucgacaggaucauggugg

SEQ ID NO: 1469 - RNA, 19 nt, Artificial Sequence
  Synthetic
ucgacaggaucaugguggc

SEQ ID NO: 1470 - RNA, 19 nt, Artificial Sequence
  Synthetic
cgacaggaucaugguggcc

SEQ ID NO: 1471 - RNA, 19 nt, Artificial Sequence
  Synthetic
gacaggaucaugguggccu

SEQ ID NO: 1472 - RNA, 19 nt, Artificial Sequence
  Synthetic
acaggaucaugguggccug

SEQ ID NO: 1473 - RNA, 19 nt, Artificial Sequence
  Synthetic
caggaucaugguggccugg

SEQ ID NO: 1474 - RNA, 19 nt, Artificial Sequence
  Synthetic
aggaucaugguggccugga

SEQ ID NO: 1475 - RNA, 19 nt, Artificial Sequence
  Synthetic
ggaucaugguggccuggac

SEQ ID NO: 1476 - RNA, 19 nt, Artificial Sequence
  Synthetic
gaucaugguggccuggaca

SEQ ID NO: 1477 - RNA, 19 nt, Artificial Sequence
  Synthetic
aucaugguggccuggacag

SEQ ID NO: 1478 - RNA, 19 nt, Artificial Sequence
  Synthetic
ucaugguggccuggacaga

SEQ ID NO: 1479 - RNA, 19 nt, Artificial Sequence
  Synthetic
caugguggccuggacagac

SEQ ID NO: 1480 - RNA, 19 nt, Artificial Sequence
  Synthetic
augguggccuggacagacu

SEQ ID NO: 1481 - RNA, 19 nt, Artificial Sequence
  Synthetic
ugguggccuggacagacug

SEQ ID NO: 1482 - RNA, 19 nt, Artificial Sequence
  Synthetic
gguggccuggacagacugc

SEQ ID NO: 1483 - RNA, 19 nt, Artificial Sequence
  Synthetic
guggccuggacagacugca

SEQ ID NO: 1484 - RNA, 19 nt, Artificial Sequence
  Synthetic
uggccuggacagacugcag

SEQ ID NO: 1485 - RNA, 19 nt, Artificial Sequence
  Synthetic
ggccuggacagacugcagc

SEQ ID NO: 1486 - RNA, 19 nt, Artificial Sequence
  Synthetic
gccuggacagacugcagcc

SEQ ID NO: 1487 - RNA, 19 nt, Artificial Sequence
  Synthetic
ccuggacagacugcagcca

SEQ ID NO: 1488 - RNA, 19 nt, Artificial Sequence
  Synthetic
cuggacagacugcagccau

SEQ ID NO: 1489 - RNA, 19 nt, Artificial Sequence
  Synthetic
uggacagacugcagccauu

SEQ ID NO: 1490 - RNA, 19 nt, Artificial Sequence
  Synthetic
ggacagacugcagccauuc

SEQ ID NO: 1491 - RNA, 19 nt, Artificial Sequence
  Synthetic
gacagacugcagccauucg

SEQ ID NO: 1492 - RNA, 19 nt, Artificial Sequence
  Synthetic
acagacugcagccauucgu

SEQ ID NO: 1493 - RNA, 19 nt, Artificial Sequence
  Synthetic
cagacugcagccauucguu

SEQ ID NO: 1494 - RNA, 19 nt, Artificial Sequence
  Synthetic
agacugcagccauucguuu

SEQ ID NO: 1495 - RNA, 19 nt, Artificial Sequence
  Synthetic
gacugcagccauucguuug

SEQ ID NO: 1496 - RNA, 19 nt, Artificial Sequence
  Synthetic
acugcagccauucguuugg

SEQ ID NO: 1497 - RNA, 19 nt, Artificial Sequence
  Synthetic
cugcagccauucguuuggu

SEQ ID NO: 1498 - RNA, 19 nt, Artificial Sequence
  Synthetic
ugcagccauucguuuggug

SEQ ID NO: 1499 - RNA, 19 nt, Artificial Sequence
  Synthetic
gcagccauucguuugguga

SEQ ID NO: 1500 - RNA, 19 nt, Artificial Sequence
  Synthetic
cagccauucguuuggugau

SEQ ID NO: 1501 - RNA, 19 nt, Artificial Sequence
  Synthetic
agccauucguuuggugaug

SEQ ID NO: 1502 - RNA, 19 nt, Artificial Sequence
  Synthetic
gccauucguuuggugauga

SEQ ID NO: 1503 - RNA, 19 nt, Artificial Sequence
  Synthetic
ccauucguuuggugaugau

SEQ ID NO: 1504 - RNA, 19 nt, Artificial Sequence
  Synthetic
cauucguuuggugaugaug

SEQ ID NO: 1505 - RNA, 19 nt, Artificial Sequence
  Synthetic
auucguuuggugaugauga

SEQ ID NO: 1506 - RNA, 19 nt, Artificial Sequence
  Synthetic
uucguuuggugaugaugag

SEQ ID NO: 1507 - RNA, 19 nt, Artificial Sequence
  Synthetic
ucguuuggugaugaugaga

SEQ ID NO: 1508 - RNA, 19 nt, Artificial Sequence
  Synthetic
cguuuggugaugaugagaa

SEQ ID NO: 1509 - RNA, 19 nt, Artificial Sequence
  Synthetic
guuuggugaugaugagaaa

SEQ ID NO: 1510 - RNA, 19 nt, Artificial Sequence
  Synthetic
uuuggugaugaugagaaac

SEQ ID NO: 1511 - RNA, 19 nt, Artificial Sequence
  Synthetic
uuggugaugaugagaaaca

SEQ ID NO: 1512 - RNA, 19 nt, Artificial Sequence
  Synthetic
uggugaugaugagaaacag

SEQ ID NO: 1513 - RNA, 19 nt, Artificial Sequence
  Synthetic
ggugaugaugagaaacagu

SEQ ID NO: 1514 - RNA, 19 nt, Artificial Sequence
  Synthetic
gugaugaugagaaacagug

SEQ ID NO: 1515 - RNA, 19 nt, Artificial Sequence
  Synthetic
ugaugaugagaaacagugg

SEQ ID NO: 1516 - RNA, 19 nt, Artificial Sequence
  Synthetic
gaugaugagaaacaguggu

SEQ ID NO: 1517 - RNA, 19 nt, Artificial Sequence
  Synthetic
augaugagaaacaguggug

SEQ ID NO: 1518 - RNA, 19 nt, Artificial Sequence
  Synthetic
ugaugagaaacaguggugg

SEQ ID NO: 1519 - RNA, 19 nt, Artificial Sequence
  Synthetic
gaugagaaacaguggugga

SEQ ID NO: 1520 - RNA, 19 nt, Artificial Sequence
  Synthetic
augagaaacagugguggac

SEQ ID NO: 1521 - RNA, 19 nt, Artificial Sequence
  Synthetic
ugagaaacagugguggaca

SEQ ID NO: 1522 - RNA, 19 nt, Artificial Sequence
  Synthetic
gagaaacagugguggacau

SEQ ID NO: 1523 - RNA, 19 nt, Artificial Sequence
  Synthetic
agaaacagugguggacauu

SEQ ID NO: 1524 - RNA, 19 nt, Artificial Sequence
  Synthetic
gaaacagugguggacauuu

SEQ ID NO: 1525 - RNA, 19 nt, Artificial Sequence
  Synthetic
aaacagugguggacauuuc

SEQ ID NO: 1526 - RNA, 19 nt, Artificial Sequence
  Synthetic
aacagugguggacauuucc

SEQ ID NO: 1527 - RNA, 19 nt, Artificial Sequence
  Synthetic
acagugguggacauuuccu

SEQ ID NO: 1528 - RNA, 19 nt, Artificial Sequence
  Synthetic
cagugguggacauuuccug

SEQ ID NO: 1529 - RNA, 19 nt, Artificial Sequence
  Synthetic
agugguggacauuuccuga

SEQ ID NO: 1530 - RNA, 19 nt, Artificial Sequence
  Synthetic
gugguggacauuuccugag

SEQ ID NO: 1531 - RNA, 19 nt, Artificial Sequence
  Synthetic
ugguggacauuuccugagg

SEQ ID NO: 1532 - RNA, 19 nt, Artificial Sequence
  Synthetic
gguggacauuuccugagga

SEQ ID NO: 1533 - RNA, 19 nt, Artificial Sequence
  Synthetic
guggacauuuccugaggaa

SEQ ID NO: 1534 - RNA, 19 nt, Artificial Sequence
  Synthetic
uggacauuuccugaggaag

SEQ ID NO: 1535 - RNA, 19 nt, Artificial Sequence
  Synthetic
ggacauuuccugaggaaga

SEQ ID NO: 1536 - RNA, 19 nt, Artificial Sequence
  Synthetic
gacauuuccugaggaagag

SEQ ID NO: 1537 - RNA, 19 nt, Artificial Sequence
  Synthetic
acauuuccugaggaagagg

SEQ ID NO: 1538 - RNA, 19 nt, Artificial Sequence
  Synthetic
cauuuccugaggaagaggu

SEQ ID NO: 1539 - RNA, 19 nt, Artificial Sequence
  Synthetic
auuuccugaggaagaggug

SEQ ID NO: 1540 - RNA, 19 nt, Artificial Sequence
  Synthetic
uuuccugaggaagaggugc

SEQ ID NO: 1541 - RNA, 19 nt, Artificial Sequence
  Synthetic
uuccugaggaagaggugcu

SEQ ID NO: 1542 - RNA, 19 nt, Artificial Sequence
  Synthetic
uccugaggaagaggugcua

SEQ ID NO: 1543 - RNA, 19 nt, Artificial Sequence
  Synthetic
ccugaggaagaggugcuac

SEQ ID NO: 1544 - RNA, 19 nt, Artificial Sequence
  Synthetic
cugaggaagaggugcuaca

SEQ ID NO: 1545 - RNA, 19 nt, Artificial Sequence
  Synthetic
ugaggaagaggugcuacag

SEQ ID NO: 1546 - RNA, 19 nt, Artificial Sequence
  Synthetic
gaggaagaggugcuacagu

SEQ ID NO: 1547 - RNA, 19 nt, Artificial Sequence
  Synthetic
aggaagaggugcuacaguu

SEQ ID NO: 1548 - RNA, 19 nt, Artificial Sequence
  Synthetic
ggaagaggugcuacaguuc

SEQ ID NO: 1549 - RNA, 19 nt, Artificial Sequence
  Synthetic
gaagaggugcuacaguucu

SEQ ID NO: 1550 - RNA, 19 nt, Artificial Sequence
  Synthetic
aagaggugcuacaguucug

SEQ ID NO: 1551 - RNA, 19 nt, Artificial Sequence
  Synthetic
agaggugcuacaguucugc

SEQ ID NO: 1552 - RNA, 19 nt, Artificial Sequence
  Synthetic
gaggugcuacaguucugcc

SEQ ID NO: 1553 - RNA, 19 nt, Artificial Sequence
  Synthetic
aggugcuacaguucugcca

SEQ ID NO: 1554 - RNA, 19 nt, Artificial Sequence
  Synthetic
ggugcuacaguucugccag

SEQ ID NO: 1555 - RNA, 19 nt, Artificial Sequence
  Synthetic
gugcuacaguucugccaga

SEQ ID NO: 1556 - RNA, 19 nt, Artificial Sequence
  Synthetic
ugcuacaguucugccagag

SEQ ID NO: 1557 - RNA, 19 nt, Artificial Sequence
  Synthetic
gcuacaguucugccagaga

SEQ ID NO: 1558 - RNA, 19 nt, Artificial Sequence
  Synthetic
cuacaguucugccagagau

SEQ ID NO: 1559 - RNA, 19 nt, Artificial Sequence
  Synthetic
uacaguucugccagagauc

SEQ ID NO: 1560 - RNA, 19 nt, Artificial Sequence
  Synthetic
acaguucugccagagauca

SEQ ID NO: 1561 - RNA, 19 nt, Artificial Sequence
  Synthetic
caguucugccagagaucag

SEQ ID NO: 1562 - RNA, 19 nt, Artificial Sequence
  Synthetic
aguucugccagagaucagu

SEQ ID NO: 1563 - RNA, 19 nt, Artificial Sequence
  Synthetic
guucugccagagaucaguu

SEQ ID NO: 1564 - RNA, 19 nt, Artificial Sequence
  Synthetic
uucugccagagaucaguug

SEQ ID NO: 1565 - RNA, 19 nt, Artificial Sequence
  Synthetic
ucugccagagaucaguugc

SEQ ID NO: 1566 - RNA, 19 nt, Artificial Sequence
  Synthetic
cugccagagaucaguugcg

SEQ ID NO: 1567 - RNA, 19 nt, Artificial Sequence
  Synthetic
ugccagagaucaguugcgu

SEQ ID NO: 1568 - RNA, 19 nt, Artificial Sequence
  Synthetic
gccagagaucaguugcgug

SEQ ID NO: 1569 - RNA, 19 nt, Artificial Sequence
  Synthetic
ccagagaucaguugcgugu

SEQ ID NO: 1570 - RNA, 19 nt, Artificial Sequence
  Synthetic
cagagaucaguugcguguc

SEQ ID NO: 1571 - RNA, 19 nt, Artificial Sequence
  Synthetic
agagaucaguugcgugucc

SEQ ID NO: 1572 - RNA, 19 nt, Artificial Sequence
  Synthetic
gagaucaguugcgugucca

SEQ ID NO: 1573 - RNA, 19 nt, Artificial Sequence
  Synthetic
agaucaguugcguguccau

SEQ ID NO: 1574 - RNA, 19 nt, Artificial Sequence
  Synthetic
gaucaguugcguguccauu

SEQ ID NO: 1575 - RNA, 19 nt, Artificial Sequence
  Synthetic
aucaguugcguguccauug

SEQ ID NO: 1576 - RNA, 19 nt, Artificial Sequence
  Synthetic
ucaguugcguguccauugc

SEQ ID NO: 1577 - RNA, 19 nt, Artificial Sequence
  Synthetic
caguugcguguccauugcc

SEQ ID NO: 1578 - RNA, 19 nt, Artificial Sequence
  Synthetic
aguugcguguccauugccc

SEQ ID NO: 1579 - RNA, 19 nt, Artificial Sequence
  Synthetic
guugcguguccauugccca

SEQ ID NO: 1580 - RNA, 19 nt, Artificial Sequence
  Synthetic
uugcguguccauugcccac

SEQ ID NO: 1581 - RNA, 19 nt, Artificial Sequence
  Synthetic
ugcguguccauugcccacg

SEQ ID NO: 1582 - RNA, 19 nt, Artificial Sequence
  Synthetic
gcguguccauugcccacga

SEQ ID NO: 1583 - RNA, 19 nt, Artificial Sequence
  Synthetic
cguguccauugcccacgau

SEQ ID NO: 1584 - RNA, 19 nt, Artificial Sequence
  Synthetic
guguccauugcccacgauc

SEQ ID NO: 1585 - RNA, 19 nt, Artificial Sequence
  Synthetic
uguccauugcccacgaucc

SEQ ID NO: 1586 - RNA, 19 nt, Artificial Sequence
  Synthetic
guccauugcccacgaucca

SEQ ID NO: 1587 - RNA, 19 nt, Artificial Sequence
  Synthetic
uccauugcccacgauccau

SEQ ID NO: 1588 - RNA, 19 nt, Artificial Sequence
  Synthetic
ccauugcccacgauccauu

SEQ ID NO: 1589 - RNA, 19 nt, Artificial Sequence
  Synthetic
cauugcccacgauccauug

SEQ ID NO: 1590 - RNA, 19 nt, Artificial Sequence
  Synthetic
auugcccacgauccauugg

SEQ ID NO: 1591 - RNA, 19 nt, Artificial Sequence
  Synthetic
uugcccacgauccauuggc

SEQ ID NO: 1592 - RNA, 19 nt, Artificial Sequence
  Synthetic
ugcccacgauccauuggcu

SEQ ID NO: 1593 - RNA, 19 nt, Artificial Sequence
  Synthetic
gcccacgauccauuggcug

SEQ ID NO: 1594 - RNA, 19 nt, Artificial Sequence
  Synthetic
cccacgauccauuggcuga

SEQ ID NO: 1595 - RNA, 19 nt, Artificial Sequence
  Synthetic
ccacgauccauuggcugac

SEQ ID NO: 1596 - RNA, 19 nt, Artificial Sequence
  Synthetic
cacgauccauuggcugacg

SEQ ID NO: 1597 - RNA, 19 nt, Artificial Sequence
  Synthetic
acgauccauuggcugacga

SEQ ID NO: 1598 - RNA, 19 nt, Artificial Sequence
  Synthetic
cgauccauuggcugacgau

SEQ ID NO: 1599 - RNA, 19 nt, Artificial Sequence
  Synthetic
gauccauuggcugacgauc

SEQ ID NO: 1600 - RNA, 19 nt, Artificial Sequence
  Synthetic
auccauuggcugacgaucg

SEQ ID NO: 1601 - RNA, 19 nt, Artificial Sequence
  Synthetic
uccauuggcugacgaucgu

SEQ ID NO: 1602 - RNA, 19 nt, Artificial Sequence
  Synthetic
ccauuggcugacgaucgug

SEQ ID NO: 1603 - RNA, 19 nt, Artificial Sequence
  Synthetic
cauuggcugacgaucgugg

SEQ ID NO: 1604 - RNA, 19 nt, Artificial Sequence
  Synthetic
auuggcugacgaucgugga

SEQ ID NO: 1605 - RNA, 19 nt, Artificial Sequence
  Synthetic
uuggcugacgaucguggag

SEQ ID NO: 1606 - RNA, 19 nt, Artificial Sequence
  Synthetic
uggcugacgaucguggaga

SEQ ID NO: 1607 - RNA, 19 nt, Artificial Sequence
  Synthetic
ggcugacgaucguggagac

SEQ ID NO: 1608 - RNA, 19 nt, Artificial Sequence
  Synthetic
gcugacgaucguggagacg

SEQ ID NO: 1609 - RNA, 19 nt, Artificial Sequence
  Synthetic
cugacgaucguggagacga

SEQ ID NO: 1610 - RNA, 19 nt, Artificial Sequence
  Synthetic
ugacgaucguggagacgaa

SEQ ID NO: 1611 - RNA, 19 nt, Artificial Sequence
  Synthetic
gacgaucguggagacgaac

SEQ ID NO: 1612 - RNA, 19 nt, Artificial Sequence
  Synthetic
acgaucguggagacgaaca

SEQ ID NO: 1613 - RNA, 19 nt, Artificial Sequence
  Synthetic
cgaucguggagacgaacag

SEQ ID NO: 1614 - RNA, 19 nt, Artificial Sequence
  Synthetic
gaucguggagacgaacagc

SEQ ID NO: 1615 - RNA, 19 nt, Artificial Sequence
  Synthetic
aucguggagacgaacagca

SEQ ID NO: 1616 - RNA, 19 nt, Artificial Sequence
  Synthetic
ucguggagacgaacagcag

SEQ ID NO: 1617 - RNA, 19 nt, Artificial Sequence
  Synthetic
cguggagacgaacagcagc

SEQ ID NO: 1618 - RNA, 19 nt, Artificial Sequence
  Synthetic
guggagacgaacagcagca

SEQ ID NO: 1619 - RNA, 19 nt, Artificial Sequence
  Synthetic
uggagacgaacagcagcac

SEQ ID NO: 1620 - RNA, 19 nt, Artificial Sequence
  Synthetic
ggagacgaacagcagcacc

SEQ ID NO: 1621 - RNA, 19 nt, Artificial Sequence
  Synthetic
gagacgaacagcagcacca

SEQ ID NO: 1622 - RNA, 19 nt, Artificial Sequence
  Synthetic
agacgaacagcagcaccag

SEQ ID NO: 1623 - RNA, 19 nt, Artificial Sequence
  Synthetic
gacgaacagcagcaccagc

SEQ ID NO: 1624 - RNA, 19 nt, Artificial Sequence
  Synthetic
acgaacagcagcaccagca

SEQ ID NO: 1625 - RNA, 19 nt, Artificial Sequence
  Synthetic
cgaacagcagcaccagcac

SEQ ID NO: 1626 - RNA, 19 nt, Artificial Sequence
  Synthetic
gaacagcagcaccagcacc

SEQ ID NO: 1627 - RNA, 19 nt, Artificial Sequence
  Synthetic
aacagcagcaccagcaccg

SEQ ID NO: 1628 - RNA, 19 nt, Artificial Sequence
  Synthetic
acagcagcaccagcaccgc

SEQ ID NO: 1629 - RNA, 19 nt, Artificial Sequence
  Synthetic
cagcagcaccagcaccgcg

SEQ ID NO: 1630 - RNA, 19 nt, Artificial Sequence
  Synthetic
agcagcaccagcaccgcga

SEQ ID NO: 1631 - RNA, 19 nt, Artificial Sequence
  Synthetic
gcagcaccagcaccgcgac

SEQ ID NO: 1632 - RNA, 19 nt, Artificial Sequence
  Synthetic
cagcaccagcaccgcgacg

SEQ ID NO: 1633 - RNA, 19 nt, Artificial Sequence
  Synthetic
agcaccagcaccgcgacgu

SEQ ID NO: 1634 - RNA, 19 nt, Artificial Sequence
  Synthetic
gcaccagcaccgcgacgug

SEQ ID NO: 1635 - RNA, 19 nt, Artificial Sequence
  Synthetic
caccagcaccgcgacgugg

SEQ ID NO: 1636 - RNA, 19 nt, Artificial Sequence
  Synthetic
accagcaccgcgacgugga

SEQ ID NO: 1637 - RNA, 19 nt, Artificial Sequence
  Synthetic
ccagcaccgcgacguggag

SEQ ID NO: 1638 - RNA, 19 nt, Artificial Sequence
  Synthetic
cagcaccgcgacguggagg

SEQ ID NO: 1639 - RNA, 19 nt, Artificial Sequence
  Synthetic
agcaccgcgacguggagga

SEQ ID NO: 1640 - RNA, 19 nt, Artificial Sequence
  Synthetic
gcaccgcgacguggaggac

SEQ ID NO: 1641 - RNA, 19 nt, Artificial Sequence
  Synthetic
caccgcgacguggaggacg

SEQ ID NO: 1642 - RNA, 19 nt, Artificial Sequence
  Synthetic
accgcgacguggaggacga

SEQ ID NO: 1643 - RNA, 19 nt, Artificial Sequence
  Synthetic
ccgcgacguggaggacgau

SEQ ID NO: 1644 - RNA, 19 nt, Artificial Sequence
  Synthetic
cgcgacguggaggacgaug

SEQ ID NO: 1645 - RNA, 19 nt, Artificial Sequence
  Synthetic
gcgacguggaggacgauga

SEQ ID NO: 1646 - RNA, 19 nt, Artificial Sequence
  Synthetic
cgacguggaggacgaugau

SEQ ID NO: 1647 - RNA, 19 nt, Artificial Sequence
  Synthetic
gacguggaggacgaugaua

SEQ ID NO: 1648 - RNA, 19 nt, Artificial Sequence
  Synthetic
acguggaggacgaugauac

SEQ ID NO: 1649 - RNA, 19 nt, Artificial Sequence
  Synthetic
cguggaggacgaugauacu

SEQ ID NO: 1650 - RNA, 19 nt, Artificial Sequence
  Synthetic
guggaggacgaugauacuc

SEQ ID NO: 1651 - RNA, 19 nt, Artificial Sequence
  Synthetic
uggaggacgaugauacuca

SEQ ID NO: 1652 - RNA, 19 nt, Artificial Sequence
  Synthetic
ggaggacgaugauacucag

SEQ ID NO: 1653 - RNA, 19 nt, Artificial Sequence
  Synthetic
gaggacgaugauacucagc

SEQ ID NO: 1654 - RNA, 19 nt, Artificial Sequence
  Synthetic
aggacgaugauacucagca

SEQ ID NO: 1655 - RNA, 19 nt, Artificial Sequence
  Synthetic
ggacgaugauacucagcaa

SEQ ID NO: 1656 - RNA, 19 nt, Artificial Sequence
  Synthetic
gacgaugauacucagcaac

SEQ ID NO: 1657 - RNA, 19 nt, Artificial Sequence
  Synthetic
acgaugauacucagcaaca

SEQ ID NO: 1658 - RNA, 19 nt, Artificial Sequence
  Synthetic
cgaugauacucagcaacag

SEQ ID NO: 1659 - RNA, 19 nt, Artificial Sequence
  Synthetic
gaugauacucagcaacagg

SEQ ID NO: 1660 - RNA, 19 nt, Artificial Sequence
  Synthetic
augauacucagcaacagga

SEQ ID NO: 1661 - RNA, 19 nt, Artificial Sequence
  Synthetic
ugauacucagcaacaggag

SEQ ID NO: 1662 - RNA, 19 nt, Artificial Sequence
  Synthetic
gauacucagcaacaggagg

SEQ ID NO: 1663 - RNA, 19 nt, Artificial Sequence
  Synthetic
auacucagcaacaggagga

SEQ ID NO: 1664 - RNA, 19 nt, Artificial Sequence
  Synthetic
uacucagcaacaggaggag

SEQ ID NO: 1665 - RNA, 19 nt, Artificial Sequence
  Synthetic
acucagcaacaggaggagc

SEQ ID NO: 1666 - RNA, 19 nt, Artificial Sequence
  Synthetic
cucagcaacaggaggagca

SEQ ID NO: 1667 - RNA, 19 nt, Artificial Sequence
  Synthetic
ucagcaacaggaggagcau

SEQ ID NO: 1668 - RNA, 19 nt, Artificial Sequence
  Synthetic
cagcaacaggaggagcauu

SEQ ID NO: 1669 - RNA, 19 nt, Artificial Sequence
  Synthetic
agcaacaggaggagcauuc

SEQ ID NO: 1670 - RNA, 19 nt, Artificial Sequence
  Synthetic
gcaacaggaggagcauucu

SEQ ID NO: 1671 - RNA, 19 nt, Artificial Sequence
  Synthetic
caacaggaggagcauucug

SEQ ID NO: 1672 - RNA, 19 nt, Artificial Sequence
  Synthetic
aacaggaggagcauucugg

SEQ ID NO: 1673 - RNA, 19 nt, Artificial Sequence
  Synthetic
acaggaggagcauucuggc

SEQ ID NO: 1674 - RNA, 19 nt, Artificial Sequence
  Synthetic
caggaggagcauucuggcg

SEQ ID NO: 1675 - RNA, 19 nt, Artificial Sequence
  Synthetic
aggaggagcauucuggcgg

SEQ ID NO: 1676 - RNA, 19 nt, Artificial Sequence
  Synthetic
ggaggagcauucuggcggc

SEQ ID NO: 1677 - RNA, 19 nt, Artificial Sequence
  Synthetic
gaggagcauucuggcggca

SEQ ID NO: 1678 - RNA, 19 nt, Artificial Sequence
  Synthetic
aggagcauucuggcggcaa

SEQ ID NO: 1679 - RNA, 19 nt, Artificial Sequence
  Synthetic
ggagcauucuggcggcaag

SEQ ID NO: 1680 - RNA, 19 nt, Artificial Sequence
  Synthetic
gagcauucuggcggcaagu

SEQ ID NO: 1681 - RNA, 19 nt, Artificial Sequence
  Synthetic
agcauucuggcggcaaguu

SEQ ID NO: 1682 - RNA, 19 nt, Artificial Sequence
  Synthetic
gcauucuggcggcaaguuc

SEQ ID NO: 1683 - RNA, 19 nt, Artificial Sequence
  Synthetic
cauucuggcggcaaguucu

SEQ ID NO: 1684 - RNA, 19 nt, Artificial Sequence
  Synthetic
auucuggcggcaaguucug

SEQ ID NO: 1685 - RNA, 19 nt, Artificial Sequence
  Synthetic
uucuggcggcaaguucugc

SEQ ID NO: 1686 - RNA, 19 nt, Artificial Sequence
  Synthetic
ucuggcggcaaguucugcu

SEQ ID NO: 1687 - RNA, 19 nt, Artificial Sequence
  Synthetic
cuggcggcaaguucugcuc

SEQ ID NO: 1688 - RNA, 19 nt, Artificial Sequence
  Synthetic
uggcggcaaguucugcuca

SEQ ID NO: 1689 - RNA, 19 nt, Artificial Sequence
  Synthetic
ggcggcaaguucugcucag

SEQ ID NO: 1690 - RNA, 19 nt, Artificial Sequence
  Synthetic
gcggcaaguucugcucagc

SEQ ID NO: 1691 - RNA, 19 nt, Artificial Sequence
  Synthetic
cggcaaguucugcucagcg

SEQ ID NO: 1692 - RNA, 19 nt, Artificial Sequence
  Synthetic
ggcaaguucugcucagcgg

SEQ ID NO: 1693 - RNA, 19 nt, Artificial Sequence
  Synthetic
gcaaguucugcucagcgga

SEQ ID NO: 1694 - RNA, 19 nt, Artificial Sequence
  Synthetic
caaguucugcucagcggag

SEQ ID NO: 1695 - RNA, 19 nt, Artificial Sequence
  Synthetic
aaguucugcucagcggagu

SEQ ID NO: 1696 - RNA, 19 nt, Artificial Sequence
  Synthetic
aguucugcucagcggaguu

SEQ ID NO: 1697 - RNA, 19 nt, Artificial Sequence
  Synthetic
guucugcucagcggaguuu

SEQ ID NO: 1698 - RNA, 19 nt, Artificial Sequence
  Synthetic
uucugcucagcggaguuuc

SEQ ID NO: 1699 - RNA, 19 nt, Artificial Sequence
  Synthetic
ucugcucagcggaguuucu

SEQ ID NO: 1700 - RNA, 19 nt, Artificial Sequence
  Synthetic
cugcucagcggaguuucug

SEQ ID NO: 1701 - RNA, 19 nt, Artificial Sequence
  Synthetic
ugcucagcggaguuucugc

SEQ ID NO: 1702 - RNA, 19 nt, Artificial Sequence
  Synthetic
gcucagcggaguuucugca

SEQ ID NO: 1703 - RNA, 19 nt, Artificial Sequence
  Synthetic
cucagcggaguuucugcag

SEQ ID NO: 1704 - RNA, 19 nt, Artificial Sequence
  Synthetic
ucagcggaguuucugcagc

SEQ ID NO: 1705 - RNA, 19 nt, Artificial Sequence
  Synthetic
cagcggaguuucugcagcc

SEQ ID NO: 1706 - RNA, 19 nt, Artificial Sequence
  Synthetic
agcggaguuucugcagccc

SEQ ID NO: 1707 - RNA, 19 nt, Artificial Sequence
  Synthetic
gcggaguuucugcagccca

SEQ ID NO: 1708 - RNA, 19 nt, Artificial Sequence
  Synthetic
cggaguuucugcagcccaa

SEQ ID NO: 1709 - RNA, 19 nt, Artificial Sequence
  Synthetic
ggaguuucugcagcccaaa

SEQ ID NO: 1710 - RNA, 19 nt, Artificial Sequence
  Synthetic
gaguuucugcagcccaaag

SEQ ID NO: 1711 - RNA, 19 nt, Artificial Sequence
  Synthetic
aguuucugcagcccaaagg

SEQ ID NO: 1712 - RNA, 19 nt, Artificial Sequence
  Synthetic
guuucugcagcccaaagga

SEQ ID NO: 1713 - RNA, 19 nt, Artificial Sequence
  Synthetic
uuucugcagcccaaaggaa

SEQ ID NO: 1714 - RNA, 19 nt, Artificial Sequence
  Synthetic
uucugcagcccaaaggaac

SEQ ID NO: 1715 - RNA, 19 nt, Artificial Sequence
  Synthetic
ucugcagcccaaaggaaca

SEQ ID NO: 1716 - RNA, 19 nt, Artificial Sequence
  Synthetic
cugcagcccaaaggaacag

SEQ ID NO: 1717 - RNA, 19 nt, Artificial Sequence
  Synthetic
ugcagcccaaaggaacagc

SEQ ID NO: 1718 - RNA, 19 nt, Artificial Sequence
  Synthetic
gcagcccaaaggaacagcu

SEQ ID NO: 1719 - RNA, 19 nt, Artificial Sequence
  Synthetic
cagcccaaaggaacagcug

SEQ ID NO: 1720 - RNA, 19 nt, Artificial Sequence
  Synthetic
agcccaaaggaacagcugu

SEQ ID NO: 1721 - RNA, 19 nt, Artificial Sequence
  Synthetic
gcccaaaggaacagcuguc

SEQ ID NO: 1722 - RNA, 19 nt, Artificial Sequence
  Synthetic
cccaaaggaacagcugucc

SEQ ID NO: 1723 - RNA, 19 nt, Artificial Sequence
  Synthetic
ccaaaggaacagcuguccc

SEQ ID NO: 1724 - RNA, 19 nt, Artificial Sequence
  Synthetic
caaaggaacagcugucccg

SEQ ID NO: 1725 - RNA, 19 nt, Artificial Sequence
  Synthetic
aaaggaacagcugucccga

SEQ ID NO: 1726 - RNA, 19 nt, Artificial Sequence
  Synthetic
aaggaacagcugucccgau

SEQ ID NO: 1727 - RNA, 19 nt, Artificial Sequence
  Synthetic
aggaacagcugucccgauc

SEQ ID NO: 1728 - RNA, 19 nt, Artificial Sequence
  Synthetic
ggaacagcugucccgaucc

SEQ ID NO: 1729 - RNA, 19 nt, Artificial Sequence
  Synthetic
gaacagcugucccgauccu

SEQ ID NO: 1730 - RNA, 19 nt, Artificial Sequence
  Synthetic
aacagcugucccgauccuc

SEQ ID NO: 1731 - RNA, 19 nt, Artificial Sequence
  Synthetic
acagcugucccgauccuca

SEQ ID NO: 1732 - RNA, 19 nt, Artificial Sequence
  Synthetic
cagcugucccgauccucag

SEQ ID NO: 1733 - RNA, 19 nt, Artificial Sequence
  Synthetic
agcugucccgauccucagg

SEQ ID NO: 1734 - RNA, 19 nt, Artificial Sequence
  Synthetic
gcugucccgauccucaggg

SEQ ID NO: 1735 - RNA, 19 nt, Artificial Sequence
  Synthetic
cugucccgauccucagggu

SEQ ID NO: 1736 - RNA, 19 nt, Artificial Sequence
  Synthetic
ugucccgauccucagggug

SEQ ID NO: 1737 - RNA, 19 nt, Artificial Sequence
  Synthetic
gucccgauccucagggugg

SEQ ID NO: 1738 - RNA, 19 nt, Artificial Sequence
  Synthetic
ucccgauccucaggguggc

SEQ ID NO: 1739 - RNA, 19 nt, Artificial Sequence
  Synthetic
cccgauccucaggguggcc

SEQ ID NO: 1740 - RNA, 19 nt, Artificial Sequence
  Synthetic
ccgauccucaggguggccu

SEQ ID NO: 1741 - RNA, 19 nt, Artificial Sequence
  Synthetic
cgauccucaggguggccuc

SEQ ID NO: 1742 - RNA, 19 nt, Artificial Sequence
  Synthetic
gauccucaggguggccuca

SEQ ID NO: 1743 - RNA, 19 nt, Artificial Sequence
  Synthetic
auccucaggguggccucaa

SEQ ID NO: 1744 - RNA, 19 nt, Artificial Sequence
  Synthetic
uccucaggguggccucaaa

SEQ ID NO: 1745 - RNA, 19 nt, Artificial Sequence
  Synthetic
ccucaggguggccucaaac

SEQ ID NO: 1746 - RNA, 19 nt, Artificial Sequence
  Synthetic
cucaggguggccucaaaca

SEQ ID NO: 1747 - RNA, 19 nt, Artificial Sequence
  Synthetic
ucaggguggccucaaacac

SEQ ID NO: 1748 - RNA, 19 nt, Artificial Sequence
  Synthetic
caggguggccucaaacaca

SEQ ID NO: 1749 - RNA, 19 nt, Artificial Sequence
  Synthetic
aggguggccucaaacacaa

SEQ ID NO: 1750 - RNA, 19 nt, Artificial Sequence
  Synthetic
ggguggccucaaacacaaa

SEQ ID NO: 1751 - RNA, 19 nt, Artificial Sequence
  Synthetic
gguggccucaaacacaaac

SEQ ID NO: 1752 - RNA, 19 nt, Artificial Sequence
  Synthetic
guggccucaaacacaaacu

SEQ ID NO: 1753 - RNA, 19 nt, Artificial Sequence
  Synthetic
uggccucaaacacaaacuc

SEQ ID NO: 1754 - RNA, 19 nt, Artificial Sequence
  Synthetic
ggccucaaacacaaacucg

SEQ ID NO: 1755 - RNA, 19 nt, Artificial Sequence
  Synthetic
gccucaaacacaaacucgg

SEQ ID NO: 1756 - RNA, 19 nt, Artificial Sequence
  Synthetic
ccucaaacacaaacucggg

SEQ ID NO: 1757 - RNA, 19 nt, Artificial Sequence
  Synthetic
cucaaacacaaacucgggu

SEQ ID NO: 1758 - RNA, 19 nt, Artificial Sequence
  Synthetic
ucaaacacaaacucgggug

SEQ ID NO: 1759 - RNA, 19 nt, Artificial Sequence
  Synthetic
caaacacaaacucgggugc

SEQ ID NO: 1760 - RNA, 19 nt, Artificial Sequence
  Synthetic
aaacacaaacucgggugcg

SEQ ID NO: 1761 - RNA, 19 nt, Artificial Sequence
  Synthetic
aacacaaacucgggugcgu

SEQ ID NO: 1762 - RNA, 19 nt, Artificial Sequence
  Synthetic
acacaaacucgggugcguu

SEQ ID NO: 1763 - RNA, 19 nt, Artificial Sequence
  Synthetic
cacaaacucgggugcguug

SEQ ID NO: 1764 - RNA, 19 nt, Artificial Sequence
  Synthetic
acaaacucgggugcguugg

SEQ ID NO: 1765 - RNA, 19 nt, Artificial Sequence
  Synthetic
caaacucgggugcguuggc

SEQ ID NO: 1766 - RNA, 19 nt, Artificial Sequence
  Synthetic
aaacucgggugcguuggcu

SEQ ID NO: 1767 - RNA, 19 nt, Artificial Sequence
  Synthetic
aacucgggugcguuggcuc

SEQ ID NO: 1768 - RNA, 19 nt, Artificial Sequence
  Synthetic
acucgggugcguuggcucc

SEQ ID NO: 1769 - RNA, 19 nt, Artificial Sequence
  Synthetic
cucgggugcguuggcuccg

SEQ ID NO: 1770 - RNA, 19 nt, Artificial Sequence
  Synthetic
ucgggugcguuggcuccgc

SEQ ID NO: 1771 - RNA, 19 nt, Artificial Sequence
  Synthetic
cgggugcguuggcuccgcu

SEQ ID NO: 1772 - RNA, 19 nt, Artificial Sequence
  Synthetic
gggugcguuggcuccgcug

SEQ ID NO: 1773 - RNA, 19 nt, Artificial Sequence
  Synthetic
ggugcguuggcuccgcugc

SEQ ID NO: 1774 - RNA, 19 nt, Artificial Sequence
  Synthetic
gugcguuggcuccgcugcu

SEQ ID NO: 1775 - RNA, 19 nt, Artificial Sequence
  Synthetic
ugcguuggcuccgcugcug

SEQ ID NO: 1776 - RNA, 19 nt, Artificial Sequence
  Synthetic
gcguuggcuccgcugcugg

SEQ ID NO: 1777 - RNA, 19 nt, Artificial Sequence
  Synthetic
cguuggcuccgcugcuggc

SEQ ID NO: 1778 - RNA, 19 nt, Artificial Sequence
  Synthetic
guuggcuccgcugcuggcg

SEQ ID NO: 1779 - RNA, 19 nt, Artificial Sequence
  Synthetic
uuggcuccgcugcuggcgc

SEQ ID NO: 1780 - RNA, 19 nt, Artificial Sequence
  Synthetic
uggcuccgcugcuggcgcc

SEQ ID NO: 1781 - RNA, 19 nt, Artificial Sequence
  Synthetic
ggcuccgcugcuggcgccg

SEQ ID NO: 1782 - RNA, 19 nt, Artificial Sequence
  Synthetic
gcuccgcugcuggcgccgc

SEQ ID NO: 1783 - RNA, 19 nt, Artificial Sequence
  Synthetic
cuccgcugcuggcgccgcc

SEQ ID NO: 1784 - RNA, 19 nt, Artificial Sequence
  Synthetic
uccgcugcuggcgccgcca

SEQ ID NO: 1785 - RNA, 19 nt, Artificial Sequence
  Synthetic
ccgcugcuggcgccgccaa

SEQ ID NO: 1786 - RNA, 19 nt, Artificial Sequence
  Synthetic
cgcugcuggcgccgccaaa

SEQ ID NO: 1787 - RNA, 19 nt, Artificial Sequence
  Synthetic
gcugcuggcgccgccaaag

SEQ ID NO: 1788 - RNA, 19 nt, Artificial Sequence
  Synthetic
cugcuggcgccgccaaagc

SEQ ID NO: 1789 - RNA, 19 nt, Artificial Sequence
  Synthetic
ugcuggcgccgccaaagcu

SEQ ID NO: 1790 - RNA, 19 nt, Artificial Sequence
  Synthetic
gcuggcgccgccaaagcug

SEQ ID NO: 1791 - RNA, 19 nt, Artificial Sequence
  Synthetic
cuggcgccgccaaagcugc

SEQ ID NO: 1792 - RNA, 19 nt, Artificial Sequence
  Synthetic
uggcgccgccaaagcugcg

SEQ ID NO: 1793 - RNA, 19 nt, Artificial Sequence
  Synthetic
ggcgccgccaaagcugcgc

SEQ ID NO: 1794 - RNA, 19 nt, Artificial Sequence
  Synthetic
gcgccgccaaagcugcgcu

SEQ ID NO: 1795 - RNA, 19 nt, Artificial Sequence
  Synthetic
cgccgccaaagcugcgcug

SEQ ID NO: 1796 - RNA, 19 nt, Artificial Sequence
  Synthetic
gccgccaaagcugcgcugc

SEQ ID NO: 1797 - RNA, 19 nt, Artificial Sequence
  Synthetic
ccgccaaagcugcgcugcg

SEQ ID NO: 1798 - RNA, 19 nt, Artificial Sequence
  Synthetic
cgccaaagcugcgcugcgg

SEQ ID NO: 1799 - RNA, 19 nt, Artificial Sequence
  Synthetic
gccaaagcugcgcugcggg

SEQ ID NO: 1800 - RNA, 19 nt, Artificial Sequence
  Synthetic
ccaaagcugcgcugcgggg

SEQ ID NO: 1801 - RNA, 19 nt, Artificial Sequence
  Synthetic
caaagcugcgcugcggggc

SEQ ID NO: 1802 - RNA, 19 nt, Artificial Sequence
  Synthetic
aaagcugcgcugcggggcu

SEQ ID NO: 1803 - RNA, 19 nt, Artificial Sequence
  Synthetic
aagcugcgcugcggggcug

SEQ ID NO: 1804 - RNA, 19 nt, Artificial Sequence
  Synthetic
agcugcgcugcggggcugc

SEQ ID NO: 1805 - RNA, 19 nt, Artificial Sequence
  Synthetic
gcugcgcugcggggcugcg

SEQ ID NO: 1806 - RNA, 19 nt, Artificial Sequence
  Synthetic
cugcgcugcggggcugcgc

SEQ ID NO: 1807 - RNA, 19 nt, Artificial Sequence
  Synthetic
ugcgcugcggggcugcgcg

SEQ ID NO: 1808 - RNA, 19 nt, Artificial Sequence
  Synthetic
gcgcugcggggcugcgcgc

SEQ ID NO: 1809 - RNA, 19 nt, Artificial Sequence
  Synthetic
cgcugcggggcugcgcgcg

SEQ ID NO: 1810 - RNA, 19 nt, Artificial Sequence
  Synthetic
gcugcggggcugcgcgcgc

SEQ ID NO: 1811 - RNA, 19 nt, Artificial Sequence
  Synthetic
cugcggggcugcgcgcgcg

SEQ ID NO: 1812 - RNA, 19 nt, Artificial Sequence
  Synthetic
ugcggggcugcgcgcgcgc

SEQ ID NO: 1813 - RNA, 19 nt, Artificial Sequence
  Synthetic
gcggggcugcgcgcgcgcg

SEQ ID NO: 1814 - RNA, 19 nt, Artificial Sequence
  Synthetic
cggggcugcgcgcgcgcga

SEQ ID NO: 1815 - RNA, 19 nt, Artificial Sequence
  Synthetic
ggggcugcgcgcgcgcgaa

SEQ ID NO: 1816 - RNA, 19 nt, Artificial Sequence
  Synthetic
gggcugcgcgcgcgcgaag

SEQ ID NO: 1817 - RNA, 19 nt, Artificial Sequence
  Synthetic
ggcugcgcgcgcgcgaagc

SEQ ID NO: 1818 - RNA, 19 nt, Artificial Sequence
  Synthetic
gcugcgcgcgcgcgaagca

SEQ ID NO: 1819 - RNA, 19 nt, Artificial Sequence
  Synthetic
cugcgcgcgcgcgaagcaa

SEQ ID NO: 1820 - RNA, 19 nt, Artificial Sequence
  Synthetic
ugcgcgcgcgcgaagcaag

SEQ ID NO: 1821 - RNA, 19 nt, Artificial Sequence
  Synthetic
gcgcgcgcgcgaagcaagg

SEQ ID NO: 1822 - RNA, 19 nt, Artificial Sequence
  Synthetic
cgcgcgcgcgaagcaaggg

SEQ ID NO: 1823 - RNA, 19 nt, Artificial Sequence
  Synthetic
gcgcgcgcgaagcaagggg

SEQ ID NO: 1824 - RNA, 19 nt, Artificial Sequence
  Synthetic
cgcgcgcgaagcaaggggg

SEQ ID NO: 1825 - RNA, 19 nt, Artificial Sequence
  Synthetic
gcgcgcgaagcaagggggc

SEQ ID NO: 1826 - RNA, 19 nt, Artificial Sequence
  Synthetic
cgcgcgaagcaagggggca

SEQ ID NO: 1827 - RNA, 19 nt, Artificial Sequence
  Synthetic
gcgcgaagcaagggggcag

SEQ ID NO: 1828 - RNA, 19 nt, Artificial Sequence
  Synthetic
cgcgaagcaagggggcagu

SEQ ID NO: 1829 - RNA, 19 nt, Artificial Sequence
  Synthetic
gcgaagcaagggggcagug

SEQ ID NO: 1830 - RNA, 19 nt, Artificial Sequence
  Synthetic
cgaagcaagggggcagugg

SEQ ID NO: 1831 - RNA, 19 nt, Artificial Sequence
  Synthetic
gaagcaagggggcaguggg

SEQ ID NO: 1832 - RNA, 19 nt, Artificial Sequence
  Synthetic
aagcaagggggcaguggga

SEQ ID NO: 1833 - RNA, 19 nt, Artificial Sequence
  Synthetic
agcaagggggcagugggag

SEQ ID NO: 1834 - RNA, 19 nt, Artificial Sequence
  Synthetic
gcaagggggcagugggagg

SEQ ID NO: 1835 - RNA, 19 nt, Artificial Sequence
  Synthetic
caagggggcagugggaggc

SEQ ID NO: 1836 - RNA, 19 nt, Artificial Sequence
  Synthetic
aagggggcagugggaggcu

SEQ ID NO: 1837 - RNA, 19 nt, Artificial Sequence
  Synthetic
agggggcagugggaggcuc

SEQ ID NO: 1838 - RNA, 19 nt, Artificial Sequence
  Synthetic
gggggcagugggaggcucc

SEQ ID NO: 1839 - RNA, 19 nt, Artificial Sequence
  Synthetic
ggggcagugggaggcuccu

SEQ ID NO: 1840 - RNA, 19 nt, Artificial Sequence
  Synthetic
gggcagugggaggcuccug

SEQ ID NO: 1841 - RNA, 19 nt, Artificial Sequence
  Synthetic
ggcagugggaggcuccugg

SEQ ID NO: 1842 - RNA, 19 nt, Artificial Sequence
  Synthetic
gcagugggaggcuccuggc

SEQ ID NO: 1843 - RNA, 19 nt, Artificial Sequence
  Synthetic
cagugggaggcuccuggcg

SEQ ID NO: 1844 - RNA, 19 nt, Artificial Sequence
  Synthetic
agugggaggcuccuggcgu

SEQ ID NO: 1845 - RNA, 19 nt, Artificial Sequence
  Synthetic
gugggaggcuccuggcguu

SEQ ID NO: 1846 - RNA, 19 nt, Artificial Sequence
  Synthetic
ugggaggcuccuggcguuc

SEQ ID NO: 1847 - RNA, 19 nt, Artificial Sequence
  Synthetic
gggaggcuccuggcguucc

SEQ ID NO: 1848 - RNA, 19 nt, Artificial Sequence
  Synthetic
ggaggcuccuggcguuccc

SEQ ID NO: 1849 - RNA, 19 nt, Artificial Sequence
  Synthetic
gaggcuccuggcguucccc

SEQ ID NO: 1850 - RNA, 19 nt, Artificial Sequence
  Synthetic
aggcuccuggcguuccccu

SEQ ID NO: 1851 - RNA, 19 nt, Artificial Sequence
  Synthetic
ggcuccuggcguuccccuu

SEQ ID NO: 1852 - RNA, 19 nt, Artificial Sequence
  Synthetic
gcuccuggcguuccccuuu

SEQ ID NO: 1853 - RNA, 19 nt, Artificial Sequence
  Synthetic
cuccuggcguuccccuuua

SEQ ID NO: 1854 - RNA, 19 nt, Artificial Sequence
  Synthetic
uccuggcguuccccuuuaa

SEQ ID NO: 1855 - RNA, 19 nt, Artificial Sequence
  Synthetic
ccuggcguuccccuuuaac

SEQ ID NO: 1856 - RNA, 19 nt, Artificial Sequence
  Synthetic
cuggcguuccccuuuaacg

SEQ ID NO: 1857 - RNA, 19 nt, Artificial Sequence
  Synthetic
uggcguuccccuuuaacgg

SEQ ID NO: 1858 - RNA, 19 nt, Artificial Sequence
  Synthetic
ggcguuccccuuuaacggg

SEQ ID NO: 1859 - RNA, 19 nt, Artificial Sequence
  Synthetic
gcguuccccuuuaacggga

SEQ ID NO: 1860 - RNA, 19 nt, Artificial Sequence
  Synthetic
cguuccccuuuaacgggaa

SEQ ID NO: 1861 - RNA, 19 nt, Artificial Sequence
  Synthetic
guuccccuuuaacgggaac

SEQ ID NO: 1862 - RNA, 19 nt, Artificial Sequence
  Synthetic
uuccccuuuaacgggaaca

SEQ ID NO: 1863 - RNA, 19 nt, Artificial Sequence
  Synthetic
uccccuuuaacgggaacaa

SEQ ID NO: 1864 - RNA, 19 nt, Artificial Sequence
  Synthetic
ccccuuuaacgggaacaac

SEQ ID NO: 1865 - RNA, 19 nt, Artificial Sequence
  Synthetic
cccuuuaacgggaacaacg

SEQ ID NO: 1866 - RNA, 19 nt, Artificial Sequence
  Synthetic
ccuuuaacgggaacaacgc

SEQ ID NO: 1867 - RNA, 19 nt, Artificial Sequence
  Synthetic
cuuuaacgggaacaacgcc

SEQ ID NO: 1868 - RNA, 19 nt, Artificial Sequence
  Synthetic
uuuaacgggaacaacgccc

SEQ ID NO: 1869 - RNA, 19 nt, Artificial Sequence
  Synthetic
uuaacgggaacaacgcccu

SEQ ID NO: 1870 - RNA, 19 nt, Artificial Sequence
  Synthetic
uaacgggaacaacgcccug

SEQ ID NO: 1871 - RNA, 19 nt, Artificial Sequence
  Synthetic
aacgggaacaacgcccugu

SEQ ID NO: 1872 - RNA, 19 nt, Artificial Sequence
  Synthetic
acgggaacaacgcccuguu

SEQ ID NO: 1873 - RNA, 19 nt, Artificial Sequence
  Synthetic
cgggaacaacgcccuguuu

SEQ ID NO: 1874 - RNA, 19 nt, Artificial Sequence
  Synthetic
gggaacaacgcccuguuug

SEQ ID NO: 1875 - RNA, 19 nt, Artificial Sequence
  Synthetic
ggaacaacgcccuguuugc

SEQ ID NO: 1876 - RNA, 19 nt, Artificial Sequence
  Synthetic
gaacaacgcccuguuugcg

SEQ ID NO: 1877 - RNA, 19 nt, Artificial Sequence
  Synthetic
aacaacgcccuguuugcgu

SEQ ID NO: 1878 - RNA, 19 nt, Artificial Sequence
  Synthetic
acaacgcccuguuugcguc

SEQ ID NO: 1879 - RNA, 19 nt, Artificial Sequence
  Synthetic
caacgcccuguuugcgucg

SEQ ID NO: 1880 - RNA, 19 nt, Artificial Sequence
  Synthetic
aacgcccuguuugcgucgc

SEQ ID NO: 1881 - RNA, 19 nt, Artificial Sequence
  Synthetic
acgcccuguuugcgucgcu

SEQ ID NO: 1882 - RNA, 19 nt, Artificial Sequence
  Synthetic
cgcccuguuugcgucgcug

SEQ ID NO: 1883 - RNA, 19 nt, Artificial Sequence
  Synthetic
gcccuguuugcgucgcugc

SEQ ID NO: 1884 - RNA, 19 nt, Artificial Sequence
  Synthetic
cccuguuugcgucgcugca

SEQ ID NO: 1885 - RNA, 19 nt, Artificial Sequence
  Synthetic
ccuguuugcgucgcugcag

SEQ ID NO: 1886 - RNA, 19 nt, Artificial Sequence
  Synthetic
cuguuugcgucgcugcagu

SEQ ID NO: 1887 - RNA, 19 nt, Artificial Sequence
  Synthetic
uguuugcgucgcugcagua

SEQ ID NO: 1888 - RNA, 19 nt, Artificial Sequence
  Synthetic
guuugcgucgcugcaguag

SEQ ID NO: 1889 - RNA, 19 nt, Artificial Sequence
  Synthetic
uuugcgucgcugcaguagg

SEQ ID NO: 1890 - RNA, 19 nt, Artificial Sequence
  Synthetic
uugcgucgcugcaguaggg

SEQ ID NO: 1891 - RNA, 19 nt, Artificial Sequence
  Synthetic
ugcgucgcugcaguagggu

SEQ ID NO: 1892 - RNA, 19 nt, Artificial Sequence
  Synthetic
gcgucgcugcaguagggug

SEQ ID NO: 1893 - RNA, 19 nt, Artificial Sequence
  Synthetic
cgucgcugcaguagggugu

SEQ ID NO: 1894 - RNA, 19 nt, Artificial Sequence
  Synthetic
gucgcugcaguagggugug

SEQ ID NO: 1895 - RNA, 19 nt, Artificial Sequence
  Synthetic
ucgcugcaguagggugugu

SEQ ID NO: 1896 - RNA, 19 nt, Artificial Sequence
  Synthetic
cgcugcaguaggguguguc

SEQ ID NO: 1897 - RNA, 19 nt, Artificial Sequence
  Synthetic
gcugcaguagggugugucc

SEQ ID NO: 1898 - RNA, 19 nt, Artificial Sequence
  Synthetic
cugcaguaggguguguccc

SEQ ID NO: 1899 - RNA, 19 nt, Artificial Sequence
  Synthetic
ugcaguagggugugucccu

SEQ ID NO: 1900 - RNA, 19 nt, Artificial Sequence
  Synthetic
gcaguagggugugucccug

SEQ ID NO: 1901 - RNA, 19 nt, Artificial Sequence
  Synthetic
caguagggugugucccugg

SEQ ID NO: 1902 - RNA, 19 nt, Artificial Sequence
  Synthetic
aguagggugugucccuggg

SEQ ID NO: 1903 - RNA, 19 nt, Artificial Sequence
  Synthetic
guagggugugucccugggu

SEQ ID NO: 1904 - RNA, 19 nt, Artificial Sequence
  Synthetic
uagggugugucccuggguc

SEQ ID NO: 1905 - RNA, 19 nt, Artificial Sequence
  Synthetic
agggugugucccuggguca

SEQ ID NO: 1906 - RNA, 19 nt, Artificial Sequence
  Synthetic
gggugugucccugggucag

SEQ ID NO: 1907 - RNA, 19 nt, Artificial Sequence
  Synthetic
ggugugucccugggucagc

SEQ ID NO: 1908 - RNA, 19 nt, Artificial Sequence
  Synthetic
gugugucccugggucagcg

SEQ ID NO: 1909 - RNA, 19 nt, Artificial Sequence
  Synthetic
ugugucccugggucagcgu

SEQ ID NO: 1910 - RNA, 19 nt, Artificial Sequence
  Synthetic
gugucccugggucagcgug

SEQ ID NO: 1911 - RNA, 19 nt, Artificial Sequence
  Synthetic
ugucccugggucagcgugu

SEQ ID NO: 1912 - RNA, 19 nt, Artificial Sequence
  Synthetic
gucccugggucagcgugug

SEQ ID NO: 1913 - RNA, 19 nt, Artificial Sequence
  Synthetic
ucccugggucagcgugugc

SEQ ID NO: 1914 - RNA, 19 nt, Artificial Sequence
  Synthetic
cccugggucagcgugugcg

SEQ ID NO: 1915 - RNA, 19 nt, Artificial Sequence
  Synthetic
ccugggucagcgugugcgg

SEQ ID NO: 1916 - RNA, 19 nt, Artificial Sequence
  Synthetic
cugggucagcgugugcggg

SEQ ID NO: 1917 - RNA, 19 nt, Artificial Sequence
  Synthetic
ugggucagcgugugcggga

SEQ ID NO: 1918 - RNA, 19 nt, Artificial Sequence
  Synthetic
gggucagcgugugcgggag

SEQ ID NO: 1919 - RNA, 19 nt, Artificial Sequence
  Synthetic
ggucagcgugugcgggagg

SEQ ID NO: 1920 - RNA, 19 nt, Artificial Sequence
  Synthetic
gucagcgugugcgggaggg

SEQ ID NO: 1921 - RNA, 19 nt, Artificial Sequence
  Synthetic
ucagcgugugcgggagggc

SEQ ID NO: 1922 - RNA, 19 nt, Artificial Sequence
  Synthetic
cagcgugugcgggagggcg

SEQ ID NO: 1923 - RNA, 19 nt, Artificial Sequence
  Synthetic
agcgugugcgggagggcgg

SEQ ID NO: 1924 - RNA, 19 nt, Artificial Sequence
  Synthetic
gcgugugcgggagggcggg

SEQ ID NO: 1925 - RNA, 19 nt, Artificial Sequence
  Synthetic
cgugugcgggagggcggga

SEQ ID NO: 1926 - RNA, 19 nt, Artificial Sequence
  Synthetic
gugugcgggagggcgggac

SEQ ID NO: 1927 - RNA, 19 nt, Artificial Sequence
  Synthetic
ugugcgggagggcgggacu

SEQ ID NO: 1928 - RNA, 19 nt, Artificial Sequence
  Synthetic
gugcgggagggcgggacuc

SEQ ID NO: 1929 - RNA, 19 nt, Artificial Sequence
  Synthetic
ugcgggagggcgggacuca

SEQ ID NO: 1930 - RNA, 19 nt, Artificial Sequence
  Synthetic
gcgggagggcgggacucag

SEQ ID NO: 1931 - RNA, 19 nt, Artificial Sequence
  Synthetic
cgggagggcgggacucagg

SEQ ID NO: 1932 - RNA, 19 nt, Artificial Sequence
  Synthetic
gggagggcgggacucaggg

SEQ ID NO: 1933 - RNA, 19 nt, Artificial Sequence
  Synthetic
ggagggcgggacucaggga

SEQ ID NO: 1934 - RNA, 19 nt, Artificial Sequence
  Synthetic
gagggcgggacucagggag

SEQ ID NO: 1935 - RNA, 19 nt, Artificial Sequence
  Synthetic
agggcgggacucagggagg

SEQ ID NO: 1936 - RNA, 19 nt, Artificial Sequence
  Synthetic
gggcgggacucagggagga

SEQ ID NO: 1937 - RNA, 19 nt, Artificial Sequence
  Synthetic
ggcgggacucagggaggag

SEQ ID NO: 1938 - RNA, 19 nt, Artificial Sequence
  Synthetic
gcgggacucagggaggaga

SEQ ID NO: 1939 - RNA, 19 nt, Artificial Sequence
  Synthetic
cgggacucagggaggagag

SEQ ID NO: 1940 - RNA, 19 nt, Artificial Sequence
  Synthetic
gggacucagggaggagagg

SEQ ID NO: 1941 - RNA, 19 nt, Artificial Sequence
  Synthetic
ggacucagggaggagaggg

SEQ ID NO: 1942 - RNA, 19 nt, Artificial Sequence
  Synthetic
gacucagggaggagagggg

SEQ ID NO: 1943 - RNA, 19 nt, Artificial Sequence
  Synthetic
acucagggaggagaggggg

SEQ ID NO: 1944 - RNA, 19 nt, Artificial Sequence
  Synthetic
cucagggaggagagggggc

SEQ ID NO: 1945 - RNA, 19 nt, Artificial Sequence
  Synthetic
ucagggaggagagggggca

SEQ ID NO: 1946 - RNA, 19 nt, Artificial Sequence
  Synthetic
cagggaggagagggggcag

SEQ ID NO: 1947 - RNA, 19 nt, Artificial Sequence
  Synthetic
agggaggagagggggcagg

SEQ ID NO: 1948 - RNA, 19 nt, Artificial Sequence
  Synthetic
gggaggagagggggcagga

SEQ ID NO: 1949 - RNA, 19 nt, Artificial Sequence
  Synthetic
ggaggagagggggcaggag

SEQ ID NO: 1950 - RNA, 19 nt, Artificial Sequence
  Synthetic
gaggagagggggcaggaga

SEQ ID NO: 1951 - RNA, 19 nt, Artificial Sequence
  Synthetic
aggagagggggcaggagag

SEQ ID NO: 1952 - RNA, 19 nt, Artificial Sequence
  Synthetic
ggagagggggcaggagaga

SEQ ID NO: 1953 - RNA, 19 nt, Artificial Sequence
  Synthetic
gagagggggcaggagagag

SEQ ID NO: 1954 - RNA, 19 nt, Artificial Sequence
  Synthetic
agagggggcaggagagagg

SEQ ID NO: 1955 - RNA, 19 nt, Artificial Sequence
  Synthetic
gagggggcaggagagaggg

SEQ ID NO: 1956 - RNA, 19 nt, Artificial Sequence
  Synthetic
agggggcaggagagaggga

SEQ ID NO: 1957 - RNA, 19 nt, Artificial Sequence
  Synthetic
gggggcaggagagagggag

SEQ ID NO: 1958 - RNA, 19 nt, Artificial Sequence
  Synthetic
ggggcaggagagagggagg

SEQ ID NO: 1959 - RNA, 19 nt, Artificial Sequence
  Synthetic
gggcaggagagagggaggg

SEQ ID NO: 1960 - RNA, 19 nt, Artificial Sequence
  Synthetic
ggcaggagagagggagggc

SEQ ID NO: 1961 - RNA, 19 nt, Artificial Sequence
  Synthetic
gcaggagagagggagggca

SEQ ID NO: 1962 - RNA, 19 nt, Artificial Sequence
  Synthetic
caggagagagggagggcag

SEQ ID NO: 1963 - RNA, 19 nt, Artificial Sequence
  Synthetic
aggagagagggagggcagg

SEQ ID NO: 1964 - RNA, 19 nt, Artificial Sequence
  Synthetic
ggagagagggagggcagga

SEQ ID NO: 1965 - RNA, 19 nt, Artificial Sequence
  Synthetic
gagagagggagggcaggag

SEQ ID NO: 1966 - RNA, 19 nt, Artificial Sequence
  Synthetic
agagagggagggcaggaga

SEQ ID NO: 1967 - RNA, 19 nt, Artificial Sequence
  Synthetic
gagagggagggcaggagac

SEQ ID NO: 1968 - RNA, 19 nt, Artificial Sequence
  Synthetic
agagggagggcaggagaca

SEQ ID NO: 1969 - RNA, 19 nt, Artificial Sequence
  Synthetic
gagggagggcaggagacag

SEQ ID NO: 1970 - RNA, 19 nt, Artificial Sequence
  Synthetic
agggagggcaggagacagu

SEQ ID NO: 1971 - RNA, 19 nt, Artificial Sequence
  Synthetic
gggagggcaggagacaguc

SEQ ID NO: 1972 - RNA, 19 nt, Artificial Sequence
  Synthetic
ggagggcaggagacaguca

SEQ ID NO: 1973 - RNA, 19 nt, Artificial Sequence
  Synthetic
gagggcaggagacagucac

SEQ ID NO: 1974 - RNA, 19 nt, Artificial Sequence
  Synthetic
agggcaggagacagucacu

SEQ ID NO: 1975 - RNA, 19 nt, Artificial Sequence
  Synthetic
gggcaggagacagucacuu

SEQ ID NO: 1976 - RNA, 19 nt, Artificial Sequence
  Synthetic
ggcaggagacagucacuug

SEQ ID NO: 1977 - RNA, 19 nt, Artificial Sequence
  Synthetic
gcaggagacagucacuugg

SEQ ID NO: 1978 - RNA, 19 nt, Artificial Sequence
  Synthetic
caggagacagucacuuggc

SEQ ID NO: 1979 - RNA, 19 nt, Artificial Sequence
  Synthetic
aggagacagucacuuggcc

SEQ ID NO: 1980 - RNA, 19 nt, Artificial Sequence
  Synthetic
ggagacagucacuuggccu

SEQ ID NO: 1981 - RNA, 19 nt, Artificial Sequence
  Synthetic
gagacagucacuuggccuu

SEQ ID NO: 1982 - RNA, 19 nt, Artificial Sequence
  Synthetic
agacagucacuuggccuua

SEQ ID NO: 1983 - RNA, 19 nt, Artificial Sequence
  Synthetic
gacagucacuuggccuuaa

SEQ ID NO: 1984 - RNA, 19 nt, Artificial Sequence
  Synthetic
acagucacuuggccuuaaa

SEQ ID NO: 1985 - RNA, 19 nt, Artificial Sequence
  Synthetic
cagucacuuggccuuaaau

SEQ ID NO: 1986 - RNA, 19 nt, Artificial Sequence
  Synthetic
agucacuuggccuuaaaug

SEQ ID NO: 1987 - RNA, 19 nt, Artificial Sequence
  Synthetic
gucacuuggccuuaaaugc

SEQ ID NO: 1988 - RNA, 19 nt, Artificial Sequence
  Synthetic
ucacuuggccuuaaaugcg

SEQ ID NO: 1989 - RNA, 19 nt, Artificial Sequence
  Synthetic
cacuuggccuuaaaugcgc

SEQ ID NO: 1990 - RNA, 19 nt, Artificial Sequence
  Synthetic
acuuggccuuaaaugcgcc

SEQ ID NO: 1991 - RNA, 19 nt, Artificial Sequence
  Synthetic
cuuggccuuaaaugcgccu

SEQ ID NO: 1992 - RNA, 19 nt, Artificial Sequence
  Synthetic
uuggccuuaaaugcgccuc

SEQ ID NO: 1993 - RNA, 19 nt, Artificial Sequence
  Synthetic
uggccuuaaaugcgccuca

SEQ ID NO: 1994 - RNA, 19 nt, Artificial Sequence
  Synthetic
ggccuuaaaugcgccucaa

SEQ ID NO: 1995 - RNA, 19 nt, Artificial Sequence
  Synthetic
gccuuaaaugcgccucaag

SEQ ID NO: 1996 - RNA, 19 nt, Artificial Sequence
  Synthetic
ccuuaaaugcgccucaaga

SEQ ID NO: 1997 - RNA, 19 nt, Artificial Sequence
  Synthetic
cuuaaaugcgccucaagaa

SEQ ID NO: 1998 - RNA, 19 nt, Artificial Sequence
  Synthetic
uuaaaugcgccucaagaaa

SEQ ID NO: 1999 - RNA, 19 nt, Artificial Sequence
  Synthetic
uaaaugcgccucaagaaaa

SEQ ID NO: 2000 - RNA, 19 nt, Artificial Sequence
  Synthetic
aaaugcgccucaagaaaaa

SEQ ID NO: 2001 - RNA, 19 nt, Artificial Sequence
  Synthetic
aaugcgccucaagaaaaag

SEQ ID NO: 2002 - RNA, 19 nt, Artificial Sequence
  Synthetic
augcgccucaagaaaaagu

SEQ ID NO: 2003 - RNA, 19 nt, Artificial Sequence
  Synthetic
ugcgccucaagaaaaaguc

SEQ ID NO: 2004 - RNA, 19 nt, Artificial Sequence
  Synthetic
gcgccucaagaaaaagucg

SEQ ID NO: 2005 - RNA, 19 nt, Artificial Sequence
  Synthetic
cgccucaagaaaaagucgg

SEQ ID NO: 2006 - RNA, 19 nt, Artificial Sequence
  Synthetic
gccucaagaaaaagucggu

SEQ ID NO: 2007 - RNA, 19 nt, Artificial Sequence
  Synthetic
ccucaagaaaaagucgguc

SEQ ID NO: 2008 - RNA, 19 nt, Artificial Sequence
  Synthetic
cucaagaaaaagucggucc

SEQ ID NO: 2009 - RNA, 19 nt, Artificial Sequence
  Synthetic
ucaagaaaaagucgguccc

SEQ ID NO: 2010 - RNA, 19 nt, Artificial Sequence
  Synthetic
caagaaaaagucggucccu

SEQ ID NO: 2011 - RNA, 19 nt, Artificial Sequence
  Synthetic
aagaaaaagucggucccug

SEQ ID NO: 2012 - RNA, 19 nt, Artificial Sequence
  Synthetic
agaaaaagucggucccugc

SEQ ID NO: 2013 - RNA, 19 nt, Artificial Sequence
  Synthetic
gaaaaagucggucccugca

SEQ ID NO: 2014 - RNA, 19 nt, Artificial Sequence
  Synthetic
aaaaagucggucccugcaa

SEQ ID NO: 2015 - RNA, 19 nt, Artificial Sequence
  Synthetic
aaaagucggucccugcaaa

SEQ ID NO: 2016 - RNA, 19 nt, Artificial Sequence
  Synthetic
aaagucggucccugcaaaa

SEQ ID NO: 2017 - RNA, 19 nt, Artificial Sequence
  Synthetic
aagucggucccugcaaaac

SEQ ID NO: 2018 - RNA, 19 nt, Artificial Sequence
  Synthetic
agucggucccugcaaaacc

SEQ ID NO: 2019 - RNA, 19 nt, Artificial Sequence
  Synthetic
gucggucccugcaaaaccg

SEQ ID NO: 2020 - RNA, 19 nt, Artificial Sequence
  Synthetic
ucggucccugcaaaaccgc

SEQ ID NO: 2021 - RNA, 19 nt, Artificial Sequence
  Synthetic
cggucccugcaaaaccgcg

SEQ ID NO: 2022 - RNA, 19 nt, Artificial Sequence
  Synthetic
ggucccugcaaaaccgcgg

SEQ ID NO: 2023 - RNA, 19 nt, Artificial Sequence
  Synthetic
gucccugcaaaaccgcggc

SEQ ID NO: 2024 - RNA, 19 nt, Artificial Sequence
  Synthetic
ucccugcaaaaccgcggcg

SEQ ID NO: 2025 - RNA, 19 nt, Artificial Sequence
  Synthetic
cccugcaaaaccgcggcga

SEQ ID NO: 2026 - RNA, 19 nt, Artificial Sequence
  Synthetic
ccugcaaaaccgcggcgac

SEQ ID NO: 2027 - RNA, 19 nt, Artificial Sequence
  Synthetic
cugcaaaaccgcggcgacu

SEQ ID NO: 2028 - RNA, 19 nt, Artificial Sequence
  Synthetic
ugcaaaaccgcggcgacuu

SEQ ID NO: 2029 - RNA, 19 nt, Artificial Sequence
  Synthetic
gcaaaaccgcggcgacuuu

SEQ ID NO: 2030 - RNA, 19 nt, Artificial Sequence
  Synthetic
caaaaccgcggcgacuuuu

SEQ ID NO: 2031 - RNA, 19 nt, Artificial Sequence
  Synthetic
aaaaccgcggcgacuuuua

SEQ ID NO: 2032 - RNA, 19 nt, Artificial Sequence
  Synthetic
aaaccgcggcgacuuuuac

SEQ ID NO: 2033 - RNA, 19 nt, Artificial Sequence
  Synthetic
aaccgcggcgacuuuuacu

SEQ ID NO: 2034 - RNA, 19 nt, Artificial Sequence
  Synthetic
accgcggcgacuuuuacuc

SEQ ID NO: 2035 - RNA, 19 nt, Artificial Sequence
  Synthetic
ccgcggcgacuuuuacucg

SEQ ID NO: 2036 - RNA, 19 nt, Artificial Sequence
  Synthetic
cgcggcgacuuuuacucga

SEQ ID NO: 2037 - RNA, 19 nt, Artificial Sequence
  Synthetic
gcggcgacuuuuacucgaa

SEQ ID NO: 2038 - RNA, 19 nt, Artificial Sequence
  Synthetic
cggcgacuuuuacucgaaa

SEQ ID NO: 2039 - RNA, 19 nt, Artificial Sequence
  Synthetic
ggcgacuuuuacucgaaac

SEQ ID NO: 2040 - RNA, 19 nt, Artificial Sequence
  Synthetic
gcgacuuuuacucgaaacc

SEQ ID NO: 2041 - RNA, 19 nt, Artificial Sequence
  Synthetic
cgacuuuuacucgaaacca

SEQ ID NO: 2042 - RNA, 19 nt, Artificial Sequence
  Synthetic
gacuuuuacucgaaaccag

SEQ ID NO: 2043 - RNA, 19 nt, Artificial Sequence
  Synthetic
acuuuuacucgaaaccaga

SEQ ID NO: 2044 - RNA, 19 nt, Artificial Sequence
  Synthetic
cuuuuacucgaaaccagag

SEQ ID NO: 2045 - RNA, 19 nt, Artificial Sequence
  Synthetic
uuuuacucgaaaccagagg

SEQ ID NO: 2046 - RNA, 19 nt, Artificial Sequence
  Synthetic
uuuacucgaaaccagaggc

SEQ ID NO: 2047 - RNA, 19 nt, Artificial Sequence
  Synthetic
uuacucgaaaccagaggcg

SEQ ID NO: 2048 - RNA, 19 nt, Artificial Sequence
  Synthetic
uacucgaaaccagaggcgg

SEQ ID NO: 2049 - RNA, 19 nt, Artificial Sequence
  Synthetic
acucgaaaccagaggcggc

SEQ ID NO: 2050 - RNA, 19 nt, Artificial Sequence
  Synthetic
cucgaaaccagaggcggcu

SEQ ID NO: 2051 - RNA, 19 nt, Artificial Sequence
  Synthetic
ucgaaaccagaggcggcug

SEQ ID NO: 2052 - RNA, 19 nt, Artificial Sequence
  Synthetic
cgaaaccagaggcggcuga

SEQ ID NO: 2053 - RNA, 19 nt, Artificial Sequence
  Synthetic
gaaaccagaggcggcugag

SEQ ID NO: 2054 - RNA, 19 nt, Artificial Sequence
  Synthetic
aaaccagaggcggcugagc

SEQ ID NO: 2055 - RNA, 19 nt, Artificial Sequence
  Synthetic
aaccagaggcggcugagcu

SEQ ID NO: 2056 - RNA, 19 nt, Artificial Sequence
  Synthetic
accagaggcggcugagcuu

SEQ ID NO: 2057 - RNA, 19 nt, Artificial Sequence
  Synthetic
ccagaggcggcugagcuuu

SEQ ID NO: 2058 - RNA, 19 nt, Artificial Sequence
  Synthetic
cagaggcggcugagcuuuc

SEQ ID NO: 2059 - RNA, 19 nt, Artificial Sequence
  Synthetic
agaggcggcugagcuuucu

SEQ ID NO: 2060 - RNA, 19 nt, Artificial Sequence
  Synthetic
gaggcggcugagcuuucuc

SEQ ID NO: 2061 - RNA, 19 nt, Artificial Sequence
  Synthetic
aggcggcugagcuuucuca

SEQ ID NO: 2062 - RNA, 19 nt, Artificial Sequence
  Synthetic
ggcggcugagcuuucucac

SEQ ID NO: 2063 - RNA, 19 nt, Artificial Sequence
  Synthetic
gcggcugagcuuucucacc

SEQ ID NO: 2064 - RNA, 19 nt, Artificial Sequence
  Synthetic
cggcugagcuuucucaccu

SEQ ID NO: 2065 - RNA, 19 nt, Artificial Sequence
  Synthetic
ggcugagcuuucucaccuc

SEQ ID NO: 2066 - RNA, 19 nt, Artificial Sequence
  Synthetic
gcugagcuuucucaccucc

SEQ ID NO: 2067 - RNA, 19 nt, Artificial Sequence
  Synthetic
cugagcuuucucaccuccc

SEQ ID NO: 2068 - RNA, 19 nt, Artificial Sequence
  Synthetic
ugagcuuucucaccuccca

SEQ ID NO: 2069 - RNA, 19 nt, Artificial Sequence
  Synthetic
gagcuuucucaccucccac

SEQ ID NO: 2070 - RNA, 19 nt, Artificial Sequence
  Synthetic
agcuuucucaccucccacc

SEQ ID NO: 2071 - RNA, 19 nt, Artificial Sequence
  Synthetic
gcuuucucaccucccaccu

SEQ ID NO: 2072 - RNA, 19 nt, Artificial Sequence
  Synthetic
cuuucucaccucccaccuc

SEQ ID NO: 2073 - RNA, 19 nt, Artificial Sequence
  Synthetic
uuucucaccucccaccucc

SEQ ID NO: 2074 - RNA, 19 nt, Artificial Sequence
  Synthetic
uucucaccucccaccuccc

SEQ ID NO: 2075 - RNA, 19 nt, Artificial Sequence
  Synthetic
ucucaccucccaccucccu

SEQ ID NO: 2076 - RNA, 19 nt, Artificial Sequence
  Synthetic
cucaccucccaccucccuu

SEQ ID NO: 2077 - RNA, 19 nt, Artificial Sequence
  Synthetic
ucaccucccaccucccuuc

SEQ ID NO: 2078 - RNA, 19 nt, Artificial Sequence
  Synthetic
caccucccaccucccuucu

SEQ ID NO: 2079 - RNA, 19 nt, Artificial Sequence
  Synthetic
accucccaccucccuucuc

SEQ ID NO: 2080 - RNA, 19 nt, Artificial Sequence
  Synthetic
ccucccaccucccuucucc

SEQ ID NO: 2081 - RNA, 19 nt, Artificial Sequence
  Synthetic
cucccaccucccuucuccc

SEQ ID NO: 2082 - RNA, 19 nt, Artificial Sequence
  Synthetic
ucccaccucccuucucccc

SEQ ID NO: 2083 - RNA, 19 nt, Artificial Sequence
  Synthetic
cccaccucccuucuccccu

SEQ ID NO: 2084 - RNA, 19 nt, Artificial Sequence
  Synthetic
ccaccucccuucuccccug

SEQ ID NO: 2085 - RNA, 19 nt, Artificial Sequence
  Synthetic
caccucccuucuccccugg

SEQ ID NO: 2086 - RNA, 19 nt, Artificial Sequence
  Synthetic
accucccuucuccccuggc

SEQ ID NO: 2087 - RNA, 19 nt, Artificial Sequence
  Synthetic
ccucccuucuccccuggcc

SEQ ID NO: 2088 - RNA, 19 nt, Artificial Sequence
  Synthetic
cucccuucuccccuggccc

SEQ ID NO: 2089 - RNA, 19 nt, Artificial Sequence
  Synthetic
ucccuucuccccuggcccc

SEQ ID NO: 2090 - RNA, 19 nt, Artificial Sequence
  Synthetic
cccuucuccccuggccccg

SEQ ID NO: 2091 - RNA, 19 nt, Artificial Sequence
  Synthetic
ccuucuccccuggccccgu

SEQ ID NO: 2092 - RNA, 19 nt, Artificial Sequence
  Synthetic
cuucuccccuggccccgug

SEQ ID NO: 2093 - RNA, 19 nt, Artificial Sequence
  Synthetic
uucuccccuggccccgugg

SEQ ID NO: 2094 - RNA, 19 nt, Artificial Sequence
  Synthetic
ucuccccuggccccgugga

SEQ ID NO: 2095 - RNA, 19 nt, Artificial Sequence
  Synthetic
cuccccuggccccguggag

SEQ ID NO: 2096 - RNA, 19 nt, Artificial Sequence
  Synthetic
uccccuggccccguggaga

SEQ ID NO: 2097 - RNA, 19 nt, Artificial Sequence
  Synthetic
ccccuggccccguggagac

SEQ ID NO: 2098 - RNA, 19 nt, Artificial Sequence
  Synthetic
cccuggccccguggagacc

SEQ ID NO: 2099 - RNA, 19 nt, Artificial Sequence
  Synthetic
ccuggccccguggagaccu

SEQ ID NO: 2100 - RNA, 19 nt, Artificial Sequence
  Synthetic
cuggccccguggagaccua

SEQ ID NO: 2101 - RNA, 19 nt, Artificial Sequence
  Synthetic
uggccccguggagaccuag

SEQ ID NO: 2102 - RNA, 19 nt, Artificial Sequence
  Synthetic
ggccccguggagaccuagu

SEQ ID NO: 2103 - RNA, 19 nt, Artificial Sequence
  Synthetic
gccccguggagaccuagug

SEQ ID NO: 2104 - RNA, 19 nt, Artificial Sequence
  Synthetic
ccccguggagaccuagugu

SEQ ID NO: 2105 - RNA, 19 nt, Artificial Sequence
  Synthetic
cccguggagaccuaguguu

SEQ ID NO: 2106 - RNA, 19 nt, Artificial Sequence
  Synthetic
ccguggagaccuaguguug

SEQ ID NO: 2107 - RNA, 19 nt, Artificial Sequence
  Synthetic
cguggagaccuaguguuga

SEQ ID NO: 2108 - RNA, 19 nt, Artificial Sequence
  Synthetic
guggagaccuaguguugac

SEQ ID NO: 2109 - RNA, 19 nt, Artificial Sequence
  Synthetic
uggagaccuaguguugacc

SEQ ID NO: 2110 - RNA, 19 nt, Artificial Sequence
  Synthetic
ggagaccuaguguugaccg

SEQ ID NO: 2111 - RNA, 19 nt, Artificial Sequence
  Synthetic
gagaccuaguguugaccga

SEQ ID NO: 2112 - RNA, 19 nt, Artificial Sequence
  Synthetic
agaccuaguguugaccgag

SEQ ID NO: 2113 - RNA, 19 nt, Artificial Sequence
  Synthetic
gaccuaguguugaccgaga

SEQ ID NO: 2114 - RNA, 19 nt, Artificial Sequence
  Synthetic
accuaguguugaccgagaa

SEQ ID NO: 2115 - RNA, 19 nt, Artificial Sequence
  Synthetic
ccuaguguugaccgagaaa

SEQ ID NO: 2116 - RNA, 19 nt, Artificial Sequence
  Synthetic
cuaguguugaccgagaaac

SEQ ID NO: 2117 - RNA, 19 nt, Artificial Sequence
  Synthetic
uaguguugaccgagaaacu

SEQ ID NO: 2118 - RNA, 19 nt, Artificial Sequence
  Synthetic
aguguugaccgagaaacug

SEQ ID NO: 2119 - RNA, 19 nt, Artificial Sequence
  Synthetic
guguugaccgagaaacugg

SEQ ID NO: 2120 - RNA, 19 nt, Artificial Sequence
  Synthetic
uguugaccgagaaacuggc

SEQ ID NO: 2121 - RNA, 19 nt, Artificial Sequence
  Synthetic
guugaccgagaaacuggcu

SEQ ID NO: 2122 - RNA, 19 nt, Artificial Sequence
  Synthetic
uugaccgagaaacuggcuc

SEQ ID NO: 2123 - RNA, 19 nt, Artificial Sequence
  Synthetic
ugaccgagaaacuggcucc

SEQ ID NO: 2124 - RNA, 19 nt, Artificial Sequence
  Synthetic
gaccgagaaacuggcuccu

SEQ ID NO: 2125 - RNA, 19 nt, Artificial Sequence
  Synthetic
accgagaaacuggcuccuc

SEQ ID NO: 2126 - RNA, 19 nt, Artificial Sequence
  Synthetic
ccgagaaacuggcuccuca

SEQ ID NO: 2127 - RNA, 19 nt, Artificial Sequence
  Synthetic
cgagaaacuggcuccucag

SEQ ID NO: 2128 - RNA, 19 nt, Artificial Sequence
  Synthetic
gagaaacuggcuccucagc

SEQ ID NO: 2129 - RNA, 19 nt, Artificial Sequence
  Synthetic
agaaacuggcuccucagcc

SEQ ID NO: 2130 - RNA, 19 nt, Artificial Sequence
  Synthetic
gaaacuggcuccucagccc

SEQ ID NO: 2131 - RNA, 19 nt, Artificial Sequence
  Synthetic
aaacuggcuccucagccca

SEQ ID NO: 2132 - RNA, 19 nt, Artificial Sequence
  Synthetic
aacuggcuccucagcccac

SEQ ID NO: 2133 - RNA, 19 nt, Artificial Sequence
  Synthetic
acuggcuccucagcccacu

SEQ ID NO: 2134 - RNA, 19 nt, Artificial Sequence
  Synthetic
cuggcuccucagcccacuc

SEQ ID NO: 2135 - RNA, 19 nt, Artificial Sequence
  Synthetic
uggcuccucagcccacucu

SEQ ID NO: 2136 - RNA, 19 nt, Artificial Sequence
  Synthetic
ggcuccucagcccacucug

SEQ ID NO: 2137 - RNA, 19 nt, Artificial Sequence
  Synthetic
gcuccucagcccacucugg

SEQ ID NO: 2138 - RNA, 19 nt, Artificial Sequence
  Synthetic
cuccucagcccacucuggg

SEQ ID NO: 2139 - RNA, 19 nt, Artificial Sequence
  Synthetic
uccucagcccacucuggga

SEQ ID NO: 2140 - RNA, 19 nt, Artificial Sequence
  Synthetic
ccucagcccacucugggaa

SEQ ID NO: 2141 - RNA, 19 nt, Artificial Sequence
  Synthetic
cucagcccacucugggaag

SEQ ID NO: 2142 - RNA, 19 nt, Artificial Sequence
  Synthetic
ucagcccacucugggaaga

SEQ ID NO: 2143 - RNA, 19 nt, Artificial Sequence
  Synthetic
cagcccacucugggaagac

SEQ ID NO: 2144 - RNA, 19 nt, Artificial Sequence
  Synthetic
agcccacucugggaagacc

SEQ ID NO: 2145 - RNA, 19 nt, Artificial Sequence
  Synthetic
gcccacucugggaagaccc

SEQ ID NO: 2146 - RNA, 19 nt, Artificial Sequence
  Synthetic
cccacucugggaagaccca

SEQ ID NO: 2147 - RNA, 19 nt, Artificial Sequence
  Synthetic
ccacucugggaagacccag

SEQ ID NO: 2148 - RNA, 19 nt, Artificial Sequence
  Synthetic
cacucugggaagacccagc

SEQ ID NO: 2149 - RNA, 19 nt, Artificial Sequence
  Synthetic
acucugggaagacccagcc

SEQ ID NO: 2150 - RNA, 19 nt, Artificial Sequence
  Synthetic
cucugggaagacccagcca

SEQ ID NO: 2151 - RNA, 19 nt, Artificial Sequence
  Synthetic
ucugggaagacccagccaa

SEQ ID NO: 2152 - RNA, 19 nt, Artificial Sequence
  Synthetic
cugggaagacccagccaaa

SEQ ID NO: 2153 - RNA, 19 nt, Artificial Sequence
  Synthetic
ugggaagacccagccaaau

SEQ ID NO: 2154 - RNA, 19 nt, Artificial Sequence
  Synthetic
gggaagacccagccaaaug

SEQ ID NO: 2155 - RNA, 19 nt, Artificial Sequence
  Synthetic
ggaagacccagccaaaugu

SEQ ID NO: 2156 - RNA, 19 nt, Artificial Sequence
  Synthetic
gaagacccagccaaaugua

SEQ ID NO: 2157 - RNA, 19 nt, Artificial Sequence
  Synthetic
aagacccagccaaauguag

SEQ ID NO: 2158 - RNA, 19 nt, Artificial Sequence
  Synthetic
agacccagccaaauguagc

SEQ ID NO: 2159 - RNA, 19 nt, Artificial Sequence
  Synthetic
gacccagccaaauguagcu

SEQ ID NO: 2160 - RNA, 19 nt, Artificial Sequence
  Synthetic
acccagccaaauguagcuc

SEQ ID NO: 2161 - RNA, 19 nt, Artificial Sequence
  Synthetic
cccagccaaauguagcuca

SEQ ID NO: 2162 - RNA, 19 nt, Artificial Sequence
  Synthetic
ccagccaaauguagcucag

SEQ ID NO: 2163 - RNA, 19 nt, Artificial Sequence
  Synthetic
cagccaaauguagcucagc

SEQ ID NO: 2164 - RNA, 19 nt, Artificial Sequence
  Synthetic
agccaaauguagcucagcg

SEQ ID NO: 2165 - RNA, 19 nt, Artificial Sequence
  Synthetic
gccaaauguagcucagcgg

SEQ ID NO: 2166 - RNA, 19 nt, Artificial Sequence
  Synthetic
ccaaauguagcucagcgga

SEQ ID NO: 2167 - RNA, 19 nt, Artificial Sequence
  Synthetic
caaauguagcucagcggau

SEQ ID NO: 2168 - RNA, 19 nt, Artificial Sequence
  Synthetic
aaauguagcucagcggaug

SEQ ID NO: 2169 - RNA, 19 nt, Artificial Sequence
  Synthetic
aauguagcucagcggaugc

SEQ ID NO: 2170 - RNA, 19 nt, Artificial Sequence
  Synthetic
auguagcucagcggaugcc

SEQ ID NO: 2171 - RNA, 19 nt, Artificial Sequence
  Synthetic
uguagcucagcggaugccc

SEQ ID NO: 2172 - RNA, 19 nt, Artificial Sequence
  Synthetic
guagcucagcggaugccca

SEQ ID NO: 2173 - RNA, 19 nt, Artificial Sequence
  Synthetic
uagcucagcggaugcccag

SEQ ID NO: 2174 - RNA, 19 nt, Artificial Sequence
  Synthetic
agcucagcggaugcccagg

SEQ ID NO: 2175 - RNA, 19 nt, Artificial Sequence
  Synthetic
gcucagcggaugcccaggg

SEQ ID NO: 2176 - RNA, 19 nt, Artificial Sequence
  Synthetic
cucagcggaugcccagggc

SEQ ID NO: 2177 - RNA, 19 nt, Artificial Sequence
  Synthetic
ucagcggaugcccagggcu

SEQ ID NO: 2178 - RNA, 19 nt, Artificial Sequence
  Synthetic
cagcggaugcccagggcug

SEQ ID NO: 2179 - RNA, 19 nt, Artificial Sequence
  Synthetic
agcggaugcccagggcugg

SEQ ID NO: 2180 - RNA, 19 nt, Artificial Sequence
  Synthetic
gcggaugcccagggcuggg

SEQ ID NO: 2181 - RNA, 19 nt, Artificial Sequence
  Synthetic
cggaugcccagggcugggc

SEQ ID NO: 2182 - RNA, 19 nt, Artificial Sequence
  Synthetic
ggaugcccagggcugggcu

SEQ ID NO: 2183 - RNA, 19 nt, Artificial Sequence
  Synthetic
gaugcccagggcugggcuu

SEQ ID NO: 2184 - RNA, 19 nt, Artificial Sequence
  Synthetic
augcccagggcugggcuuc

SEQ ID NO: 2185 - RNA, 19 nt, Artificial Sequence
  Synthetic
ugcccagggcugggcuucu

SEQ ID NO: 2186 - RNA, 19 nt, Artificial Sequence
  Synthetic
gcccagggcugggcuucug

SEQ ID NO: 2187 - RNA, 19 nt, Artificial Sequence
  Synthetic
cccagggcugggcuucugg

SEQ ID NO: 2188 - RNA, 19 nt, Artificial Sequence
  Synthetic
ccagggcugggcuucuggg

SEQ ID NO: 2189 - RNA, 19 nt, Artificial Sequence
  Synthetic
cagggcugggcuucugggc

SEQ ID NO: 2190 - RNA, 19 nt, Artificial Sequence
  Synthetic
agggcugggcuucugggcc

SEQ ID NO: 2191 - RNA, 19 nt, Artificial Sequence
  Synthetic
gggcugggcuucugggccc

SEQ ID NO: 2192 - RNA, 19 nt, Artificial Sequence
  Synthetic
ggcugggcuucugggcccg

SEQ ID NO: 2193 - RNA, 19 nt, Artificial Sequence
  Synthetic
gcugggcuucugggcccgc

SEQ ID NO: 2194 - RNA, 19 nt, Artificial Sequence
  Synthetic
cugggcuucugggcccgcc

SEQ ID NO: 2195 - RNA, 19 nt, Artificial Sequence
  Synthetic
ugggcuucugggcccgccg

SEQ ID NO: 2196 - RNA, 19 nt, Artificial Sequence
  Synthetic
gggcuucugggcccgccga

SEQ ID NO: 2197 - RNA, 19 nt, Artificial Sequence
  Synthetic
ggcuucugggcccgccgac

SEQ ID NO: 2198 - RNA, 19 nt, Artificial Sequence
  Synthetic
gcuucugggcccgccgacg

SEQ ID NO: 2199 - RNA, 19 nt, Artificial Sequence
  Synthetic
cuucugggcccgccgacgc

SEQ ID NO: 2200 - RNA, 19 nt, Artificial Sequence
  Synthetic
uucugggcccgccgacgcc

SEQ ID NO: 2201 - RNA, 19 nt, Artificial Sequence
  Synthetic
ucugggcccgccgacgccg

SEQ ID NO: 2202 - RNA, 19 nt, Artificial Sequence
  Synthetic
cugggcccgccgacgccga

SEQ ID NO: 2203 - RNA, 19 nt, Artificial Sequence
  Synthetic
ugggcccgccgacgccgac

SEQ ID NO: 2204 - RNA, 19 nt, Artificial Sequence
  Synthetic
gggcccgccgacgccgacc

SEQ ID NO: 2205 - RNA, 19 nt, Artificial Sequence
  Synthetic
ggcccgccgacgccgaccg

SEQ ID NO: 2206 - RNA, 19 nt, Artificial Sequence
  Synthetic
gcccgccgacgccgaccgc

SEQ ID NO: 2207 - RNA, 19 nt, Artificial Sequence
  Synthetic
cccgccgacgccgaccgcg

SEQ ID NO: 2208 - RNA, 19 nt, Artificial Sequence
  Synthetic
ccgccgacgccgaccgcgc

SEQ ID NO: 2209 - RNA, 19 nt, Artificial Sequence
  Synthetic
cgccgacgccgaccgcgcc

SEQ ID NO: 2210 - RNA, 19 nt, Artificial Sequence
  Synthetic
gccgacgccgaccgcgccc

SEQ ID NO: 2211 - RNA, 19 nt, Artificial Sequence
  Synthetic
ccgacgccgaccgcgcccg

SEQ ID NO: 2212 - RNA, 19 nt, Artificial Sequence
  Synthetic
cgacgccgaccgcgcccgc

SEQ ID NO: 2213 - RNA, 19 nt, Artificial Sequence
  Synthetic
gacgccgaccgcgcccgcg

SEQ ID NO: 2214 - RNA, 19 nt, Artificial Sequence
  Synthetic
acgccgaccgcgcccgcgc

SEQ ID NO: 2215 - RNA, 19 nt, Artificial Sequence
  Synthetic
cgccgaccgcgcccgcgcg

SEQ ID NO: 2216 - RNA, 19 nt, Artificial Sequence
  Synthetic
gccgaccgcgcccgcgcgg

SEQ ID NO: 2217 - RNA, 19 nt, Artificial Sequence
  Synthetic
ccgaccgcgcccgcgcggg

SEQ ID NO: 2218 - RNA, 19 nt, Artificial Sequence
  Synthetic
cgaccgcgcccgcgcgggg

SEQ ID NO: 2219 - RNA, 19 nt, Artificial Sequence
  Synthetic
gaccgcgcccgcgcggggc

SEQ ID NO: 2220 - RNA, 19 nt, Artificial Sequence
  Synthetic
accgcgcccgcgcggggcu

SEQ ID NO: 2221 - RNA, 19 nt, Artificial Sequence
  Synthetic
ccgcgcccgcgcggggcug

SEQ ID NO: 2222 - RNA, 19 nt, Artificial Sequence
  Synthetic
cgcgcccgcgcggggcuga

SEQ ID NO: 2223 - RNA, 19 nt, Artificial Sequence
  Synthetic
gcgcccgcgcggggcugag

SEQ ID NO: 2224 - RNA, 19 nt, Artificial Sequence
  Synthetic
cgcccgcgcggggcugagg

SEQ ID NO: 2225 - RNA, 19 nt, Artificial Sequence
  Synthetic
gcccgcgcggggcugaggc

SEQ ID NO: 2226 - RNA, 19 nt, Artificial Sequence
  Synthetic
cccgcgcggggcugaggcu

SEQ ID NO: 2227 - RNA, 19 nt, Artificial Sequence
  Synthetic
ccgcgcggggcugaggcug

SEQ ID NO: 2228 - RNA, 19 nt, Artificial Sequence
  Synthetic
cgcgcggggcugaggcugg

SEQ ID NO: 2229 - RNA, 19 nt, Artificial Sequence
  Synthetic
gcgcggggcugaggcugga

SEQ ID NO: 2230 - RNA, 19 nt, Artificial Sequence
  Synthetic
cgcggggcugaggcuggau

SEQ ID NO: 2231 - RNA, 19 nt, Artificial Sequence
  Synthetic
gcggggcugaggcuggauu

SEQ ID NO: 2232 - RNA, 19 nt, Artificial Sequence
  Synthetic
cggggcugaggcuggauuc

SEQ ID NO: 2233 - RNA, 19 nt, Artificial Sequence
  Synthetic
ggggcugaggcuggauucc

SEQ ID NO: 2234 - RNA, 19 nt, Artificial Sequence
  Synthetic
gggcugaggcuggauuccu

SEQ ID NO: 2235 - RNA, 19 nt, Artificial Sequence
  Synthetic
ggcugaggcuggauuccuu

SEQ ID NO: 2236 - RNA, 19 nt, Artificial Sequence
  Synthetic
gcugaggcuggauuccuuu

SEQ ID NO: 2237 - RNA, 19 nt, Artificial Sequence
  Synthetic
cugaggcuggauuccuuuc

SEQ ID NO: 2238 - RNA, 19 nt, Artificial Sequence
  Synthetic
ugaggcuggauuccuuucc

SEQ ID NO: 2239 - RNA, 19 nt, Artificial Sequence
  Synthetic
gaggcuggauuccuuuccc

SEQ ID NO: 2240 - RNA, 19 nt, Artificial Sequence
  Synthetic
aggcuggauuccuuuccca

SEQ ID NO: 2241 - RNA, 19 nt, Artificial Sequence
  Synthetic
ggcuggauuccuuucccac

SEQ ID NO: 2242 - RNA, 19 nt, Artificial Sequence
  Synthetic
gcuggauuccuuucccacu

SEQ ID NO: 2243 - RNA, 19 nt, Artificial Sequence
  Synthetic
cuggauuccuuucccacua

SEQ ID NO: 2244 - RNA, 19 nt, Artificial Sequence
  Synthetic
uggauuccuuucccacuaa

SEQ ID NO: 2245 - RNA, 19 nt, Artificial Sequence
  Synthetic
ggauuccuuucccacuaau

SEQ ID NO: 2246 - RNA, 19 nt, Artificial Sequence
  Synthetic
gauuccuuucccacuaaua

SEQ ID NO: 2247 - RNA, 19 nt, Artificial Sequence
  Synthetic
auuccuuucccacuaauag

SEQ ID NO: 2248 - RNA, 19 nt, Artificial Sequence
  Synthetic
uuccuuucccacuaauaga

SEQ ID NO: 2249 - RNA, 19 nt, Artificial Sequence
  Synthetic
uccuuucccacuaauagag

SEQ ID NO: 2250 - RNA, 19 nt, Artificial Sequence
  Synthetic
ccuuucccacuaauagagg

SEQ ID NO: 2251 - RNA, 19 nt, Artificial Sequence
  Synthetic
cuuucccacuaauagaggg

SEQ ID NO: 2252 - RNA, 19 nt, Artificial Sequence
  Synthetic
uuucccacuaauagagggc

SEQ ID NO: 2253 - RNA, 19 nt, Artificial Sequence
  Synthetic
uucccacuaauagagggca

SEQ ID NO: 2254 - RNA, 19 nt, Artificial Sequence
  Synthetic
ucccacuaauagagggcag

SEQ ID NO: 2255 - RNA, 19 nt, Artificial Sequence
  Synthetic
cccacuaauagagggcagc

SEQ ID NO: 2256 - RNA, 19 nt, Artificial Sequence
  Synthetic
ccacuaauagagggcagcg

SEQ ID NO: 2257 - RNA, 19 nt, Artificial Sequence
  Synthetic
cacuaauagagggcagcgg

SEQ ID NO: 2258 - RNA, 19 nt, Artificial Sequence
  Synthetic
acuaauagagggcagcggg

SEQ ID NO: 2259 - RNA, 19 nt, Artificial Sequence
  Synthetic
cuaauagagggcagcgggc

SEQ ID NO: 2260 - RNA, 19 nt, Artificial Sequence
  Synthetic
uaauagagggcagcgggcg

SEQ ID NO: 2261 - RNA, 19 nt, Artificial Sequence
  Synthetic
aauagagggcagcgggcgc

SEQ ID NO: 2262 - RNA, 19 nt, Artificial Sequence
  Synthetic
auagagggcagcgggcgcu

SEQ ID NO: 2263 - RNA, 19 nt, Artificial Sequence
  Synthetic
uagagggcagcgggcgcuu

SEQ ID NO: 2264 - RNA, 19 nt, Artificial Sequence
  Synthetic
agagggcagcgggcgcuug

SEQ ID NO: 2265 - RNA, 19 nt, Artificial Sequence
  Synthetic
gagggcagcgggcgcuuga

SEQ ID NO: 2266 - RNA, 19 nt, Artificial Sequence
  Synthetic
agggcagcgggcgcuugag

SEQ ID NO: 2267 - RNA, 19 nt, Artificial Sequence
  Synthetic
gggcagcgggcgcuugagc

SEQ ID NO: 2268 - RNA, 19 nt, Artificial Sequence
  Synthetic
ggcagcgggcgcuugagcg

SEQ ID NO: 2269 - RNA, 19 nt, Artificial Sequence
  Synthetic
gcagcgggcgcuugagcgc

SEQ ID NO: 2270 - RNA, 19 nt, Artificial Sequence
  Synthetic
cagcgggcgcuugagcgcu

SEQ ID NO: 2271 - RNA, 19 nt, Artificial Sequence
  Synthetic
agcgggcgcuugagcgcug

SEQ ID NO: 2272 - RNA, 19 nt, Artificial Sequence
  Synthetic
gcgggcgcuugagcgcugg

SEQ ID NO: 2273 - RNA, 19 nt, Artificial Sequence
  Synthetic
cgggcgcuugagcgcugga

SEQ ID NO: 2274 - RNA, 19 nt, Artificial Sequence
  Synthetic
gggcgcuugagcgcuggaa

SEQ ID NO: 2275 - RNA, 19 nt, Artificial Sequence
  Synthetic
ggcgcuugagcgcuggaag

SEQ ID NO: 2276 - RNA, 19 nt, Artificial Sequence
  Synthetic
gcgcuugagcgcuggaaga

SEQ ID NO: 2277 - RNA, 19 nt, Artificial Sequence
  Synthetic
cgcuugagcgcuggaagaa

SEQ ID NO: 2278 - RNA, 19 nt, Artificial Sequence
  Synthetic
gcuugagcgcuggaagaag

SEQ ID NO: 2279 - RNA, 19 nt, Artificial Sequence
  Synthetic
cuugagcgcuggaagaagu

SEQ ID NO: 2280 - RNA, 19 nt, Artificial Sequence
  Synthetic
uugagcgcuggaagaaguc

SEQ ID NO: 2281 - RNA, 19 nt, Artificial Sequence
  Synthetic
ugagcgcuggaagaagucc

SEQ ID NO: 2282 - RNA, 19 nt, Artificial Sequence
  Synthetic
gagcgcuggaagaaguccc

SEQ ID NO: 2283 - RNA, 19 nt, Artificial Sequence
  Synthetic
agcgcuggaagaagucccu

SEQ ID NO: 2284 - RNA, 19 nt, Artificial Sequence
  Synthetic
gcgcuggaagaagucccuc

SEQ ID NO: 2285 - RNA, 19 nt, Artificial Sequence
  Synthetic
cgcuggaagaagucccucu

SEQ ID NO: 2286 - RNA, 19 nt, Artificial Sequence
  Synthetic
gcuggaagaagucccucuc

SEQ ID NO: 2287 - RNA, 19 nt, Artificial Sequence
  Synthetic
cuggaagaagucccucucc

SEQ ID NO: 2288 - RNA, 19 nt, Artificial Sequence
  Synthetic
uggaagaagucccucuccu

SEQ ID NO: 2289 - RNA, 19 nt, Artificial Sequence
  Synthetic
ggaagaagucccucuccuc

SEQ ID NO: 2290 - RNA, 19 nt, Artificial Sequence
  Synthetic
gaagaagucccucuccucu

SEQ ID NO: 2291 - RNA, 19 nt, Artificial Sequence
  Synthetic
aagaagucccucuccucuc

SEQ ID NO: 2292 - RNA, 19 nt, Artificial Sequence
  Synthetic
agaagucccucuccucucg

SEQ ID NO: 2293 - RNA, 19 nt, Artificial Sequence
  Synthetic
gaagucccucuccucucgg

SEQ ID NO: 2294 - RNA, 19 nt, Artificial Sequence
  Synthetic
aagucccucuccucucggg

SEQ ID NO: 2295 - RNA, 19 nt, Artificial Sequence
  Synthetic
agucccucuccucucgggu

SEQ ID NO: 2296 - RNA, 19 nt, Artificial Sequence
  Synthetic
gucccucuccucucggguc

SEQ ID NO: 2297 - RNA, 19 nt, Artificial Sequence
  Synthetic
ucccucuccucucgggucc

SEQ ID NO: 2298 - RNA, 19 nt, Artificial Sequence
  Synthetic
cccucuccucucggguccu

SEQ ID NO: 2299 - RNA, 19 nt, Artificial Sequence
  Synthetic
ccucuccucucggguccug

SEQ ID NO: 2300 - RNA, 19 nt, Artificial Sequence
  Synthetic
cucuccucucggguccugg

SEQ ID NO: 2301 - RNA, 19 nt, Artificial Sequence
  Synthetic
ucuccucucggguccugga

SEQ ID NO: 2302 - RNA, 19 nt, Artificial Sequence
  Synthetic
cuccucucggguccuggag

SEQ ID NO: 2303 - RNA, 19 nt, Artificial Sequence
  Synthetic
uccucucggguccuggagc

SEQ ID NO: 2304 - RNA, 19 nt, Artificial Sequence
  Synthetic
ccucucggguccuggagcc

SEQ ID NO: 2305 - RNA, 19 nt, Artificial Sequence
  Synthetic
cucucggguccuggagccc

SEQ ID NO: 2306 - RNA, 19 nt, Artificial Sequence
  Synthetic
ucucggguccuggagcccc

SEQ ID NO: 2307 - RNA, 19 nt, Artificial Sequence
  Synthetic
cucggguccuggagccccu

SEQ ID NO: 2308 - RNA, 19 nt, Artificial Sequence
  Synthetic
ucggguccuggagccccug

SEQ ID NO: 2309 - RNA, 19 nt, Artificial Sequence
  Synthetic
cggguccuggagccccugc

SEQ ID NO: 2310 - RNA, 19 nt, Artificial Sequence
  Synthetic
ggguccuggagccccugcc

SEQ ID NO: 2311 - RNA, 19 nt, Artificial Sequence
  Synthetic
gguccuggagccccugccc

SEQ ID NO: 2312 - RNA, 19 nt, Artificial Sequence
  Synthetic
guccuggagccccugcccu

SEQ ID NO: 2313 - RNA, 19 nt, Artificial Sequence
  Synthetic
uccuggagccccugcccug

SEQ ID NO: 2314 - RNA, 19 nt, Artificial Sequence
  Synthetic
ccuggagccccugcccugu

SEQ ID NO: 2315 - RNA, 19 nt, Artificial Sequence
  Synthetic
cuggagccccugcccuguc

SEQ ID NO: 2316 - RNA, 19 nt, Artificial Sequence
  Synthetic
uggagccccugcccugucc

SEQ ID NO: 2317 - RNA, 19 nt, Artificial Sequence
  Synthetic
ggagccccugcccuguccu

SEQ ID NO: 2318 - RNA, 19 nt, Artificial Sequence
  Synthetic
gagccccugcccuguccug

SEQ ID NO: 2319 - RNA, 19 nt, Artificial Sequence
  Synthetic
agccccugcccuguccugg

SEQ ID NO: 2320 - RNA, 19 nt, Artificial Sequence
  Synthetic
gccccugcccuguccuggc

SEQ ID NO: 2321 - RNA, 19 nt, Artificial Sequence
  Synthetic
ccccugcccuguccuggcg

SEQ ID NO: 2322 - RNA, 19 nt, Artificial Sequence
  Synthetic
cccugcccuguccuggcgu

SEQ ID NO: 2323 - RNA, 19 nt, Artificial Sequence
  Synthetic
ccugcccuguccuggcguc

SEQ ID NO: 2324 - RNA, 19 nt, Artificial Sequence
  Synthetic
cugcccuguccuggcgucu

SEQ ID NO: 2325 - RNA, 19 nt, Artificial Sequence
  Synthetic
ugcccuguccuggcgucuu

SEQ ID NO: 2326 - RNA, 19 nt, Artificial Sequence
  Synthetic
gcccuguccuggcgucuua

SEQ ID NO: 2327 - RNA, 19 nt, Artificial Sequence
  Synthetic
cccuguccuggcgucuuag

SEQ ID NO: 2328 - RNA, 19 nt, Artificial Sequence
  Synthetic
ccuguccuggcgucuuagc

SEQ ID NO: 2329 - RNA, 19 nt, Artificial Sequence
  Synthetic
cuguccuggcgucuuagcc

SEQ ID NO: 2330 - RNA, 19 nt, Artificial Sequence
  Synthetic
uguccuggcgucuuagccg

SEQ ID NO: 2331 - RNA, 19 nt, Artificial Sequence
  Synthetic
guccuggcgucuuagccgg

SEQ ID NO: 2332 - RNA, 19 nt, Artificial Sequence
  Synthetic
uccuggcgucuuagccgga

SEQ ID NO: 2333 - RNA, 19 nt, Artificial Sequence
  Synthetic
ccuggcgucuuagccggac

SEQ ID NO: 2334 - RNA, 19 nt, Artificial Sequence
  Synthetic
cuggcgucuuagccggaca

SEQ ID NO: 2335 - RNA, 19 nt, Artificial Sequence
  Synthetic
uggcgucuuagccggacac

SEQ ID NO: 2336 - RNA, 19 nt, Artificial Sequence
  Synthetic
ggcgucuuagccggacaca

SEQ ID NO: 2337 - RNA, 19 nt, Artificial Sequence
  Synthetic
gcgucuuagccggacacac

SEQ ID NO: 2338 - RNA, 19 nt, Artificial Sequence
  Synthetic
cgucuuagccggacacacc

SEQ ID NO: 2339 - RNA, 19 nt, Artificial Sequence
  Synthetic
gucuuagccggacacaccu

SEQ ID NO: 2340 - RNA, 19 nt, Artificial Sequence
  Synthetic
ucuuagccggacacaccug

SEQ ID NO: 2341 - RNA, 19 nt, Artificial Sequence
  Synthetic
cuuagccggacacaccugc

SEQ ID NO: 2342 - RNA, 19 nt, Artificial Sequence
  Synthetic
uuagccggacacaccugcc

SEQ ID NO: 2343 - RNA, 19 nt, Artificial Sequence
  Synthetic
uagccggacacaccugccc

SEQ ID NO: 2344 - RNA, 19 nt, Artificial Sequence
  Synthetic
agccggacacaccugcccc

SEQ ID NO: 2345 - RNA, 19 nt, Artificial Sequence
  Synthetic
gccggacacaccugccccg

SEQ ID NO: 2346 - RNA, 19 nt, Artificial Sequence
  Synthetic
ccggacacaccugccccgc

SEQ ID NO: 2347 - RNA, 19 nt, Artificial Sequence
  Synthetic
cggacacaccugccccgcg

SEQ ID NO: 2348 - RNA, 19 nt, Artificial Sequence
  Synthetic
ggacacaccugccccgcgc

SEQ ID NO: 2349 - RNA, 19 nt, Artificial Sequence
  Synthetic
gacacaccugccccgcgcc

SEQ ID NO: 2350 - RNA, 19 nt, Artificial Sequence
  Synthetic
acacaccugccccgcgccg

SEQ ID NO: 2351 - RNA, 19 nt, Artificial Sequence
  Synthetic
cacaccugccccgcgccgg

SEQ ID NO: 2352 - RNA, 19 nt, Artificial Sequence
  Synthetic
acaccugccccgcgccggu

SEQ ID NO: 2353 - RNA, 19 nt, Artificial Sequence
  Synthetic
caccugccccgcgccgguc

SEQ ID NO: 2354 - RNA, 19 nt, Artificial Sequence
  Synthetic
accugccccgcgccggucc

SEQ ID NO: 2355 - RNA, 19 nt, Artificial Sequence
  Synthetic
ccugccccgcgccgguccc

SEQ ID NO: 2356 - RNA, 19 nt, Artificial Sequence
  Synthetic
cugccccgcgccggucccc

SEQ ID NO: 2357 - RNA, 19 nt, Artificial Sequence
  Synthetic
ugccccgcgccgguccccg

SEQ ID NO: 2358 - RNA, 19 nt, Artificial Sequence
  Synthetic
gccccgcgccgguccccgc

SEQ ID NO: 2359 - RNA, 19 nt, Artificial Sequence
  Synthetic
ccccgcgccgguccccgcu

SEQ ID NO: 2360 - RNA, 19 nt, Artificial Sequence
  Synthetic
cccgcgccgguccccgcua

SEQ ID NO: 2361 - RNA, 19 nt, Artificial Sequence
  Synthetic
ccgcgccgguccccgcuau

SEQ ID NO: 2362 - RNA, 19 nt, Artificial Sequence
  Synthetic
cgcgccgguccccgcuauu

SEQ ID NO: 2363 - RNA, 19 nt, Artificial Sequence
  Synthetic
gcgccgguccccgcuauua

SEQ ID NO: 2364 - RNA, 19 nt, Artificial Sequence
  Synthetic
cgccgguccccgcuauuac

SEQ ID NO: 2365 - RNA, 19 nt, Artificial Sequence
  Synthetic
gccgguccccgcuauuacu

SEQ ID NO: 2366 - RNA, 19 nt, Artificial Sequence
  Synthetic
ccgguccccgcuauuacug

SEQ ID NO: 2367 - RNA, 19 nt, Artificial Sequence
  Synthetic
cgguccccgcuauuacugu

SEQ ID NO: 2368 - RNA, 19 nt, Artificial Sequence
  Synthetic
gguccccgcuauuacuguc

SEQ ID NO: 2369 - RNA, 19 nt, Artificial Sequence
  Synthetic
guccccgcuauuacugucu

SEQ ID NO: 2370 - RNA, 19 nt, Artificial Sequence
  Synthetic
uccccgcuauuacugucug

SEQ ID NO: 2371 - RNA, 19 nt, Artificial Sequence
  Synthetic
ccccgcuauuacugucugc

SEQ ID NO: 2372 - RNA, 19 nt, Artificial Sequence
  Synthetic
cccgcuauuacugucugca

SEQ ID NO: 2373 - RNA, 19 nt, Artificial Sequence
  Synthetic
ccgcuauuacugucugcac

SEQ ID NO: 2374 - RNA, 19 nt, Artificial Sequence
  Synthetic
cgcuauuacugucugcacc

SEQ ID NO: 2375 - RNA, 19 nt, Artificial Sequence
  Synthetic
gcuauuacugucugcaccu

SEQ ID NO: 2376 - RNA, 19 nt, Artificial Sequence
  Synthetic
cuauuacugucugcaccua

SEQ ID NO: 2377 - RNA, 19 nt, Artificial Sequence
  Synthetic
uauuacugucugcaccuac

SEQ ID NO: 2378 - RNA, 19 nt, Artificial Sequence
  Synthetic
auuacugucugcaccuacg

SEQ ID NO: 2379 - RNA, 19 nt, Artificial Sequence
  Synthetic
uuacugucugcaccuacga

SEQ ID NO: 2380 - RNA, 19 nt, Artificial Sequence
  Synthetic
uacugucugcaccuacgaa

SEQ ID NO: 2381 - RNA, 19 nt, Artificial Sequence
  Synthetic
acugucugcaccuacgaag

SEQ ID NO: 2382 - RNA, 19 nt, Artificial Sequence
  Synthetic
cugucugcaccuacgaagc

SEQ ID NO: 2383 - RNA, 19 nt, Artificial Sequence
  Synthetic
ugucugcaccuacgaagca

SEQ ID NO: 2384 - RNA, 19 nt, Artificial Sequence
  Synthetic
gucugcaccuacgaagcau

SEQ ID NO: 2385 - RNA, 19 nt, Artificial Sequence
  Synthetic
ucugcaccuacgaagcaug

SEQ ID NO: 2386 - RNA, 19 nt, Artificial Sequence
  Synthetic
cugcaccuacgaagcaugc

SEQ ID NO: 2387 - RNA, 19 nt, Artificial Sequence
  Synthetic
ugcaccuacgaagcaugcc

SEQ ID NO: 2388 - RNA, 19 nt, Artificial Sequence
  Synthetic
gcaccuacgaagcaugcca

SEQ ID NO: 2389 - RNA, 19 nt, Artificial Sequence
  Synthetic
caccuacgaagcaugccag

SEQ ID NO: 2390 - RNA, 19 nt, Artificial Sequence
  Synthetic
accuacgaagcaugccagc

SEQ ID NO: 2391 - RNA, 19 nt, Artificial Sequence
  Synthetic
ccuacgaagcaugccagcu

SEQ ID NO: 2392 - RNA, 19 nt, Artificial Sequence
  Synthetic
cuacgaagcaugccagcuu

SEQ ID NO: 2393 - RNA, 19 nt, Artificial Sequence
  Synthetic
uacgaagcaugccagcuuc

SEQ ID NO: 2394 - RNA, 19 nt, Artificial Sequence
  Synthetic
acgaagcaugccagcuucc

SEQ ID NO: 2395 - RNA, 19 nt, Artificial Sequence
  Synthetic
cgaagcaugccagcuuccu

SEQ ID NO: 2396 - RNA, 19 nt, Artificial Sequence
  Synthetic
gaagcaugccagcuuccua

SEQ ID NO: 2397 - RNA, 19 nt, Artificial Sequence
  Synthetic
aagcaugccagcuuccuag

SEQ ID NO: 2398 - RNA, 19 nt, Artificial Sequence
  Synthetic
agcaugccagcuuccuagg

SEQ ID NO: 2399 - RNA, 19 nt, Artificial Sequence
  Synthetic
gcaugccagcuuccuagga

SEQ ID NO: 2400 - RNA, 19 nt, Artificial Sequence
  Synthetic
caugccagcuuccuaggau

SEQ ID NO: 2401 - RNA, 19 nt, Artificial Sequence
  Synthetic
augccagcuuccuaggauu

SEQ ID NO: 2402 - RNA, 19 nt, Artificial Sequence
  Synthetic
ugccagcuuccuaggauug

SEQ ID NO: 2403 - RNA, 19 nt, Artificial Sequence
  Synthetic
gccagcuuccuaggauugg

SEQ ID NO: 2404 - RNA, 19 nt, Artificial Sequence
  Synthetic
ccagcuuccuaggauuggc

SEQ ID NO: 2405 - RNA, 19 nt, Artificial Sequence
  Synthetic
cagcuuccuaggauuggcg

SEQ ID NO: 2406 - RNA, 19 nt, Artificial Sequence
  Synthetic
agcuuccuaggauuggcgg

SEQ ID NO: 2407 - RNA, 19 nt, Artificial Sequence
  Synthetic
gcuuccuaggauuggcggg

SEQ ID NO: 2408 - RNA, 19 nt, Artificial Sequence
  Synthetic
cuuccuaggauuggcgggg

SEQ ID NO: 2409 - RNA, 19 nt, Artificial Sequence
  Synthetic
uuccuaggauuggcgggga

SEQ ID NO: 2410 - RNA, 19 nt, Artificial Sequence
  Synthetic
uccuaggauuggcggggau

SEQ ID NO: 2411 - RNA, 19 nt, Artificial Sequence
  Synthetic
ccuaggauuggcggggauu

SEQ ID NO: 2412 - RNA, 19 nt, Artificial Sequence
  Synthetic
cuaggauuggcggggauug

SEQ ID NO: 2413 - RNA, 19 nt, Artificial Sequence
  Synthetic
uaggauuggcggggauuga

SEQ ID NO: 2414 - RNA, 19 nt, Artificial Sequence
  Synthetic
aggauuggcggggauugau

SEQ ID NO: 2415 - RNA, 19 nt, Artificial Sequence
  Synthetic
ggauuggcggggauugauc

SEQ ID NO: 2416 - RNA, 19 nt, Artificial Sequence
  Synthetic
gauuggcggggauugaucu

SEQ ID NO: 2417 - RNA, 19 nt, Artificial Sequence
  Synthetic
auuggcggggauugaucua

SEQ ID NO: 2418 - RNA, 19 nt, Artificial Sequence
  Synthetic
uuggcggggauugaucuag

SEQ ID NO: 2419 - RNA, 19 nt, Artificial Sequence
  Synthetic
uggcggggauugaucuagc

SEQ ID NO: 2420 - RNA, 19 nt, Artificial Sequence
  Synthetic
ggcggggauugaucuagcg

SEQ ID NO: 2421 - RNA, 19 nt, Artificial Sequence
  Synthetic
gcggggauugaucuagcgg

SEQ ID NO: 2422 - RNA, 19 nt, Artificial Sequence
  Synthetic
cggggauugaucuagcggg

SEQ ID NO: 2423 - RNA, 19 nt, Artificial Sequence
  Synthetic
ggggauugaucuagcgggc

SEQ ID NO: 2424 - RNA, 19 nt, Artificial Sequence
  Synthetic
gggauugaucuagcgggcu

SEQ ID NO: 2425 - RNA, 19 nt, Artificial Sequence
  Synthetic
ggauugaucuagcgggcuc

SEQ ID NO: 2426 - RNA, 19 nt, Artificial Sequence
  Synthetic
gauugaucuagcgggcucc

SEQ ID NO: 2427 - RNA, 19 nt, Artificial Sequence
  Synthetic
auugaucuagcgggcuccu

SEQ ID NO: 2428 - RNA, 19 nt, Artificial Sequence
  Synthetic
uugaucuagcgggcuccuc

SEQ ID NO: 2429 - RNA, 19 nt, Artificial Sequence
  Synthetic
ugaucuagcgggcuccucu

SEQ ID NO: 2430 - RNA, 19 nt, Artificial Sequence
  Synthetic
gaucuagcgggcuccucuu

SEQ ID NO: 2431 - RNA, 19 nt, Artificial Sequence
  Synthetic
aucuagcgggcuccucuug

SEQ ID NO: 2432 - RNA, 19 nt, Artificial Sequence
  Synthetic
ucuagcgggcuccucuugg

SEQ ID NO: 2433 - RNA, 19 nt, Artificial Sequence
  Synthetic
cuagcgggcuccucuuggg

SEQ ID NO: 2434 - RNA, 19 nt, Artificial Sequence
  Synthetic
uagcgggcuccucuugggu

SEQ ID NO: 2435 - RNA, 19 nt, Artificial Sequence
  Synthetic
agcgggcuccucuugggug

SEQ ID NO: 2436 - RNA, 19 nt, Artificial Sequence
  Synthetic
gcgggcuccucuugggugc

SEQ ID NO: 2437 - RNA, 19 nt, Artificial Sequence
  Synthetic
cgggcuccucuugggugcg

SEQ ID NO: 2438 - RNA, 19 nt, Artificial Sequence
  Synthetic
gggcuccucuugggugcga

SEQ ID NO: 2439 - RNA, 19 nt, Artificial Sequence
  Synthetic
ggcuccucuugggugcgaa

SEQ ID NO: 2440 - RNA, 19 nt, Artificial Sequence
  Synthetic
gcuccucuugggugcgaau

SEQ ID NO: 2441 - RNA, 19 nt, Artificial Sequence
  Synthetic
cuccucuugggugcgaauu

SEQ ID NO: 2442 - RNA, 19 nt, Artificial Sequence
  Synthetic
uccucuugggugcgaauua

SEQ ID NO: 2443 - RNA, 19 nt, Artificial Sequence
  Synthetic
ccucuugggugcgaauuag

SEQ ID NO: 2444 - RNA, 19 nt, Artificial Sequence
  Synthetic
cucuugggugcgaauuagg

SEQ ID NO: 2445 - RNA, 19 nt, Artificial Sequence
  Synthetic
ucuugggugcgaauuaggg

SEQ ID NO: 2446 - RNA, 19 nt, Artificial Sequence
  Synthetic
cuugggugcgaauuagggg

SEQ ID NO: 2447 - RNA, 19 nt, Artificial Sequence
  Synthetic
uugggugcgaauuagggga

SEQ ID NO: 2448 - RNA, 19 nt, Artificial Sequence
  Synthetic
ugggugcgaauuaggggaa

SEQ ID NO: 2449 - RNA, 19 nt, Artificial Sequence
  Synthetic
gggugcgaauuaggggaag

SEQ ID NO: 2450 - RNA, 19 nt, Artificial Sequence
  Synthetic
ggugcgaauuaggggaaga

SEQ ID NO: 2451 - RNA, 19 nt, Artificial Sequence
  Synthetic
gugcgaauuaggggaagaa

SEQ ID NO: 2452 - RNA, 19 nt, Artificial Sequence
  Synthetic
ugcgaauuaggggaagaaa

SEQ ID NO: 2453 - RNA, 19 nt, Artificial Sequence
  Synthetic
gcgaauuaggggaagaaaa

SEQ ID NO: 2454 - RNA, 19 nt, Artificial Sequence
  Synthetic
cgaauuaggggaagaaaag

SEQ ID NO: 2455 - RNA, 19 nt, Artificial Sequence
  Synthetic
gaauuaggggaagaaaagu

SEQ ID NO: 2456 - RNA, 19 nt, Artificial Sequence
  Synthetic
aauuaggggaagaaaaguc

SEQ ID NO: 2457 - RNA, 19 nt, Artificial Sequence
  Synthetic
auuaggggaagaaaagucc

SEQ ID NO: 2458 - RNA, 19 nt, Artificial Sequence
  Synthetic
uuaggggaagaaaaguccg

SEQ ID NO: 2459 - RNA, 19 nt, Artificial Sequence
  Synthetic
uaggggaagaaaaguccgg

SEQ ID NO: 2460 - RNA, 19 nt, Artificial Sequence
  Synthetic
aggggaagaaaaguccggc

SEQ ID NO: 2461 - RNA, 19 nt, Artificial Sequence
  Synthetic
ggggaagaaaaguccggcc

SEQ ID NO: 2462 - RNA, 19 nt, Artificial Sequence
  Synthetic
gggaagaaaaguccggccg

SEQ ID NO: 2463 - RNA, 19 nt, Artificial Sequence
  Synthetic
ggaagaaaaguccggccga

SEQ ID NO: 2464 - RNA, 20 nt, Artificial Sequence
  Synthetic
gaccagugaguuacucugau

SEQ ID NO: 2465 - RNA, 20 nt, Artificial Sequence
  Synthetic
accagugaguuacucugaug

SEQ ID NO: 2466 - RNA, 20 nt, Artificial Sequence
  Synthetic
ccagugaguuacucugaugu

SEQ ID NO: 2467 - RNA, 20 nt, Artificial Sequence
  Synthetic
cagugaguuacucugauguu

SEQ ID NO: 2468 - RNA, 20 nt, Artificial Sequence
  Synthetic
agugaguuacucugauguuu

SEQ ID NO: 2469 - RNA, 20 nt, Artificial Sequence
  Synthetic
gugaguuacucugauguuua

SEQ ID NO: 2470 - RNA, 20 nt, Artificial Sequence
  Synthetic
ugaguuacucugauguuuau

SEQ ID NO: 2471 - RNA, 20 nt, Artificial Sequence
  Synthetic
gaguuacucugauguuuauu

SEQ ID NO: 2472 - RNA, 20 nt, Artificial Sequence
  Synthetic
aguuacucugauguuuauuu

SEQ ID NO: 2473 - RNA, 20 nt, Artificial Sequence
  Synthetic
guuacucugauguuuauuuu

SEQ ID NO: 2474 - RNA, 20 nt, Artificial Sequence
  Synthetic
uuacucugauguuuauuuua

SEQ ID NO: 2475 - RNA, 20 nt, Artificial Sequence
  Synthetic
uacucugauguuuauuuuaa

SEQ ID NO: 2476 - RNA, 20 nt, Artificial Sequence
  Synthetic
acucugauguuuauuuuaau

SEQ ID NO: 2477 - RNA, 20 nt, Artificial Sequence
  Synthetic
cucugauguuuauuuuaaug

SEQ ID NO: 2478 - RNA, 20 nt, Artificial Sequence
  Synthetic
ucugauguuuauuuuaaugc

SEQ ID NO: 2479 - RNA, 20 nt, Artificial Sequence
  Synthetic
cugauguuuauuuuaaugca

SEQ ID NO: 2480 - RNA, 20 nt, Artificial Sequence
  Synthetic
ugauguuuauuuuaaugcau

SEQ ID NO: 2481 - RNA, 20 nt, Artificial Sequence
  Synthetic
gauguuuauuuuaaugcauc

SEQ ID NO: 2482 - RNA, 20 nt, Artificial Sequence
  Synthetic
auguuuauuuuaaugcaucu

SEQ ID NO: 2483 - RNA, 20 nt, Artificial Sequence
  Synthetic
uguuuauuuuaaugcaucuu

SEQ ID NO: 2484 - RNA, 20 nt, Artificial Sequence
  Synthetic
guuuauuuuaaugcaucuua

SEQ ID NO: 2485 - RNA, 20 nt, Artificial Sequence
  Synthetic
uuuauuuuaaugcaucuuag

SEQ ID NO: 2486 - RNA, 20 nt, Artificial Sequence
  Synthetic
uuauuuuaaugcaucuuagu

SEQ ID NO: 2487 - RNA, 20 nt, Artificial Sequence
  Synthetic
uauuuuaaugcaucuuaguc

SEQ ID NO: 2488 - RNA, 20 nt, Artificial Sequence
  Synthetic
auuuuaaugcaucuuagucc

SEQ ID NO: 2489 - RNA, 20 nt, Artificial Sequence
  Synthetic
uuuuaaugcaucuuagucca

SEQ ID NO: 2490 - RNA, 20 nt, Artificial Sequence
  Synthetic
uuuaaugcaucuuaguccac

SEQ ID NO: 2491 - RNA, 20 nt, Artificial Sequence
  Synthetic
uuaaugcaucuuaguccaca

SEQ ID NO: 2492 - RNA, 20 nt, Artificial Sequence
  Synthetic
uaaugcaucuuaguccacac

SEQ ID NO: 2493 - RNA, 20 nt, Artificial Sequence
  Synthetic
aaugcaucuuaguccacaca

SEQ ID NO: 2494 - RNA, 20 nt, Artificial Sequence
  Synthetic
augcaucuuaguccacacag

SEQ ID NO: 2495 - RNA, 20 nt, Artificial Sequence
  Synthetic
ugcaucuuaguccacacagu

SEQ ID NO: 2496 - RNA, 20 nt, Artificial Sequence
  Synthetic
gcaucuuaguccacacaguu

SEQ ID NO: 2497 - RNA, 20 nt, Artificial Sequence
  Synthetic
caucuuaguccacacaguug

SEQ ID NO: 2498 - RNA, 20 nt, Artificial Sequence
  Synthetic
aucuuaguccacacaguugg

SEQ ID NO: 2499 - RNA, 20 nt, Artificial Sequence
  Synthetic
ucuuaguccacacaguuggu

SEQ ID NO: 2500 - RNA, 20 nt, Artificial Sequence
  Synthetic
cuuaguccacacaguuggua

SEQ ID NO: 2501 - RNA, 20 nt, Artificial Sequence
  Synthetic
uuaguccacacaguugguau

SEQ ID NO: 2502 - RNA, 20 nt, Artificial Sequence
  Synthetic
uaguccacacaguugguaua

SEQ ID NO: 2503 - RNA, 20 nt, Artificial Sequence
  Synthetic
aguccacacaguugguauaa

SEQ ID NO: 2504 - RNA, 20 nt, Artificial Sequence
  Synthetic
guccacacaguugguauaaa

SEQ ID NO: 2505 - RNA, 20 nt, Artificial Sequence
  Synthetic
uccacacaguugguauaaaa

SEQ ID NO: 2506 - RNA, 20 nt, Artificial Sequence
  Synthetic
ccacacaguugguauaaaau

SEQ ID NO: 2507 - RNA, 20 nt, Artificial Sequence
  Synthetic
cacacaguugguauaaaauc

SEQ ID NO: 2508 - RNA, 20 nt, Artificial Sequence
  Synthetic
acacaguugguauaaaauca

SEQ ID NO: 2509 - RNA, 20 nt, Artificial Sequence
  Synthetic
cacaguugguauaaaaucag

SEQ ID NO: 2510 - RNA, 20 nt, Artificial Sequence
  Synthetic
acaguugguauaaaaucaga

SEQ ID NO: 2511 - RNA, 20 nt, Artificial Sequence
  Synthetic
caguugguauaaaaucagaa

SEQ ID NO: 2512 - RNA, 20 nt, Artificial Sequence
  Synthetic
aguugguauaaaaucagaaa

SEQ ID NO: 2513 - RNA, 20 nt, Artificial Sequence
  Synthetic
guugguauaaaaucagaaaa

SEQ ID NO: 2514 - RNA, 20 nt, Artificial Sequence
  Synthetic
uugguauaaaaucagaaaau

SEQ ID NO: 2515 - RNA, 20 nt, Artificial Sequence
  Synthetic
ugguauaaaaucagaaaaug

SEQ ID NO: 2516 - RNA, 20 nt, Artificial Sequence
  Synthetic
gguauaaaaucagaaaaugc

SEQ ID NO: 2517 - RNA, 20 nt, Artificial Sequence
  Synthetic
guauaaaaucagaaaaugca

SEQ ID NO: 2518 - RNA, 20 nt, Artificial Sequence
  Synthetic
uauaaaaucagaaaaugcaa

SEQ ID NO: 2519 - RNA, 20 nt, Artificial Sequence
  Synthetic
auaaaaucagaaaaugcaaa

SEQ ID NO: 2520 - RNA, 20 nt, Artificial Sequence
  Synthetic
uaaaaucagaaaaugcaaag

SEQ ID NO: 2521 - RNA, 20 nt, Artificial Sequence
  Synthetic
aaaaucagaaaaugcaaagc

SEQ ID NO: 2522 - RNA, 20 nt, Artificial Sequence
  Synthetic
aaaucagaaaaugcaaagca

SEQ ID NO: 2523 - RNA, 20 nt, Artificial Sequence
  Synthetic
aaucagaaaaugcaaagcaa

SEQ ID NO: 2524 - RNA, 20 nt, Artificial Sequence
  Synthetic
aucagaaaaugcaaagcaaa

SEQ ID NO: 2525 - RNA, 20 nt, Artificial Sequence
  Synthetic
ucagaaaaugcaaagcaaaa

SEQ ID NO: 2526 - RNA, 20 nt, Artificial Sequence
  Synthetic
cagaaaaugcaaagcaaaaa

SEQ ID NO: 2527 - RNA, 20 nt, Artificial Sequence
  Synthetic
agaaaaugcaaagcaaaaac

SEQ ID NO: 2528 - RNA, 20 nt, Artificial Sequence
  Synthetic
gaaaaugcaaagcaaaaaca

SEQ ID NO: 2529 - RNA, 20 nt, Artificial Sequence
  Synthetic
aaaaugcaaagcaaaaacaa

SEQ ID NO: 2530 - RNA, 20 nt, Artificial Sequence
  Synthetic
aaaugcaaagcaaaaacaaa

SEQ ID NO: 2531 - RNA, 20 nt, Artificial Sequence
  Synthetic
aaugcaaagcaaaaacaaaa

SEQ ID NO: 2532 - RNA, 20 nt, Artificial Sequence
  Synthetic
augcaaagcaaaaacaaaag

SEQ ID NO: 2533 - RNA, 20 nt, Artificial Sequence
  Synthetic
ugcaaagcaaaaacaaaagg

SEQ ID NO: 2534 - RNA, 20 nt, Artificial Sequence
  Synthetic
gcaaagcaaaaacaaaaggu

SEQ ID NO: 2535 - RNA, 20 nt, Artificial Sequence
  Synthetic
caaagcaaaaacaaaagguc

SEQ ID NO: 2536 - RNA, 20 nt, Artificial Sequence
  Synthetic
aaagcaaaaacaaaaggucu

SEQ ID NO: 2537 - RNA, 20 nt, Artificial Sequence
  Synthetic
aagcaaaaacaaaaggucug

SEQ ID NO: 2538 - RNA, 20 nt, Artificial Sequence
  Synthetic
agcaaaaacaaaaggucugg

SEQ ID NO: 2539 - RNA, 20 nt, Artificial Sequence
  Synthetic
gcaaaaacaaaaggucugga

SEQ ID NO: 2540 - RNA, 20 nt, Artificial Sequence
  Synthetic
caaaaacaaaaggucuggag

SEQ ID NO: 2541 - RNA, 20 nt, Artificial Sequence
  Synthetic
aaaaacaaaaggucuggagu

SEQ ID NO: 2542 - RNA, 20 nt, Artificial Sequence
  Synthetic
aaaacaaaaggucuggaguc

SEQ ID NO: 2543 - RNA, 20 nt, Artificial Sequence
  Synthetic
aaacaaaaggucuggagucu

SEQ ID NO: 2544 - RNA, 20 nt, Artificial Sequence
  Synthetic
aacaaaaggucuggagucuu

SEQ ID NO: 2545 - RNA, 20 nt, Artificial Sequence
  Synthetic
acaaaaggucuggagucuua

SEQ ID NO: 2546 - RNA, 20 nt, Artificial Sequence
  Synthetic
caaaaggucuggagucuuag

SEQ ID NO: 2547 - RNA, 20 nt, Artificial Sequence
  Synthetic
aaaaggucuggagucuuagc

SEQ ID NO: 2548 - RNA, 20 nt, Artificial Sequence
  Synthetic
aaaggucuggagucuuagca

SEQ ID NO: 2549 - RNA, 20 nt, Artificial Sequence
  Synthetic
aaggucuggagucuuagcau

SEQ ID NO: 2550 - RNA, 20 nt, Artificial Sequence
  Synthetic
aggucuggagucuuagcauc

SEQ ID NO: 2551 - RNA, 20 nt, Artificial Sequence
  Synthetic
ggucuggagucuuagcauca

SEQ ID NO: 2552 - RNA, 20 nt, Artificial Sequence
  Synthetic
gucuggagucuuagcaucag

SEQ ID NO: 2553 - RNA, 20 nt, Artificial Sequence
  Synthetic
ucuggagucuuagcaucaga

SEQ ID NO: 2554 - RNA, 20 nt, Artificial Sequence
  Synthetic
cuggagucuuagcaucagaa

SEQ ID NO: 2555 - RNA, 20 nt, Artificial Sequence
  Synthetic
uggagucuuagcaucagaag

SEQ ID NO: 2556 - RNA, 20 nt, Artificial Sequence
  Synthetic
ggagucuuagcaucagaagg

SEQ ID NO: 2557 - RNA, 20 nt, Artificial Sequence
  Synthetic
gagucuuagcaucagaaggg

SEQ ID NO: 2558 - RNA, 20 nt, Artificial Sequence
  Synthetic
agucuuagcaucagaagggc

SEQ ID NO: 2559 - RNA, 20 nt, Artificial Sequence
  Synthetic
gucuuagcaucagaagggca

SEQ ID NO: 2560 - RNA, 20 nt, Artificial Sequence
  Synthetic
ucuuagcaucagaagggcac

SEQ ID NO: 2561 - RNA, 20 nt, Artificial Sequence
  Synthetic
cuuagcaucagaagggcacc

SEQ ID NO: 2562 - RNA, 20 nt, Artificial Sequence
  Synthetic
uuagcaucagaagggcacca

SEQ ID NO: 2563 - RNA, 20 nt, Artificial Sequence
  Synthetic
uagcaucagaagggcaccau

SEQ ID NO: 2564 - RNA, 20 nt, Artificial Sequence
  Synthetic
agcaucagaagggcaccaua

SEQ ID NO: 2565 - RNA, 20 nt, Artificial Sequence
  Synthetic
gcaucagaagggcaccauau

SEQ ID NO: 2566 - RNA, 20 nt, Artificial Sequence
  Synthetic
caucagaagggcaccauaua

SEQ ID NO: 2567 - RNA, 20 nt, Artificial Sequence
  Synthetic
aucagaagggcaccauauau

SEQ ID NO: 2568 - RNA, 20 nt, Artificial Sequence
  Synthetic
ucagaagggcaccauauaua

SEQ ID NO: 2569 - RNA, 20 nt, Artificial Sequence
  Synthetic
cagaagggcaccauauauac

SEQ ID NO: 2570 - RNA, 20 nt, Artificial Sequence
  Synthetic
agaagggcaccauauauaca

SEQ ID NO: 2571 - RNA, 20 nt, Artificial Sequence
  Synthetic
gaagggcaccauauauacau

SEQ ID NO: 2572 - RNA, 20 nt, Artificial Sequence
  Synthetic
aagggcaccauauauacauc

SEQ ID NO: 2573 - RNA, 20 nt, Artificial Sequence
  Synthetic
agggcaccauauauacaucu

SEQ ID NO: 2574 - RNA, 20 nt, Artificial Sequence
  Synthetic
gggcaccauauauacaucua

SEQ ID NO: 2575 - RNA, 20 nt, Artificial Sequence
  Synthetic
ggcaccauauauacaucuac

SEQ ID NO: 2576 - RNA, 20 nt, Artificial Sequence
  Synthetic
gcaccauauauacaucuaca

SEQ ID NO: 2577 - RNA, 20 nt, Artificial Sequence
  Synthetic
caccauauauacaucuacag

SEQ ID NO: 2578 - RNA, 20 nt, Artificial Sequence
  Synthetic
accauauauacaucuacagu

SEQ ID NO: 2579 - RNA, 20 nt, Artificial Sequence
  Synthetic
ccauauauacaucuacaguu

SEQ ID NO: 2580 - RNA, 20 nt, Artificial Sequence
  Synthetic
cauauauacaucuacaguug

SEQ ID NO: 2581 - RNA, 20 nt, Artificial Sequence
  Synthetic
auauauacaucuacaguugg

SEQ ID NO: 2582 - RNA, 20 nt, Artificial Sequence
  Synthetic
uauauacaucuacaguuggu

SEQ ID NO: 2583 - RNA, 20 nt, Artificial Sequence
  Synthetic
auauacaucuacaguuggug

SEQ ID NO: 2584 - RNA, 20 nt, Artificial Sequence
  Synthetic
uauacaucuacaguuggugg

SEQ ID NO: 2585 - RNA, 20 nt, Artificial Sequence
  Synthetic
auacaucuacaguugguggc

SEQ ID NO: 2586 - RNA, 20 nt, Artificial Sequence
  Synthetic
uacaucuacaguugguggcc

SEQ ID NO: 2587 - RNA, 20 nt, Artificial Sequence
  Synthetic
acaucuacaguugguggcca

SEQ ID NO: 2588 - RNA, 20 nt, Artificial Sequence
  Synthetic
caucuacaguugguggccaa

SEQ ID NO: 2589 - RNA, 20 nt, Artificial Sequence
  Synthetic
aucuacaguugguggccaau

SEQ ID NO: 2590 - RNA, 20 nt, Artificial Sequence
  Synthetic
ucuacaguugguggccaaua

SEQ ID NO: 2591 - RNA, 20 nt, Artificial Sequence
  Synthetic
cuacaguugguggccaauac

SEQ ID NO: 2592 - RNA, 20 nt, Artificial Sequence
  Synthetic
uacaguugguggccaauaca

SEQ ID NO: 2593 - RNA, 20 nt, Artificial Sequence
  Synthetic
acaguugguggccaauacaa

SEQ ID NO: 2594 - RNA, 20 nt, Artificial Sequence
  Synthetic
caguugguggccaauacaag

SEQ ID NO: 2595 - RNA, 20 nt, Artificial Sequence
  Synthetic
aguugguggccaauacaagu

SEQ ID NO: 2596 - RNA, 20 nt, Artificial Sequence
  Synthetic
guugguggccaauacaaguc

SEQ ID NO: 2597 - RNA, 20 nt, Artificial Sequence
  Synthetic
uugguggccaauacaaguca

SEQ ID NO: 2598 - RNA, 20 nt, Artificial Sequence
  Synthetic
ugguggccaauacaagucau

SEQ ID NO: 2599 - RNA, 20 nt, Artificial Sequence
  Synthetic
gguggccaauacaagucauu

SEQ ID NO: 2600 - RNA, 20 nt, Artificial Sequence
  Synthetic
guggccaauacaagucauug

SEQ ID NO: 2601 - RNA, 20 nt, Artificial Sequence
  Synthetic
uggccaauacaagucauugc

SEQ ID NO: 2602 - RNA, 20 nt, Artificial Sequence
  Synthetic
ggccaauacaagucauugcc

SEQ ID NO: 2603 - RNA, 20 nt, Artificial Sequence
  Synthetic
gccaauacaagucauugcca

SEQ ID NO: 2604 - RNA, 20 nt, Artificial Sequence
  Synthetic
ccaauacaagucauugccag

SEQ ID NO: 2605 - RNA, 20 nt, Artificial Sequence
  Synthetic
caauacaagucauugccaga

SEQ ID NO: 2606 - RNA, 20 nt, Artificial Sequence
  Synthetic
aauacaagucauugccagac

SEQ ID NO: 2607 - RNA, 20 nt, Artificial Sequence
  Synthetic
auacaagucauugccagaca

SEQ ID NO: 2608 - RNA, 20 nt, Artificial Sequence
  Synthetic
uacaagucauugccagacag

SEQ ID NO: 2609 - RNA, 20 nt, Artificial Sequence
  Synthetic
acaagucauugccagacagu

SEQ ID NO: 2610 - RNA, 20 nt, Artificial Sequence
  Synthetic
caagucauugccagacaguc

SEQ ID NO: 2611 - RNA, 20 nt, Artificial Sequence
  Synthetic
aagucauugccagacagucc

SEQ ID NO: 2612 - RNA, 20 nt, Artificial Sequence
  Synthetic
agucauugccagacaguccu

SEQ ID NO: 2613 - RNA, 20 nt, Artificial Sequence
  Synthetic
gucauugccagacaguccuu

SEQ ID NO: 2614 - RNA, 20 nt, Artificial Sequence
  Synthetic
ucauugccagacaguccuug

SEQ ID NO: 2615 - RNA, 20 nt, Artificial Sequence
  Synthetic
cauugccagacaguccuugg

SEQ ID NO: 2616 - RNA, 20 nt, Artificial Sequence
  Synthetic
auugccagacaguccuugga

SEQ ID NO: 2617 - RNA, 20 nt, Artificial Sequence
  Synthetic
uugccagacaguccuuggag

SEQ ID NO: 2618 - RNA, 20 nt, Artificial Sequence
  Synthetic
ugccagacaguccuuggagg

SEQ ID NO: 2619 - RNA, 20 nt, Artificial Sequence
  Synthetic
gccagacaguccuuggaggc

SEQ ID NO: 2620 - RNA, 20 nt, Artificial Sequence
  Synthetic
ccagacaguccuuggaggca

SEQ ID NO: 2621 - RNA, 20 nt, Artificial Sequence
  Synthetic
cagacaguccuuggaggcac

SEQ ID NO: 2622 - RNA, 20 nt, Artificial Sequence
  Synthetic
agacaguccuuggaggcaca

SEQ ID NO: 2623 - RNA, 20 nt, Artificial Sequence
  Synthetic
gacaguccuuggaggcacag

SEQ ID NO: 2624 - RNA, 20 nt, Artificial Sequence
  Synthetic
acaguccuuggaggcacaga

SEQ ID NO: 2625 - RNA, 20 nt, Artificial Sequence
  Synthetic
caguccuuggaggcacagaa

SEQ ID NO: 2626 - RNA, 20 nt, Artificial Sequence
  Synthetic
aguccuuggaggcacagaac

SEQ ID NO: 2627 - RNA, 20 nt, Artificial Sequence
  Synthetic
guccuuggaggcacagaaca

SEQ ID NO: 2628 - RNA, 20 nt, Artificial Sequence
  Synthetic
uccuuggaggcacagaacag

SEQ ID NO: 2629 - RNA, 20 nt, Artificial Sequence
  Synthetic
ccuuggaggcacagaacagc

SEQ ID NO: 2630 - RNA, 20 nt, Artificial Sequence
  Synthetic
cuuggaggcacagaacagcc

SEQ ID NO: 2631 - RNA, 20 nt, Artificial Sequence
  Synthetic
uuggaggcacagaacagccu

SEQ ID NO: 2632 - RNA, 20 nt, Artificial Sequence
  Synthetic
uggaggcacagaacagccua

SEQ ID NO: 2633 - RNA, 20 nt, Artificial Sequence
  Synthetic
ggaggcacagaacagccuag

SEQ ID NO: 2634 - RNA, 20 nt, Artificial Sequence
  Synthetic
gaggcacagaacagccuaga

SEQ ID NO: 2635 - RNA, 20 nt, Artificial Sequence
  Synthetic
aggcacagaacagccuagac

SEQ ID NO: 2636 - RNA, 20 nt, Artificial Sequence
  Synthetic
ggcacagaacagccuagacc

SEQ ID NO: 2637 - RNA, 20 nt, Artificial Sequence
  Synthetic
gcacagaacagccuagaccc

SEQ ID NO: 2638 - RNA, 20 nt, Artificial Sequence
  Synthetic
cacagaacagccuagaccca

SEQ ID NO: 2639 - RNA, 20 nt, Artificial Sequence
  Synthetic
acagaacagccuagacccag

SEQ ID NO: 2640 - RNA, 20 nt, Artificial Sequence
  Synthetic
cagaacagccuagacccagc

SEQ ID NO: 2641 - RNA, 20 nt, Artificial Sequence
  Synthetic
agaacagccuagacccagcc

SEQ ID NO: 2642 - RNA, 20 nt, Artificial Sequence
  Synthetic
gaacagccuagacccagcca

SEQ ID NO: 2643 - RNA, 20 nt, Artificial Sequence
  Synthetic
aacagccuagacccagccaa

SEQ ID NO: 2644 - RNA, 20 nt, Artificial Sequence
  Synthetic
acagccuagacccagccaag

SEQ ID NO: 2645 - RNA, 20 nt, Artificial Sequence
  Synthetic
cagccuagacccagccaagc

SEQ ID NO: 2646 - RNA, 20 nt, Artificial Sequence
  Synthetic
agccuagacccagccaagcu

SEQ ID NO: 2647 - RNA, 20 nt, Artificial Sequence
  Synthetic
gccuagacccagccaagcuc

SEQ ID NO: 2648 - RNA, 20 nt, Artificial Sequence
  Synthetic
ccuagacccagccaagcucu

SEQ ID NO: 2649 - RNA, 20 nt, Artificial Sequence
  Synthetic
cuagacccagccaagcucua

SEQ ID NO: 2650 - RNA, 20 nt, Artificial Sequence
  Synthetic
uagacccagccaagcucuag

SEQ ID NO: 2651 - RNA, 20 nt, Artificial Sequence
  Synthetic
agacccagccaagcucuagg

SEQ ID NO: 2652 - RNA, 20 nt, Artificial Sequence
  Synthetic
gacccagccaagcucuagga

SEQ ID NO: 2653 - RNA, 20 nt, Artificial Sequence
  Synthetic
acccagccaagcucuaggaa

SEQ ID NO: 2654 - RNA, 20 nt, Artificial Sequence
  Synthetic
cccagccaagcucuaggaac

SEQ ID NO: 2655 - RNA, 20 nt, Artificial Sequence
  Synthetic
ccagccaagcucuaggaacu

SEQ ID NO: 2656 - RNA, 20 nt, Artificial Sequence
  Synthetic
cagccaagcucuaggaacuc

SEQ ID NO: 2657 - RNA, 20 nt, Artificial Sequence
  Synthetic
agccaagcucuaggaacuca

SEQ ID NO: 2658 - RNA, 20 nt, Artificial Sequence
  Synthetic
gccaagcucuaggaacucac

SEQ ID NO: 2659 - RNA, 20 nt, Artificial Sequence
  Synthetic
ccaagcucuaggaacucacg

SEQ ID NO: 2660 - RNA, 20 nt, Artificial Sequence
  Synthetic
caagcucuaggaacucacgg

SEQ ID NO: 2661 - RNA, 20 nt, Artificial Sequence
  Synthetic
aagcucuaggaacucacggu

SEQ ID NO: 2662 - RNA, 20 nt, Artificial Sequence
  Synthetic
agcucuaggaacucacgguc

SEQ ID NO: 2663 - RNA, 20 nt, Artificial Sequence
  Synthetic
gcucuaggaacucacggucc

SEQ ID NO: 2664 - RNA, 20 nt, Artificial Sequence
  Synthetic
cucuaggaacucacgguccc

SEQ ID NO: 2665 - RNA, 20 nt, Artificial Sequence
  Synthetic
ucuaggaacucacgguccca

SEQ ID NO: 2666 - RNA, 20 nt, Artificial Sequence
  Synthetic
cuaggaacucacggucccaa

SEQ ID NO: 2667 - RNA, 20 nt, Artificial Sequence
  Synthetic
uaggaacucacggucccaag

SEQ ID NO: 2668 - RNA, 20 nt, Artificial Sequence
  Synthetic
aggaacucacggucccaagg

SEQ ID NO: 2669 - RNA, 20 nt, Artificial Sequence
  Synthetic
ggaacucacggucccaagga

SEQ ID NO: 2670 - RNA, 20 nt, Artificial Sequence
  Synthetic
gaacucacggucccaaggag

SEQ ID NO: 2671 - RNA, 20 nt, Artificial Sequence
  Synthetic
aacucacggucccaaggagu

SEQ ID NO: 2672 - RNA, 20 nt, Artificial Sequence
  Synthetic
acucacggucccaaggaguc

SEQ ID NO: 2673 - RNA, 20 nt, Artificial Sequence
  Synthetic
cucacggucccaaggagucu

SEQ ID NO: 2674 - RNA, 20 nt, Artificial Sequence
  Synthetic
ucacggucccaaggagucua

SEQ ID NO: 2675 - RNA, 20 nt, Artificial Sequence
  Synthetic
cacggucccaaggagucuag

SEQ ID NO: 2676 - RNA, 20 nt, Artificial Sequence
  Synthetic
acggucccaaggagucuaga

SEQ ID NO: 2677 - RNA, 20 nt, Artificial Sequence
  Synthetic
cggucccaaggagucuagac

SEQ ID NO: 2678 - RNA, 20 nt, Artificial Sequence
  Synthetic
ggucccaaggagucuagacg

SEQ ID NO: 2679 - RNA, 20 nt, Artificial Sequence
  Synthetic
gucccaaggagucuagacgc

SEQ ID NO: 2680 - RNA, 20 nt, Artificial Sequence
  Synthetic
ucccaaggagucuagacgcu

SEQ ID NO: 2681 - RNA, 20 nt, Artificial Sequence
  Synthetic
cccaaggagucuagacgcuu

SEQ ID NO: 2682 - RNA, 20 nt, Artificial Sequence
  Synthetic
ccaaggagucuagacgcuug

SEQ ID NO: 2683 - RNA, 20 nt, Artificial Sequence
  Synthetic
caaggagucuagacgcuugu

SEQ ID NO: 2684 - RNA, 20 nt, Artificial Sequence
  Synthetic
aaggagucuagacgcuuguu

SEQ ID NO: 2685 - RNA, 20 nt, Artificial Sequence
  Synthetic
aggagucuagacgcuuguuc

SEQ ID NO: 2686 - RNA, 20 nt, Artificial Sequence
  Synthetic
ggagucuagacgcuuguucu

SEQ ID NO: 2687 - RNA, 20 nt, Artificial Sequence
  Synthetic
gagucuagacgcuuguucug

SEQ ID NO: 2688 - RNA, 20 nt, Artificial Sequence
  Synthetic
agucuagacgcuuguucuga

SEQ ID NO: 2689 - RNA, 20 nt, Artificial Sequence
  Synthetic
gucuagacgcuuguucugau

SEQ ID NO: 2690 - RNA, 20 nt, Artificial Sequence
  Synthetic
ucuagacgcuuguucugaug

SEQ ID NO: 2691 - RNA, 20 nt, Artificial Sequence
  Synthetic
cuagacgcuuguucugaugc

SEQ ID NO: 2692 - RNA, 20 nt, Artificial Sequence
  Synthetic
uagacgcuuguucugaugcu

SEQ ID NO: 2693 - RNA, 20 nt, Artificial Sequence
  Synthetic
agacgcuuguucugaugcuc

SEQ ID NO: 2694 - RNA, 20 nt, Artificial Sequence
  Synthetic
gacgcuuguucugaugcucc

SEQ ID NO: 2695 - RNA, 20 nt, Artificial Sequence
  Synthetic
acgcuuguucugaugcuccg

SEQ ID NO: 2696 - RNA, 20 nt, Artificial Sequence
  Synthetic
cgcuuguucugaugcuccga

SEQ ID NO: 2697 - RNA, 20 nt, Artificial Sequence
  Synthetic
gcuuguucugaugcuccgac

SEQ ID NO: 2698 - RNA, 20 nt, Artificial Sequence
  Synthetic
cuuguucugaugcuccgacc

SEQ ID NO: 2699 - RNA, 20 nt, Artificial Sequence
  Synthetic
uuguucugaugcuccgaccg

SEQ ID NO: 2700 - RNA, 20 nt, Artificial Sequence
  Synthetic
uguucugaugcuccgaccgu

SEQ ID NO: 2701 - RNA, 20 nt, Artificial Sequence
  Synthetic
guucugaugcuccgaccgua

SEQ ID NO: 2702 - RNA, 20 nt, Artificial Sequence
  Synthetic
uucugaugcuccgaccguaa

SEQ ID NO: 2703 - RNA, 20 nt, Artificial Sequence
  Synthetic
ucugaugcuccgaccguaag

SEQ ID NO: 2704 - RNA, 20 nt, Artificial Sequence
  Synthetic
cugaugcuccgaccguaaga

SEQ ID NO: 2705 - RNA, 20 nt, Artificial Sequence
  Synthetic
ugaugcuccgaccguaagaa

SEQ ID NO: 2706 - RNA, 20 nt, Artificial Sequence
  Synthetic
gaugcuccgaccguaagaaa

SEQ ID NO: 2707 - RNA, 20 nt, Artificial Sequence
  Synthetic
augcuccgaccguaagaaaa

SEQ ID NO: 2708 - RNA, 20 nt, Artificial Sequence
  Synthetic
ugcuccgaccguaagaaaaa

SEQ ID NO: 2709 - RNA, 20 nt, Artificial Sequence
  Synthetic
gcuccgaccguaagaaaaau

SEQ ID NO: 2710 - RNA, 20 nt, Artificial Sequence
  Synthetic
cuccgaccguaagaaaaaug

SEQ ID NO: 2711 - RNA, 20 nt, Artificial Sequence
  Synthetic
uccgaccguaagaaaaaugu

SEQ ID NO: 2712 - RNA, 20 nt, Artificial Sequence
  Synthetic
ccgaccguaagaaaaaugug

SEQ ID NO: 2713 - RNA, 20 nt, Artificial Sequence
  Synthetic
cgaccguaagaaaaaugugg

SEQ ID NO: 2714 - RNA, 20 nt, Artificial Sequence
  Synthetic
gaccguaagaaaaauguggg

SEQ ID NO: 2715 - RNA, 20 nt, Artificial Sequence
  Synthetic
accguaagaaaaauguggga

SEQ ID NO: 2716 - RNA, 20 nt, Artificial Sequence
  Synthetic
ccguaagaaaaaugugggag

SEQ ID NO: 2717 - RNA, 20 nt, Artificial Sequence
  Synthetic
cguaagaaaaaugugggagu

SEQ ID NO: 2718 - RNA, 20 nt, Artificial Sequence
  Synthetic
guaagaaaaaugugggagug

SEQ ID NO: 2719 - RNA, 20 nt, Artificial Sequence
  Synthetic
uaagaaaaaugugggaguga

SEQ ID NO: 2720 - RNA, 20 nt, Artificial Sequence
  Synthetic
aagaaaaaugugggagugau

SEQ ID NO: 2721 - RNA, 20 nt, Artificial Sequence
  Synthetic
agaaaaaugugggagugaug

SEQ ID NO: 2722 - RNA, 20 nt, Artificial Sequence
  Synthetic
gaaaaaugugggagugauga

SEQ ID NO: 2723 - RNA, 20 nt, Artificial Sequence
  Synthetic
aaaaaugugggagugaugaa

SEQ ID NO: 2724 - RNA, 20 nt, Artificial Sequence
  Synthetic
aaaaugugggagugaugaag

SEQ ID NO: 2725 - RNA, 20 nt, Artificial Sequence
  Synthetic
aaaugugggagugaugaagg

SEQ ID NO: 2726 - RNA, 20 nt, Artificial Sequence
  Synthetic
aaugugggagugaugaaggc

SEQ ID NO: 2727 - RNA, 20 nt, Artificial Sequence
  Synthetic
augugggagugaugaaggcu

SEQ ID NO: 2728 - RNA, 20 nt, Artificial Sequence
  Synthetic
ugugggagugaugaaggcuu

SEQ ID NO: 2729 - RNA, 20 nt, Artificial Sequence
  Synthetic
gugggagugaugaaggcuuu

SEQ ID NO: 2730 - RNA, 20 nt, Artificial Sequence
  Synthetic
ugggagugaugaaggcuuua

SEQ ID NO: 2731 - RNA, 20 nt, Artificial Sequence
  Synthetic
gggagugaugaaggcuuuau

SEQ ID NO: 2732 - RNA, 20 nt, Artificial Sequence
  Synthetic
ggagugaugaaggcuuuaug

SEQ ID NO: 2733 - RNA, 20 nt, Artificial Sequence
  Synthetic
gagugaugaaggcuuuauga

SEQ ID NO: 2734 - RNA, 20 nt, Artificial Sequence
  Synthetic
agugaugaaggcuuuaugau

SEQ ID NO: 2735 - RNA, 20 nt, Artificial Sequence
  Synthetic
gugaugaaggcuuuaugauu

SEQ ID NO: 2736 - RNA, 20 nt, Artificial Sequence
  Synthetic
ugaugaaggcuuuaugauuu

SEQ ID NO: 2737 - RNA, 20 nt, Artificial Sequence
  Synthetic
gaugaaggcuuuaugauuua

SEQ ID NO: 2738 - RNA, 20 nt, Artificial Sequence
  Synthetic
augaaggcuuuaugauuuac

SEQ ID NO: 2739 - RNA, 20 nt, Artificial Sequence
  Synthetic
ugaaggcuuuaugauuuacu

SEQ ID NO: 2740 - RNA, 20 nt, Artificial Sequence
  Synthetic
gaaggcuuuaugauuuacuc

SEQ ID NO: 2741 - RNA, 20 nt, Artificial Sequence
  Synthetic
aaggcuuuaugauuuacuca

SEQ ID NO: 2742 - RNA, 20 nt, Artificial Sequence
  Synthetic
aggcuuuaugauuuacucau

SEQ ID NO: 2743 - RNA, 20 nt, Artificial Sequence
  Synthetic
ggcuuuaugauuuacucauu

SEQ ID NO: 2744 - RNA, 20 nt, Artificial Sequence
  Synthetic
gcuuuaugauuuacucauua

SEQ ID NO: 2745 - RNA, 20 nt, Artificial Sequence
  Synthetic
cuuuaugauuuacucauuau

SEQ ID NO: 2746 - RNA, 20 nt, Artificial Sequence
  Synthetic
uuuaugauuuacucauuaua

SEQ ID NO: 2747 - RNA, 20 nt, Artificial Sequence
  Synthetic
uuaugauuuacucauuauag

SEQ ID NO: 2748 - RNA, 20 nt, Artificial Sequence
  Synthetic
uaugauuuacucauuauagu

SEQ ID NO: 2749 - RNA, 20 nt, Artificial Sequence
  Synthetic
augauuuacucauuauagua

SEQ ID NO: 2750 - RNA, 20 nt, Artificial Sequence
  Synthetic
ugauuuacucauuauaguaa

SEQ ID NO: 2751 - RNA, 20 nt, Artificial Sequence
  Synthetic
gauuuacucauuauaguaau

SEQ ID NO: 2752 - RNA, 20 nt, Artificial Sequence
  Synthetic
auuuacucauuauaguaaua

SEQ ID NO: 2753 - RNA, 20 nt, Artificial Sequence
  Synthetic
uuuacucauuauaguaauaa

SEQ ID NO: 2754 - RNA, 20 nt, Artificial Sequence
  Synthetic
uuacucauuauaguaauaau

SEQ ID NO: 2755 - RNA, 20 nt, Artificial Sequence
  Synthetic
uacucauuauaguaauaaua

SEQ ID NO: 2756 - RNA, 20 nt, Artificial Sequence
  Synthetic
acucauuauaguaauaauag

SEQ ID NO: 2757 - RNA, 20 nt, Artificial Sequence
  Synthetic
cucauuauaguaauaauagc

SEQ ID NO: 2758 - RNA, 20 nt, Artificial Sequence
  Synthetic
ucauuauaguaauaauagca

SEQ ID NO: 2759 - RNA, 20 nt, Artificial Sequence
  Synthetic
cauuauaguaauaauagcag

SEQ ID NO: 2760 - RNA, 20 nt, Artificial Sequence
  Synthetic
auuauaguaauaauagcagc

SEQ ID NO: 2761 - RNA, 20 nt, Artificial Sequence
  Synthetic
uuauaguaauaauagcagcc

SEQ ID NO: 2762 - RNA, 20 nt, Artificial Sequence
  Synthetic
uauaguaauaauagcagccu

SEQ ID NO: 2763 - RNA, 20 nt, Artificial Sequence
  Synthetic
auaguaauaauagcagccua

SEQ ID NO: 2764 - RNA, 20 nt, Artificial Sequence
  Synthetic
uaguaauaauagcagccuag

SEQ ID NO: 2765 - RNA, 20 nt, Artificial Sequence
  Synthetic
aguaauaauagcagccuagc

SEQ ID NO: 2766 - RNA, 20 nt, Artificial Sequence
  Synthetic
guaauaauagcagccuagcu

SEQ ID NO: 2767 - RNA, 20 nt, Artificial Sequence
  Synthetic
uaauaauagcagccuagcua

SEQ ID NO: 2768 - RNA, 20 nt, Artificial Sequence
  Synthetic
aauaauagcagccuagcuag

SEQ ID NO: 2769 - RNA, 20 nt, Artificial Sequence
  Synthetic
auaauagcagccuagcuagg

SEQ ID NO: 2770 - RNA, 20 nt, Artificial Sequence
  Synthetic
uaauagcagccuagcuaggu

SEQ ID NO: 2771 - RNA, 20 nt, Artificial Sequence
  Synthetic
aauagcagccuagcuaggua

SEQ ID NO: 2772 - RNA, 20 nt, Artificial Sequence
  Synthetic
auagcagccuagcuagguac

SEQ ID NO: 2773 - RNA, 20 nt, Artificial Sequence
  Synthetic
uagcagccuagcuagguaca

SEQ ID NO: 2774 - RNA, 20 nt, Artificial Sequence
  Synthetic
agcagccuagcuagguacaa

SEQ ID NO: 2775 - RNA, 20 nt, Artificial Sequence
  Synthetic
gcagccuagcuagguacaaa

SEQ ID NO: 2776 - RNA, 20 nt, Artificial Sequence
  Synthetic
cagccuagcuagguacaaaa

SEQ ID NO: 2777 - RNA, 20 nt, Artificial Sequence
  Synthetic
agccuagcuagguacaaaag

SEQ ID NO: 2778 - RNA, 20 nt, Artificial Sequence
  Synthetic
gccuagcuagguacaaaagc

SEQ ID NO: 2779 - RNA, 20 nt, Artificial Sequence
  Synthetic
ccuagcuagguacaaaagca

SEQ ID NO: 2780 - RNA, 20 nt, Artificial Sequence
  Synthetic
cuagcuagguacaaaagcag

SEQ ID NO: 2781 - RNA, 20 nt, Artificial Sequence
  Synthetic
uagcuagguacaaaagcagu

SEQ ID NO: 2782 - RNA, 20 nt, Artificial Sequence
  Synthetic
agcuagguacaaaagcaguu

SEQ ID NO: 2783 - RNA, 20 nt, Artificial Sequence
  Synthetic
gcuagguacaaaagcaguua

SEQ ID NO: 2784 - RNA, 20 nt, Artificial Sequence
  Synthetic
cuagguacaaaagcaguuau

SEQ ID NO: 2785 - RNA, 20 nt, Artificial Sequence
  Synthetic
uagguacaaaagcaguuaua

SEQ ID NO: 2786 - RNA, 20 nt, Artificial Sequence
  Synthetic
agguacaaaagcaguuauaa

SEQ ID NO: 2787 - RNA, 20 nt, Artificial Sequence
  Synthetic
gguacaaaagcaguuauaaa

SEQ ID NO: 2788 - RNA, 20 nt, Artificial Sequence
  Synthetic
guacaaaagcaguuauaaac

SEQ ID NO: 2789 - RNA, 20 nt, Artificial Sequence
  Synthetic
uacaaaagcaguuauaaacc

SEQ ID NO: 2790 - RNA, 20 nt, Artificial Sequence
  Synthetic
acaaaagcaguuauaaacca

SEQ ID NO: 2791 - RNA, 20 nt, Artificial Sequence
  Synthetic
caaaagcaguuauaaaccau

SEQ ID NO: 2792 - RNA, 20 nt, Artificial Sequence
  Synthetic
aaaagcaguuauaaaccauu

SEQ ID NO: 2793 - RNA, 20 nt, Artificial Sequence
  Synthetic
aaagcaguuauaaaccauuu

SEQ ID NO: 2794 - RNA, 20 nt, Artificial Sequence
  Synthetic
aagcaguuauaaaccauuua

SEQ ID NO: 2795 - RNA, 20 nt, Artificial Sequence
  Synthetic
agcaguuauaaaccauuuau

SEQ ID NO: 2796 - RNA, 20 nt, Artificial Sequence
  Synthetic
gcaguuauaaaccauuuaua

SEQ ID NO: 2797 - RNA, 20 nt, Artificial Sequence
  Synthetic
caguuauaaaccauuuauau

SEQ ID NO: 2798 - RNA, 20 nt, Artificial Sequence
  Synthetic
aguuauaaaccauuuauauu

SEQ ID NO: 2799 - RNA, 20 nt, Artificial Sequence
  Synthetic
guuauaaaccauuuauauua

SEQ ID NO: 2800 - RNA, 20 nt, Artificial Sequence
  Synthetic
uuauaaaccauuuauauuac

SEQ ID NO: 2801 - RNA, 20 nt, Artificial Sequence
  Synthetic
uauaaaccauuuauauuaca

SEQ ID NO: 2802 - RNA, 20 nt, Artificial Sequence
  Synthetic
auaaaccauuuauauuacac

SEQ ID NO: 2803 - RNA, 20 nt, Artificial Sequence
  Synthetic
uaaaccauuuauauuacaca

SEQ ID NO: 2804 - RNA, 20 nt, Artificial Sequence
  Synthetic
aaaccauuuauauuacacag

SEQ ID NO: 2805 - RNA, 20 nt, Artificial Sequence
  Synthetic
aaccauuuauauuacacaga

SEQ ID NO: 2806 - RNA, 20 nt, Artificial Sequence
  Synthetic
accauuuauauuacacagaa

SEQ ID NO: 2807 - RNA, 20 nt, Artificial Sequence
  Synthetic
ccauuuauauuacacagaau

SEQ ID NO: 2808 - RNA, 20 nt, Artificial Sequence
  Synthetic
cauuuauauuacacagaauu

SEQ ID NO: 2809 - RNA, 20 nt, Artificial Sequence
  Synthetic
auuuauauuacacagaauua

SEQ ID NO: 2810 - RNA, 20 nt, Artificial Sequence
  Synthetic
uuuauauuacacagaauuau

SEQ ID NO: 2811 - RNA, 20 nt, Artificial Sequence
  Synthetic
uuauauuacacagaauuauu

SEQ ID NO: 2812 - RNA, 20 nt, Artificial Sequence
  Synthetic
uauauuacacagaauuauuc

SEQ ID NO: 2813 - RNA, 20 nt, Artificial Sequence
  Synthetic
auauuacacagaauuauuca

SEQ ID NO: 2814 - RNA, 20 nt, Artificial Sequence
  Synthetic
uauuacacagaauuauucag

SEQ ID NO: 2815 - RNA, 20 nt, Artificial Sequence
  Synthetic
auuacacagaauuauucagg

SEQ ID NO: 2816 - RNA, 20 nt, Artificial Sequence
  Synthetic
uuacacagaauuauucaggu

SEQ ID NO: 2817 - RNA, 20 nt, Artificial Sequence
  Synthetic
uacacagaauuauucagguc

SEQ ID NO: 2818 - RNA, 20 nt, Artificial Sequence
  Synthetic
acacagaauuauucaggucu

SEQ ID NO: 2819 - RNA, 20 nt, Artificial Sequence
  Synthetic
cacagaauuauucaggucuc

SEQ ID NO: 2820 - RNA, 20 nt, Artificial Sequence
  Synthetic
acagaauuauucaggucucc

SEQ ID NO: 2821 - RNA, 20 nt, Artificial Sequence
  Synthetic
cagaauuauucaggucucca

SEQ ID NO: 2822 - RNA, 20 nt, Artificial Sequence
  Synthetic
agaauuauucaggucuccau

SEQ ID NO: 2823 - RNA, 20 nt, Artificial Sequence
  Synthetic
gaauuauucaggucuccauu

SEQ ID NO: 2824 - RNA, 20 nt, Artificial Sequence
  Synthetic
aauuauucaggucuccauuc

SEQ ID NO: 2825 - RNA, 20 nt, Artificial Sequence
  Synthetic
auuauucaggucuccauucu

SEQ ID NO: 2826 - RNA, 20 nt, Artificial Sequence
  Synthetic
uuauucaggucuccauucua

SEQ ID NO: 2827 - RNA, 20 nt, Artificial Sequence
  Synthetic
uauucaggucuccauucuau

SEQ ID NO: 2828 - RNA, 20 nt, Artificial Sequence
  Synthetic
auucaggucuccauucuauc

SEQ ID NO: 2829 - RNA, 20 nt, Artificial Sequence
  Synthetic
uucaggucuccauucuaucu

SEQ ID NO: 2830 - RNA, 20 nt, Artificial Sequence
  Synthetic
ucaggucuccauucuaucuu

SEQ ID NO: 2831 - RNA, 20 nt, Artificial Sequence
  Synthetic
caggucuccauucuaucuua

SEQ ID NO: 2832 - RNA, 20 nt, Artificial Sequence
  Synthetic
aggucuccauucuaucuuau

SEQ ID NO: 2833 - RNA, 20 nt, Artificial Sequence
  Synthetic
ggucuccauucuaucuuaug

SEQ ID NO: 2834 - RNA, 20 nt, Artificial Sequence
  Synthetic
gucuccauucuaucuuaugu

SEQ ID NO: 2835 - RNA, 20 nt, Artificial Sequence
  Synthetic
ucuccauucuaucuuauguu

SEQ ID NO: 2836 - RNA, 20 nt, Artificial Sequence
  Synthetic
cuccauucuaucuuauguug

SEQ ID NO: 2837 - RNA, 20 nt, Artificial Sequence
  Synthetic
uccauucuaucuuauguugu

SEQ ID NO: 2838 - RNA, 20 nt, Artificial Sequence
  Synthetic
ccauucuaucuuauguugua

SEQ ID NO: 2839 - RNA, 20 nt, Artificial Sequence
  Synthetic
cauucuaucuuauguuguaa

SEQ ID NO: 2840 - RNA, 20 nt, Artificial Sequence
  Synthetic
auucuaucuuauguuguaaa

SEQ ID NO: 2841 - RNA, 20 nt, Artificial Sequence
  Synthetic
uucuaucuuauguuguaaaa

SEQ ID NO: 2842 - RNA, 20 nt, Artificial Sequence
  Synthetic
ucuaucuuauguuguaaaau

SEQ ID NO: 2843 - RNA, 20 nt, Artificial Sequence
  Synthetic
cuaucuuauguuguaaaauu

SEQ ID NO: 2844 - RNA, 20 nt, Artificial Sequence
  Synthetic
uaucuuauguuguaaaauug

SEQ ID NO: 2845 - RNA, 20 nt, Artificial Sequence
  Synthetic
aucuuauguuguaaaauugu

SEQ ID NO: 2846 - RNA, 20 nt, Artificial Sequence
  Synthetic
ucuuauguuguaaaauuguu

SEQ ID NO: 2847 - RNA, 20 nt, Artificial Sequence
  Synthetic
cuuauguuguaaaauuguua

SEQ ID NO: 2848 - RNA, 20 nt, Artificial Sequence
  Synthetic
uuauguuguaaaauuguuaa

SEQ ID NO: 2849 - RNA, 20 nt, Artificial Sequence
  Synthetic
uauguuguaaaauuguuaau

SEQ ID NO: 2850 - RNA, 20 nt, Artificial Sequence
  Synthetic
auguuguaaaauuguuaauu

SEQ ID NO: 2851 - RNA, 20 nt, Artificial Sequence
  Synthetic
uguuguaaaauuguuaauug

SEQ ID NO: 2852 - RNA, 20 nt, Artificial Sequence
  Synthetic
guuguaaaauuguuaauugg

SEQ ID NO: 2853 - RNA, 20 nt, Artificial Sequence
  Synthetic
uuguaaaauuguuaauugga

SEQ ID NO: 2854 - RNA, 20 nt, Artificial Sequence
  Synthetic
uguaaaauuguuaauuggau

SEQ ID NO: 2855 - RNA, 20 nt, Artificial Sequence
  Synthetic
guaaaauuguuaauuggauu

SEQ ID NO: 2856 - RNA, 20 nt, Artificial Sequence
  Synthetic
uaaaauuguuaauuggauuu

SEQ ID NO: 2857 - RNA, 20 nt, Artificial Sequence
  Synthetic
aaaauuguuaauuggauuuc

SEQ ID NO: 2858 - RNA, 20 nt, Artificial Sequence
  Synthetic
aaauuguuaauuggauuucc

SEQ ID NO: 2859 - RNA, 20 nt, Artificial Sequence
  Synthetic
aauuguuaauuggauuucca

SEQ ID NO: 2860 - RNA, 20 nt, Artificial Sequence
  Synthetic
auuguuaauuggauuuccag

SEQ ID NO: 2861 - RNA, 20 nt, Artificial Sequence
  Synthetic
uuguuaauuggauuuccagu

SEQ ID NO: 2862 - RNA, 20 nt, Artificial Sequence
  Synthetic
uguuaauuggauuuccagug

SEQ ID NO: 2863 - RNA, 20 nt, Artificial Sequence
  Synthetic
guuaauuggauuuccaguga

SEQ ID NO: 2864 - RNA, 20 nt, Artificial Sequence
  Synthetic
uuaauuggauuuccagugag

SEQ ID NO: 2865 - RNA, 20 nt, Artificial Sequence
  Synthetic
uaauuggauuuccagugagu

SEQ ID NO: 2866 - RNA, 20 nt, Artificial Sequence
  Synthetic
aauuggauuuccagugaguu

SEQ ID NO: 2867 - RNA, 20 nt, Artificial Sequence
  Synthetic
auuggauuuccagugaguug

SEQ ID NO: 2868 - RNA, 20 nt, Artificial Sequence
  Synthetic
uuggauuuccagugaguugu

SEQ ID NO: 2869 - RNA, 20 nt, Artificial Sequence
  Synthetic
uggauuuccagugaguuguu

SEQ ID NO: 2870 - RNA, 20 nt, Artificial Sequence
  Synthetic
ggauuuccagugaguuguuu

SEQ ID NO: 2871 - RNA, 20 nt, Artificial Sequence
  Synthetic
gauuuccagugaguuguuua

SEQ ID NO: 2872 - RNA, 20 nt, Artificial Sequence
  Synthetic
auuuccagugaguuguuuag

SEQ ID NO: 2873 - RNA, 20 nt, Artificial Sequence
  Synthetic
uuuccagugaguuguuuaga

SEQ ID NO: 2874 - RNA, 20 nt, Artificial Sequence
  Synthetic
uuccagugaguuguuuagau

SEQ ID NO: 2875 - RNA, 20 nt, Artificial Sequence
  Synthetic
uccagugaguuguuuagaug

SEQ ID NO: 2876 - RNA, 20 nt, Artificial Sequence
  Synthetic
ccagugaguuguuuagauga

SEQ ID NO: 2877 - RNA, 20 nt, Artificial Sequence
  Synthetic
cagugaguuguuuagaugau

SEQ ID NO: 2878 - RNA, 20 nt, Artificial Sequence
  Synthetic
agugaguuguuuagaugauu

SEQ ID NO: 2879 - RNA, 20 nt, Artificial Sequence
  Synthetic
gugaguuguuuagaugauua

SEQ ID NO: 2880 - RNA, 20 nt, Artificial Sequence
  Synthetic
ugaguuguuuagaugauuag

SEQ ID NO: 2881 - RNA, 20 nt, Artificial Sequence
  Synthetic
gaguuguuuagaugauuagu

SEQ ID NO: 2882 - RNA, 20 nt, Artificial Sequence
  Synthetic
aguuguuuagaugauuagug

SEQ ID NO: 2883 - RNA, 20 nt, Artificial Sequence
  Synthetic
guuguuuagaugauuaguga

SEQ ID NO: 2884 - RNA, 20 nt, Artificial Sequence
  Synthetic
uuguuuagaugauuagugau

SEQ ID NO: 2885 - RNA, 20 nt, Artificial Sequence
  Synthetic
uguuuagaugauuagugaua

SEQ ID NO: 2886 - RNA, 20 nt, Artificial Sequence
  Synthetic
guuuagaugauuagugauaa

SEQ ID NO: 2887 - RNA, 20 nt, Artificial Sequence
  Synthetic
uuuagaugauuagugauaau

SEQ ID NO: 2888 - RNA, 20 nt, Artificial Sequence
  Synthetic
uuagaugauuagugauaaua

SEQ ID NO: 2889 - RNA, 20 nt, Artificial Sequence
  Synthetic
uagaugauuagugauaauaa

SEQ ID NO: 2890 - RNA, 20 nt, Artificial Sequence
  Synthetic
agaugauuagugauaauaag

SEQ ID NO: 2891 - RNA, 20 nt, Artificial Sequence
  Synthetic
gaugauuagugauaauaagg

SEQ ID NO: 2892 - RNA, 20 nt, Artificial Sequence
  Synthetic
augauuagugauaauaagga

SEQ ID NO: 2893 - RNA, 20 nt, Artificial Sequence
  Synthetic
ugauuagugauaauaaggaa

SEQ ID NO: 2894 - RNA, 20 nt, Artificial Sequence
  Synthetic
gauuagugauaauaaggaau

SEQ ID NO: 2895 - RNA, 20 nt, Artificial Sequence
  Synthetic
auuagugauaauaaggaaug

SEQ ID NO: 2896 - RNA, 20 nt, Artificial Sequence
  Synthetic
uuagugauaauaaggaaugg

SEQ ID NO: 2897 - RNA, 20 nt, Artificial Sequence
  Synthetic
uagugauaauaaggaauggu

SEQ ID NO: 2898 - RNA, 20 nt, Artificial Sequence
  Synthetic
agugauaauaaggaauggua

SEQ ID NO: 2899 - RNA, 20 nt, Artificial Sequence
  Synthetic
gugauaauaaggaaugguaa

SEQ ID NO: 2900 - RNA, 20 nt, Artificial Sequence
  Synthetic
ugauaauaaggaaugguaaa

SEQ ID NO: 2901 - RNA, 20 nt, Artificial Sequence
  Synthetic
gauaauaaggaaugguaaau

SEQ ID NO: 2902 - RNA, 20 nt, Artificial Sequence
  Synthetic
auaauaaggaaugguaaauc

SEQ ID NO: 2903 - RNA, 20 nt, Artificial Sequence
  Synthetic
uaauaaggaaugguaaaucc

SEQ ID NO: 2904 - RNA, 20 nt, Artificial Sequence
  Synthetic
aauaaggaaugguaaaucca

SEQ ID NO: 2905 - RNA, 20 nt, Artificial Sequence
  Synthetic
auaaggaaugguaaauccau

SEQ ID NO: 2906 - RNA, 20 nt, Artificial Sequence
  Synthetic
uaaggaaugguaaauccaua

SEQ ID NO: 2907 - RNA, 20 nt, Artificial Sequence
  Synthetic
aaggaaugguaaauccauag

SEQ ID NO: 2908 - RNA, 20 nt, Artificial Sequence
  Synthetic
aggaaugguaaauccauagc

SEQ ID NO: 2909 - RNA, 20 nt, Artificial Sequence
  Synthetic
ggaaugguaaauccauagca

SEQ ID NO: 2910 - RNA, 20 nt, Artificial Sequence
  Synthetic
gaaugguaaauccauagcac

SEQ ID NO: 2911 - RNA, 20 nt, Artificial Sequence
  Synthetic
aaugguaaauccauagcacc

SEQ ID NO: 2912 - RNA, 20 nt, Artificial Sequence
  Synthetic
augguaaauccauagcacca

SEQ ID NO: 2913 - RNA, 20 nt, Artificial Sequence
  Synthetic
ugguaaauccauagcaccau

SEQ ID NO: 2914 - RNA, 20 nt, Artificial Sequence
  Synthetic
gguaaauccauagcaccauu

SEQ ID NO: 2915 - RNA, 20 nt, Artificial Sequence
  Synthetic
guaaauccauagcaccauuu

SEQ ID NO: 2916 - RNA, 20 nt, Artificial Sequence
  Synthetic
uaaauccauagcaccauuuc

SEQ ID NO: 2917 - RNA, 20 nt, Artificial Sequence
  Synthetic
aaauccauagcaccauuuca

SEQ ID NO: 2918 - RNA, 20 nt, Artificial Sequence
  Synthetic
aauccauagcaccauuucaa

SEQ ID NO: 2919 - RNA, 20 nt, Artificial Sequence
  Synthetic
auccauagcaccauuucaaa

SEQ ID NO: 2920 - RNA, 20 nt, Artificial Sequence
  Synthetic
uccauagcaccauuucaaag

SEQ ID NO: 2921 - RNA, 20 nt, Artificial Sequence
  Synthetic
ccauagcaccauuucaaaga

SEQ ID NO: 2922 - RNA, 20 nt, Artificial Sequence
  Synthetic
cauagcaccauuucaaagac

SEQ ID NO: 2923 - RNA, 20 nt, Artificial Sequence
  Synthetic
auagcaccauuucaaagacu

SEQ ID NO: 2924 - RNA, 20 nt, Artificial Sequence
  Synthetic
uagcaccauuucaaagacuu

SEQ ID NO: 2925 - RNA, 20 nt, Artificial Sequence
  Synthetic
agcaccauuucaaagacuug

SEQ ID NO: 2926 - RNA, 20 nt, Artificial Sequence
  Synthetic
gcaccauuucaaagacuugu

SEQ ID NO: 2927 - RNA, 20 nt, Artificial Sequence
  Synthetic
caccauuucaaagacuuguu

SEQ ID NO: 2928 - RNA, 20 nt, Artificial Sequence
  Synthetic
accauuucaaagacuuguug

SEQ ID NO: 2929 - RNA, 20 nt, Artificial Sequence
  Synthetic
ccauuucaaagacuuguugu

SEQ ID NO: 2930 - RNA, 20 nt, Artificial Sequence
  Synthetic
cauuucaaagacuuguuguc

SEQ ID NO: 2931 - RNA, 20 nt, Artificial Sequence
  Synthetic
auuucaaagacuuguuguca

SEQ ID NO: 2932 - RNA, 20 nt, Artificial Sequence
  Synthetic
uuucaaagacuuguugucac

SEQ ID NO: 2933 - RNA, 20 nt, Artificial Sequence
  Synthetic
uucaaagacuuguugucacu

SEQ ID NO: 2934 - RNA, 20 nt, Artificial Sequence
  Synthetic
ucaaagacuuguugucacug

SEQ ID NO: 2935 - RNA, 20 nt, Artificial Sequence
  Synthetic
caaagacuuguugucacuga

SEQ ID NO: 2936 - RNA, 20 nt, Artificial Sequence
  Synthetic
aaagacuuguugucacugau

SEQ ID NO: 2937 - RNA, 20 nt, Artificial Sequence
  Synthetic
aagacuuguugucacugauu

SEQ ID NO: 2938 - RNA, 20 nt, Artificial Sequence
  Synthetic
agacuuguugucacugauuu

SEQ ID NO: 2939 - RNA, 20 nt, Artificial Sequence
  Synthetic
gacuuguugucacugauuuc

SEQ ID NO: 2940 - RNA, 20 nt, Artificial Sequence
  Synthetic
acuuguugucacugauuucu

SEQ ID NO: 2941 - RNA, 20 nt, Artificial Sequence
  Synthetic
cuuguugucacugauuucuc

SEQ ID NO: 2942 - RNA, 20 nt, Artificial Sequence
  Synthetic
uuguugucacugauuucuca

SEQ ID NO: 2943 - RNA, 20 nt, Artificial Sequence
  Synthetic
uguugucacugauuucucau

SEQ ID NO: 2944 - RNA, 20 nt, Artificial Sequence
  Synthetic
guugucacugauuucucauu

SEQ ID NO: 2945 - RNA, 20 nt, Artificial Sequence
  Synthetic
uugucacugauuucucauuu

SEQ ID NO: 2946 - RNA, 20 nt, Artificial Sequence
  Synthetic
ugucacugauuucucauuua

SEQ ID NO: 2947 - RNA, 20 nt, Artificial Sequence
  Synthetic
gucacugauuucucauuuag

SEQ ID NO: 2948 - RNA, 20 nt, Artificial Sequence
  Synthetic
ucacugauuucucauuuaga

SEQ ID NO: 2949 - RNA, 20 nt, Artificial Sequence
  Synthetic
cacugauuucucauuuagau

SEQ ID NO: 2950 - RNA, 20 nt, Artificial Sequence
  Synthetic
acugauuucucauuuagaug

SEQ ID NO: 2951 - RNA, 20 nt, Artificial Sequence
  Synthetic
cugauuucucauuuagaugu

SEQ ID NO: 2952 - RNA, 20 nt, Artificial Sequence
  Synthetic
ugauuucucauuuagaugug

SEQ ID NO: 2953 - RNA, 20 nt, Artificial Sequence
  Synthetic
gauuucucauuuagaugugu

SEQ ID NO: 2954 - RNA, 20 nt, Artificial Sequence
  Synthetic
auuucucauuuagaugugug

SEQ ID NO: 2955 - RNA, 20 nt, Artificial Sequence
  Synthetic
uuucucauuuagauguguga

SEQ ID NO: 2956 - RNA, 20 nt, Artificial Sequence
  Synthetic
uucucauuuagaugugugac

SEQ ID NO: 2957 - RNA, 20 nt, Artificial Sequence
  Synthetic
ucucauuuagaugugugacg

SEQ ID NO: 2958 - RNA, 20 nt, Artificial Sequence
  Synthetic
cucauuuagaugugugacga

SEQ ID NO: 2959 - RNA, 20 nt, Artificial Sequence
  Synthetic
ucauuuagaugugugacgaa

SEQ ID NO: 2960 - RNA, 20 nt, Artificial Sequence
  Synthetic
cauuuagaugugugacgaag

SEQ ID NO: 2961 - RNA, 20 nt, Artificial Sequence
  Synthetic
auuuagaugugugacgaaga

SEQ ID NO: 2962 - RNA, 20 nt, Artificial Sequence
  Synthetic
uuuagaugugugacgaagau

SEQ ID NO: 2963 - RNA, 20 nt, Artificial Sequence
  Synthetic
uuagaugugugacgaagaua

SEQ ID NO: 2964 - RNA, 20 nt, Artificial Sequence
  Synthetic
uagaugugugacgaagauac

SEQ ID NO: 2965 - RNA, 20 nt, Artificial Sequence
  Synthetic
agaugugugacgaagauacu

SEQ ID NO: 2966 - RNA, 20 nt, Artificial Sequence
  Synthetic
gaugugugacgaagauacuc

SEQ ID NO: 2967 - RNA, 20 nt, Artificial Sequence
  Synthetic
augugugacgaagauacucc

SEQ ID NO: 2968 - RNA, 20 nt, Artificial Sequence
  Synthetic
ugugugacgaagauacucca

SEQ ID NO: 2969 - RNA, 20 nt, Artificial Sequence
  Synthetic
gugugacgaagauacuccac

SEQ ID NO: 2970 - RNA, 20 nt, Artificial Sequence
  Synthetic
ugugacgaagauacuccacc

SEQ ID NO: 2971 - RNA, 20 nt, Artificial Sequence
  Synthetic
gugacgaagauacuccaccu

SEQ ID NO: 2972 - RNA, 20 nt, Artificial Sequence
  Synthetic
ugacgaagauacuccaccug

SEQ ID NO: 2973 - RNA, 20 nt, Artificial Sequence
  Synthetic
gacgaagauacuccaccugu

SEQ ID NO: 2974 - RNA, 20 nt, Artificial Sequence
  Synthetic
acgaagauacuccaccugua

SEQ ID NO: 2975 - RNA, 20 nt, Artificial Sequence
  Synthetic
cgaagauacuccaccuguaa

SEQ ID NO: 2976 - RNA, 20 nt, Artificial Sequence
  Synthetic
gaagauacuccaccuguaag

SEQ ID NO: 2977 - RNA, 20 nt, Artificial Sequence
  Synthetic
aagauacuccaccuguaagg

SEQ ID NO: 2978 - RNA, 20 nt, Artificial Sequence
  Synthetic
agauacuccaccuguaaggg

SEQ ID NO: 2979 - RNA, 20 nt, Artificial Sequence
  Synthetic
gauacuccaccuguaagggc

SEQ ID NO: 2980 - RNA, 20 nt, Artificial Sequence
  Synthetic
auacuccaccuguaagggca

SEQ ID NO: 2981 - RNA, 20 nt, Artificial Sequence
  Synthetic
uacuccaccuguaagggcaa

SEQ ID NO: 2982 - RNA, 20 nt, Artificial Sequence
  Synthetic
acuccaccuguaagggcaag

SEQ ID NO: 2983 - RNA, 20 nt, Artificial Sequence
  Synthetic
cuccaccuguaagggcaagu

SEQ ID NO: 2984 - RNA, 20 nt, Artificial Sequence
  Synthetic
uccaccuguaagggcaagua

SEQ ID NO: 2985 - RNA, 20 nt, Artificial Sequence
  Synthetic
ccaccuguaagggcaaguau

SEQ ID NO: 2986 - RNA, 20 nt, Artificial Sequence
  Synthetic
caccuguaagggcaaguaug

SEQ ID NO: 2987 - RNA, 20 nt, Artificial Sequence
  Synthetic
accuguaagggcaaguaugc

SEQ ID NO: 2988 - RNA, 20 nt, Artificial Sequence
  Synthetic
ccuguaagggcaaguaugcc

SEQ ID NO: 2989 - RNA, 20 nt, Artificial Sequence
  Synthetic
cuguaagggcaaguaugcca

SEQ ID NO: 2990 - RNA, 20 nt, Artificial Sequence
  Synthetic
uguaagggcaaguaugccaa

SEQ ID NO: 2991 - RNA, 20 nt, Artificial Sequence
  Synthetic
guaagggcaaguaugccaau

SEQ ID NO: 2992 - RNA, 20 nt, Artificial Sequence
  Synthetic
uaagggcaaguaugccaaug

SEQ ID NO: 2993 - RNA, 20 nt, Artificial Sequence
  Synthetic
aagggcaaguaugccaaugc

SEQ ID NO: 2994 - RNA, 20 nt, Artificial Sequence
  Synthetic
agggcaaguaugccaaugcc

SEQ ID NO: 2995 - RNA, 20 nt, Artificial Sequence
  Synthetic
gggcaaguaugccaaugcca

SEQ ID NO: 2996 - RNA, 20 nt, Artificial Sequence
  Synthetic
ggcaaguaugccaaugccac

SEQ ID NO: 2997 - RNA, 20 nt, Artificial Sequence
  Synthetic
gcaaguaugccaaugccaca

SEQ ID NO: 2998 - RNA, 20 nt, Artificial Sequence
  Synthetic
caaguaugccaaugccacaa

SEQ ID NO: 2999 - RNA, 20 nt, Artificial Sequence
  Synthetic
aaguaugccaaugccacaag

SEQ ID NO: 3000 - RNA, 20 nt, Artificial Sequence
  Synthetic
aguaugccaaugccacaagc

SEQ ID NO: 3001 - RNA, 20 nt, Artificial Sequence
  Synthetic
guaugccaaugccacaagcc

SEQ ID NO: 3002 - RNA, 20 nt, Artificial Sequence
  Synthetic
uaugccaaugccacaagccg

SEQ ID NO: 3003 - RNA, 20 nt, Artificial Sequence
  Synthetic
augccaaugccacaagccgu

SEQ ID NO: 3004 - RNA, 20 nt, Artificial Sequence
  Synthetic
ugccaaugccacaagccgug

SEQ ID NO: 3005 - RNA, 20 nt, Artificial Sequence
  Synthetic
gccaaugccacaagccgugu

SEQ ID NO: 3006 - RNA, 20 nt, Artificial Sequence
  Synthetic
ccaaugccacaagccguguu

SEQ ID NO: 3007 - RNA, 20 nt, Artificial Sequence
  Synthetic
caaugccacaagccguguuu

SEQ ID NO: 3008 - RNA, 20 nt, Artificial Sequence
  Synthetic
aaugccacaagccguguuuu

SEQ ID NO: 3009 - RNA, 20 nt, Artificial Sequence
  Synthetic
augccacaagccguguuuuu

SEQ ID NO: 3010 - RNA, 20 nt, Artificial Sequence
  Synthetic
ugccacaagccguguuuuug

SEQ ID NO: 3011 - RNA, 20 nt, Artificial Sequence
  Synthetic
gccacaagccguguuuuugc

SEQ ID NO: 3012 - RNA, 20 nt, Artificial Sequence
  Synthetic
ccacaagccguguuuuugca

SEQ ID NO: 3013 - RNA, 20 nt, Artificial Sequence
  Synthetic
cacaagccguguuuuugcaa

SEQ ID NO: 3014 - RNA, 20 nt, Artificial Sequence
  Synthetic
acaagccguguuuuugcaag

SEQ ID NO: 3015 - RNA, 20 nt, Artificial Sequence
  Synthetic
caagccguguuuuugcaagg

SEQ ID NO: 3016 - RNA, 20 nt, Artificial Sequence
  Synthetic
aagccguguuuuugcaaggg

SEQ ID NO: 3017 - RNA, 20 nt, Artificial Sequence
  Synthetic
agccguguuuuugcaagggc

SEQ ID NO: 3018 - RNA, 20 nt, Artificial Sequence
  Synthetic
gccguguuuuugcaagggcu

SEQ ID NO: 3019 - RNA, 20 nt, Artificial Sequence
  Synthetic
ccguguuuuugcaagggcuc

SEQ ID NO: 3020 - RNA, 20 nt, Artificial Sequence
  Synthetic
cguguuuuugcaagggcucc

SEQ ID NO: 3021 - RNA, 20 nt, Artificial Sequence
  Synthetic
guguuuuugcaagggcucca

SEQ ID NO: 3022 - RNA, 20 nt, Artificial Sequence
  Synthetic
uguuuuugcaagggcuccag

SEQ ID NO: 3023 - RNA, 20 nt, Artificial Sequence
  Synthetic
guuuuugcaagggcuccagu

SEQ ID NO: 3024 - RNA, 20 nt, Artificial Sequence
  Synthetic
uuuuugcaagggcuccaguu

SEQ ID NO: 3025 - RNA, 20 nt, Artificial Sequence
  Synthetic
uuuugcaagggcuccaguuu

SEQ ID NO: 3026 - RNA, 20 nt, Artificial Sequence
  Synthetic
uuugcaagggcuccaguuug

SEQ ID NO: 3027 - RNA, 20 nt, Artificial Sequence
  Synthetic
uugcaagggcuccaguuugg

SEQ ID NO: 3028 - RNA, 20 nt, Artificial Sequence
  Synthetic
ugcaagggcuccaguuuggg

SEQ ID NO: 3029 - RNA, 20 nt, Artificial Sequence
  Synthetic
gcaagggcuccaguuugggc

SEQ ID NO: 3030 - RNA, 20 nt, Artificial Sequence
  Synthetic
caagggcuccaguuugggca

SEQ ID NO: 3031 - RNA, 20 nt, Artificial Sequence
  Synthetic
aagggcuccaguuugggcau

SEQ ID NO: 3032 - RNA, 20 nt, Artificial Sequence
  Synthetic
agggcuccaguuugggcauu

SEQ ID NO: 3033 - RNA, 20 nt, Artificial Sequence
  Synthetic
gggcuccaguuugggcauuu

SEQ ID NO: 3034 - RNA, 20 nt, Artificial Sequence
  Synthetic
ggcuccaguuugggcauuuu

SEQ ID NO: 3035 - RNA, 20 nt, Artificial Sequence
  Synthetic
gcuccaguuugggcauuuug

SEQ ID NO: 3036 - RNA, 20 nt, Artificial Sequence
  Synthetic
cuccaguuugggcauuuugu

SEQ ID NO: 3037 - RNA, 20 nt, Artificial Sequence
  Synthetic
uccaguuugggcauuuuguc

SEQ ID NO: 3038 - RNA, 20 nt, Artificial Sequence
  Synthetic
ccaguuugggcauuuugucc

SEQ ID NO: 3039 - RNA, 20 nt, Artificial Sequence
  Synthetic
caguuugggcauuuuguccg

SEQ ID NO: 3040 - RNA, 20 nt, Artificial Sequence
  Synthetic
aguuugggcauuuuguccgu

SEQ ID NO: 3041 - RNA, 20 nt, Artificial Sequence
  Synthetic
guuugggcauuuuguccgug

SEQ ID NO: 3042 - RNA, 20 nt, Artificial Sequence
  Synthetic
uuugggcauuuuguccgugu

SEQ ID NO: 3043 - RNA, 20 nt, Artificial Sequence
  Synthetic
uugggcauuuuguccgugug

SEQ ID NO: 3044 - RNA, 20 nt, Artificial Sequence
  Synthetic
ugggcauuuuguccgugugc

SEQ ID NO: 3045 - RNA, 20 nt, Artificial Sequence
  Synthetic
gggcauuuuguccgugugcg

SEQ ID NO: 3046 - RNA, 20 nt, Artificial Sequence
  Synthetic
ggcauuuuguccgugugcgc

SEQ ID NO: 3047 - RNA, 20 nt, Artificial Sequence
  Synthetic
gcauuuuguccgugugcgcg

SEQ ID NO: 3048 - RNA, 20 nt, Artificial Sequence
  Synthetic
cauuuuguccgugugcgcgu

SEQ ID NO: 3049 - RNA, 20 nt, Artificial Sequence
  Synthetic
auuuuguccgugugcgcgua

SEQ ID NO: 3050 - RNA, 20 nt, Artificial Sequence
  Synthetic
uuuuguccgugugcgcguaa

SEQ ID NO: 3051 - RNA, 20 nt, Artificial Sequence
  Synthetic
uuuguccgugugcgcguaaa

SEQ ID NO: 3052 - RNA, 20 nt, Artificial Sequence
  Synthetic
uuguccgugugcgcguaaag

SEQ ID NO: 3053 - RNA, 20 nt, Artificial Sequence
  Synthetic
uguccgugugcgcguaaagc

SEQ ID NO: 3054 - RNA, 20 nt, Artificial Sequence
  Synthetic
guccgugugcgcguaaagcu

SEQ ID NO: 3055 - RNA, 20 nt, Artificial Sequence
  Synthetic
uccgugugcgcguaaagcuu

SEQ ID NO: 3056 - RNA, 20 nt, Artificial Sequence
  Synthetic
ccgugugcgcguaaagcuuc

SEQ ID NO: 3057 - RNA, 20 nt, Artificial Sequence
  Synthetic
cgugugcgcguaaagcuuca

SEQ ID NO: 3058 - RNA, 20 nt, Artificial Sequence
  Synthetic
gugugcgcguaaagcuucac

SEQ ID NO: 3059 - RNA, 20 nt, Artificial Sequence
  Synthetic
ugugcgcguaaagcuucaca

SEQ ID NO: 3060 - RNA, 20 nt, Artificial Sequence
  Synthetic
gugcgcguaaagcuucacac

SEQ ID NO: 3061 - RNA, 20 nt, Artificial Sequence
  Synthetic
ugcgcguaaagcuucacaca

SEQ ID NO: 3062 - RNA, 20 nt, Artificial Sequence
  Synthetic
gcgcguaaagcuucacacag

SEQ ID NO: 3063 - RNA, 20 nt, Artificial Sequence
  Synthetic
cgcguaaagcuucacacaga

SEQ ID NO: 3064 - RNA, 20 nt, Artificial Sequence
  Synthetic
gcguaaagcuucacacagag

SEQ ID NO: 3065 - RNA, 20 nt, Artificial Sequence
  Synthetic
cguaaagcuucacacagagg

SEQ ID NO: 3066 - RNA, 20 nt, Artificial Sequence
  Synthetic
guaaagcuucacacagaggu

SEQ ID NO: 3067 - RNA, 20 nt, Artificial Sequence
  Synthetic
uaaagcuucacacagagguu

SEQ ID NO: 3068 - RNA, 20 nt, Artificial Sequence
  Synthetic
aaagcuucacacagagguuc

SEQ ID NO: 3069 - RNA, 20 nt, Artificial Sequence
  Synthetic
aagcuucacacagagguucg

SEQ ID NO: 3070 - RNA, 20 nt, Artificial Sequence
  Synthetic
agcuucacacagagguucgg

SEQ ID NO: 3071 - RNA, 20 nt, Artificial Sequence
  Synthetic
gcuucacacagagguucggg

SEQ ID NO: 3072 - RNA, 20 nt, Artificial Sequence
  Synthetic
cuucacacagagguucgggc

SEQ ID NO: 3073 - RNA, 20 nt, Artificial Sequence
  Synthetic
uucacacagagguucgggca

SEQ ID NO: 3074 - RNA, 20 nt, Artificial Sequence
  Synthetic
ucacacagagguucgggcag

SEQ ID NO: 3075 - RNA, 20 nt, Artificial Sequence
  Synthetic
cacacagagguucgggcagc

SEQ ID NO: 3076 - RNA, 20 nt, Artificial Sequence
  Synthetic
acacagagguucgggcagcg

SEQ ID NO: 3077 - RNA, 20 nt, Artificial Sequence
  Synthetic
cacagagguucgggcagcgg

SEQ ID NO: 3078 - RNA, 20 nt, Artificial Sequence
  Synthetic
acagagguucgggcagcggc

SEQ ID NO: 3079 - RNA, 20 nt, Artificial Sequence
  Synthetic
cagagguucgggcagcggcu

SEQ ID NO: 3080 - RNA, 20 nt, Artificial Sequence
  Synthetic
agagguucgggcagcggcug

SEQ ID NO: 3081 - RNA, 20 nt, Artificial Sequence
  Synthetic
gagguucgggcagcggcugu

SEQ ID NO: 3082 - RNA, 20 nt, Artificial Sequence
  Synthetic
agguucgggcagcggcuguu

SEQ ID NO: 3083 - RNA, 20 nt, Artificial Sequence
  Synthetic
gguucgggcagcggcuguuu

SEQ ID NO: 3084 - RNA, 20 nt, Artificial Sequence
  Synthetic
guucgggcagcggcuguuuc

SEQ ID NO: 3085 - RNA, 20 nt, Artificial Sequence
  Synthetic
uucgggcagcggcuguuucu

SEQ ID NO: 3086 - RNA, 20 nt, Artificial Sequence
  Synthetic
ucgggcagcggcuguuucug

SEQ ID NO: 3087 - RNA, 20 nt, Artificial Sequence
  Synthetic
cgggcagcggcuguuucugu

SEQ ID NO: 3088 - RNA, 20 nt, Artificial Sequence
  Synthetic
gggcagcggcuguuucuguu

SEQ ID NO: 3089 - RNA, 20 nt, Artificial Sequence
  Synthetic
ggcagcggcuguuucuguug

SEQ ID NO: 3090 - RNA, 20 nt, Artificial Sequence
  Synthetic
gcagcggcuguuucuguugg

SEQ ID NO: 3091 - RNA, 20 nt, Artificial Sequence
  Synthetic
cagcggcuguuucuguugga

SEQ ID NO: 3092 - RNA, 20 nt, Artificial Sequence
  Synthetic
agcggcuguuucuguuggau

SEQ ID NO: 3093 - RNA, 20 nt, Artificial Sequence
  Synthetic
gcggcuguuucuguuggaug

SEQ ID NO: 3094 - RNA, 20 nt, Artificial Sequence
  Synthetic
cggcuguuucuguuggaugc

SEQ ID NO: 3095 - RNA, 20 nt, Artificial Sequence
  Synthetic
ggcuguuucuguuggaugca

SEQ ID NO: 3096 - RNA, 20 nt, Artificial Sequence
  Synthetic
gcuguuucuguuggaugcac

SEQ ID NO: 3097 - RNA, 20 nt, Artificial Sequence
  Synthetic
cuguuucuguuggaugcacu

SEQ ID NO: 3098 - RNA, 20 nt, Artificial Sequence
  Synthetic
uguuucuguuggaugcacug

SEQ ID NO: 3099 - RNA, 20 nt, Artificial Sequence
  Synthetic
guuucuguuggaugcacugg

SEQ ID NO: 3100 - RNA, 20 nt, Artificial Sequence
  Synthetic
uuucuguuggaugcacuggg

SEQ ID NO: 3101 - RNA, 20 nt, Artificial Sequence
  Synthetic
uucuguuggaugcacugggu

SEQ ID NO: 3102 - RNA, 20 nt, Artificial Sequence
  Synthetic
ucuguuggaugcacuggguc

SEQ ID NO: 3103 - RNA, 20 nt, Artificial Sequence
  Synthetic
cuguuggaugcacuggguca

SEQ ID NO: 3104 - RNA, 20 nt, Artificial Sequence
  Synthetic
uguuggaugcacugggucac

SEQ ID NO: 3105 - RNA, 20 nt, Artificial Sequence
  Synthetic
guuggaugcacugggucacc

SEQ ID NO: 3106 - RNA, 20 nt, Artificial Sequence
  Synthetic
uuggaugcacugggucaccc

SEQ ID NO: 3107 - RNA, 20 nt, Artificial Sequence
  Synthetic
uggaugcacugggucaccca

SEQ ID NO: 3108 - RNA, 20 nt, Artificial Sequence
  Synthetic
ggaugcacugggucacccac

SEQ ID NO: 3109 - RNA, 20 nt, Artificial Sequence
  Synthetic
gaugcacugggucacccacc

SEQ ID NO: 3110 - RNA, 20 nt, Artificial Sequence
  Synthetic
augcacugggucacccacca

SEQ ID NO: 3111 - RNA, 20 nt, Artificial Sequence
  Synthetic
ugcacugggucacccaccag

SEQ ID NO: 3112 - RNA, 20 nt, Artificial Sequence
  Synthetic
gcacugggucacccaccaga

SEQ ID NO: 3113 - RNA, 20 nt, Artificial Sequence
  Synthetic
cacugggucacccaccagaa

SEQ ID NO: 3114 - RNA, 20 nt, Artificial Sequence
  Synthetic
acugggucacccaccagaaa

SEQ ID NO: 3115 - RNA, 20 nt, Artificial Sequence
  Synthetic
cugggucacccaccagaaaa

SEQ ID NO: 3116 - RNA, 20 nt, Artificial Sequence
  Synthetic
ugggucacccaccagaaaag

SEQ ID NO: 3117 - RNA, 20 nt, Artificial Sequence
  Synthetic
gggucacccaccagaaaagg

SEQ ID NO: 3118 - RNA, 20 nt, Artificial Sequence
  Synthetic
ggucacccaccagaaaaggg

SEQ ID NO: 3119 - RNA, 20 nt, Artificial Sequence
  Synthetic
gucacccaccagaaaagggc

SEQ ID NO: 3120 - RNA, 20 nt, Artificial Sequence
  Synthetic
ucacccaccagaaaagggcu

SEQ ID NO: 3121 - RNA, 20 nt, Artificial Sequence
  Synthetic
cacccaccagaaaagggcuu

SEQ ID NO: 3122 - RNA, 20 nt, Artificial Sequence
  Synthetic
acccaccagaaaagggcuuu

SEQ ID NO: 3123 - RNA, 20 nt, Artificial Sequence
  Synthetic
cccaccagaaaagggcuuuu

SEQ ID NO: 3124 - RNA, 20 nt, Artificial Sequence
  Synthetic
ccaccagaaaagggcuuuug

SEQ ID NO: 3125 - RNA, 20 nt, Artificial Sequence
  Synthetic
caccagaaaagggcuuuugg

SEQ ID NO: 3126 - RNA, 20 nt, Artificial Sequence
  Synthetic
accagaaaagggcuuuugga

SEQ ID NO: 3127 - RNA, 20 nt, Artificial Sequence
  Synthetic
ccagaaaagggcuuuuggac

SEQ ID NO: 3128 - RNA, 20 nt, Artificial Sequence
  Synthetic
cagaaaagggcuuuuggaca

SEQ ID NO: 3129 - RNA, 20 nt, Artificial Sequence
  Synthetic
agaaaagggcuuuuggacau

SEQ ID NO: 3130 - RNA, 20 nt, Artificial Sequence
  Synthetic
gaaaagggcuuuuggacauu

SEQ ID NO: 3131 - RNA, 20 nt, Artificial Sequence
  Synthetic
aaaagggcuuuuggacauuu

SEQ ID NO: 3132 - RNA, 20 nt, Artificial Sequence
  Synthetic
aaagggcuuuuggacauuug

SEQ ID NO: 3133 - RNA, 20 nt, Artificial Sequence
  Synthetic
aagggcuuuuggacauuugg

SEQ ID NO: 3134 - RNA, 20 nt, Artificial Sequence
  Synthetic
agggcuuuuggacauuuggg

SEQ ID NO: 3135 - RNA, 20 nt, Artificial Sequence
  Synthetic
gggcuuuuggacauuugggg

SEQ ID NO: 3136 - RNA, 20 nt, Artificial Sequence
  Synthetic
ggcuuuuggacauuuggggu

SEQ ID NO: 3137 - RNA, 20 nt, Artificial Sequence
  Synthetic
gcuuuuggacauuugggguu

SEQ ID NO: 3138 - RNA, 20 nt, Artificial Sequence
  Synthetic
cuuuuggacauuugggguuu

SEQ ID NO: 3139 - RNA, 20 nt, Artificial Sequence
  Synthetic
uuuuggacauuugggguuuc

SEQ ID NO: 3140 - RNA, 20 nt, Artificial Sequence
  Synthetic
uuuggacauuugggguuucu

SEQ ID NO: 3141 - RNA, 20 nt, Artificial Sequence
  Synthetic
uuggacauuugggguuucua

SEQ ID NO: 3142 - RNA, 20 nt, Artificial Sequence
  Synthetic
uggacauuugggguuucuac

SEQ ID NO: 3143 - RNA, 20 nt, Artificial Sequence
  Synthetic
ggacauuugggguuucuacc

SEQ ID NO: 3144 - RNA, 20 nt, Artificial Sequence
  Synthetic
gacauuugggguuucuaccc

SEQ ID NO: 3145 - RNA, 20 nt, Artificial Sequence
  Synthetic
acauuugggguuucuaccca

SEQ ID NO: 3146 - RNA, 20 nt, Artificial Sequence
  Synthetic
cauuugggguuucuacccac

SEQ ID NO: 3147 - RNA, 20 nt, Artificial Sequence
  Synthetic
auuugggguuucuacccaca

SEQ ID NO: 3148 - RNA, 20 nt, Artificial Sequence
  Synthetic
uuugggguuucuacccacac

SEQ ID NO: 3149 - RNA, 20 nt, Artificial Sequence
  Synthetic
uugggguuucuacccacacu

SEQ ID NO: 3150 - RNA, 20 nt, Artificial Sequence
  Synthetic
ugggguuucuacccacacuu

SEQ ID NO: 3151 - RNA, 20 nt, Artificial Sequence
  Synthetic
gggguuucuacccacacuuu

SEQ ID NO: 3152 - RNA, 20 nt, Artificial Sequence
  Synthetic
ggguuucuacccacacuuug

SEQ ID NO: 3153 - RNA, 20 nt, Artificial Sequence
  Synthetic
gguuucuacccacacuuugg

SEQ ID NO: 3154 - RNA, 20 nt, Artificial Sequence
  Synthetic
guuucuacccacacuuuggu

SEQ ID NO: 3155 - RNA, 20 nt, Artificial Sequence
  Synthetic
uuucuacccacacuuugguu

SEQ ID NO: 3156 - RNA, 20 nt, Artificial Sequence
  Synthetic
uucuacccacacuuugguuu

SEQ ID NO: 3157 - RNA, 20 nt, Artificial Sequence
  Synthetic
ucuacccacacuuugguuuu

SEQ ID NO: 3158 - RNA, 20 nt, Artificial Sequence
  Synthetic
cuacccacacuuugguuuuc

SEQ ID NO: 3159 - RNA, 20 nt, Artificial Sequence
  Synthetic
uacccacacuuugguuuucu

SEQ ID NO: 3160 - RNA, 20 nt, Artificial Sequence
  Synthetic
acccacacuuugguuuucua

SEQ ID NO: 3161 - RNA, 20 nt, Artificial Sequence
  Synthetic
cccacacuuugguuuucuaa

SEQ ID NO: 3162 - RNA, 20 nt, Artificial Sequence
  Synthetic
ccacacuuugguuuucuaaa

SEQ ID NO: 3163 - RNA, 20 nt, Artificial Sequence
  Synthetic
cacacuuugguuuucuaaau

SEQ ID NO: 3164 - RNA, 20 nt, Artificial Sequence
  Synthetic
acacuuugguuuucuaaaug

SEQ ID NO: 3165 - RNA, 20 nt, Artificial Sequence
  Synthetic
cacuuugguuuucuaaauga

SEQ ID NO: 3166 - RNA, 20 nt, Artificial Sequence
  Synthetic
acuuugguuuucuaaaugag

SEQ ID NO: 3167 - RNA, 20 nt, Artificial Sequence
  Synthetic
cuuugguuuucuaaaugagg

SEQ ID NO: 3168 - RNA, 20 nt, Artificial Sequence
  Synthetic
uuugguuuucuaaaugaggu

SEQ ID NO: 3169 - RNA, 20 nt, Artificial Sequence
  Synthetic
uugguuuucuaaaugaggug

SEQ ID NO: 3170 - RNA, 20 nt, Artificial Sequence
  Synthetic
ugguuuucuaaaugaggugg

SEQ ID NO: 3171 - RNA, 20 nt, Artificial Sequence
  Synthetic
gguuuucuaaaugaggugga

SEQ ID NO: 3172 - RNA, 20 nt, Artificial Sequence
  Synthetic
guuuucuaaaugagguggac

SEQ ID NO: 3173 - RNA, 20 nt, Artificial Sequence
  Synthetic
uuuucuaaaugagguggacu

SEQ ID NO: 3174 - RNA, 20 nt, Artificial Sequence
  Synthetic
uuucuaaaugagguggacug

SEQ ID NO: 3175 - RNA, 20 nt, Artificial Sequence
  Synthetic
uucuaaaugagguggacugg

SEQ ID NO: 3176 - RNA, 20 nt, Artificial Sequence
  Synthetic
ucuaaaugagguggacuggg

SEQ ID NO: 3177 - RNA, 20 nt, Artificial Sequence
  Synthetic
cuaaaugagguggacuggga

SEQ ID NO: 3178 - RNA, 20 nt, Artificial Sequence
  Synthetic
uaaaugagguggacugggag

SEQ ID NO: 3179 - RNA, 20 nt, Artificial Sequence
  Synthetic
aaaugagguggacugggagg

SEQ ID NO: 3180 - RNA, 20 nt, Artificial Sequence
  Synthetic
aaugagguggacugggaggg

SEQ ID NO: 3181 - RNA, 20 nt, Artificial Sequence
  Synthetic
augagguggacugggaggga

SEQ ID NO: 3182 - RNA, 20 nt, Artificial Sequence
  Synthetic
ugagguggacugggagggag

SEQ ID NO: 3183 - RNA, 20 nt, Artificial Sequence
  Synthetic
gagguggacugggagggagg

SEQ ID NO: 3184 - RNA, 20 nt, Artificial Sequence
  Synthetic
agguggacugggagggaggu

SEQ ID NO: 3185 - RNA, 20 nt, Artificial Sequence
  Synthetic
gguggacugggagggaggua

SEQ ID NO: 3186 - RNA, 20 nt, Artificial Sequence
  Synthetic
guggacugggagggagguau

SEQ ID NO: 3187 - RNA, 20 nt, Artificial Sequence
  Synthetic
uggacugggagggagguauc

SEQ ID NO: 3188 - RNA, 20 nt, Artificial Sequence
  Synthetic
ggacugggagggagguaucu

SEQ ID NO: 3189 - RNA, 20 nt, Artificial Sequence
  Synthetic
gacugggagggagguaucuu

SEQ ID NO: 3190 - RNA, 20 nt, Artificial Sequence
  Synthetic
acugggagggagguaucuuc

SEQ ID NO: 3191 - RNA, 20 nt, Artificial Sequence
  Synthetic
cugggagggagguaucuucu

SEQ ID NO: 3192 - RNA, 20 nt, Artificial Sequence
  Synthetic
ugggagggagguaucuucuu

SEQ ID NO: 3193 - RNA, 20 nt, Artificial Sequence
  Synthetic
gggagggagguaucuucuuu

SEQ ID NO: 3194 - RNA, 20 nt, Artificial Sequence
  Synthetic
ggagggagguaucuucuuuc

SEQ ID NO: 3195 - RNA, 20 nt, Artificial Sequence
  Synthetic
gagggagguaucuucuuuca

SEQ ID NO: 3196 - RNA, 20 nt, Artificial Sequence
  Synthetic
agggagguaucuucuuucag

SEQ ID NO: 3197 - RNA, 20 nt, Artificial Sequence
  Synthetic
gggagguaucuucuuucaga

SEQ ID NO: 3198 - RNA, 20 nt, Artificial Sequence
  Synthetic
ggagguaucuucuuucagau

SEQ ID NO: 3199 - RNA, 20 nt, Artificial Sequence
  Synthetic
gagguaucuucuuucagaug

SEQ ID NO: 3200 - RNA, 20 nt, Artificial Sequence
  Synthetic
agguaucuucuuucagauga

SEQ ID NO: 3201 - RNA, 20 nt, Artificial Sequence
  Synthetic
gguaucuucuuucagaugaa

SEQ ID NO: 3202 - RNA, 20 nt, Artificial Sequence
  Synthetic
guaucuucuuucagaugaaa

SEQ ID NO: 3203 - RNA, 20 nt, Artificial Sequence
  Synthetic
uaucuucuuucagaugaaag

SEQ ID NO: 3204 - RNA, 20 nt, Artificial Sequence
  Synthetic
aucuucuuucagaugaaagg

SEQ ID NO: 3205 - RNA, 20 nt, Artificial Sequence
  Synthetic
ucuucuuucagaugaaaggg

SEQ ID NO: 3206 - RNA, 20 nt, Artificial Sequence
  Synthetic
cuucuuucagaugaaaggga

SEQ ID NO: 3207 - RNA, 20 nt, Artificial Sequence
  Synthetic
uucuuucagaugaaagggaa

SEQ ID NO: 3208 - RNA, 20 nt, Artificial Sequence
  Synthetic
ucuuucagaugaaagggaag

SEQ ID NO: 3209 - RNA, 20 nt, Artificial Sequence
  Synthetic
cuuucagaugaaagggaagg

SEQ ID NO: 3210 - RNA, 20 nt, Artificial Sequence
  Synthetic
uuucagaugaaagggaaggg

SEQ ID NO: 3211 - RNA, 20 nt, Artificial Sequence
  Synthetic
uucagaugaaagggaagggg

SEQ ID NO: 3212 - RNA, 20 nt, Artificial Sequence
  Synthetic
ucagaugaaagggaaggggc

SEQ ID NO: 3213 - RNA, 20 nt, Artificial Sequence
  Synthetic
cagaugaaagggaaggggcg

SEQ ID NO: 3214 - RNA, 20 nt, Artificial Sequence
  Synthetic
agaugaaagggaaggggcga

SEQ ID NO: 3215 - RNA, 20 nt, Artificial Sequence
  Synthetic
gaugaaagggaaggggcgag

SEQ ID NO: 3216 - RNA, 20 nt, Artificial Sequence
  Synthetic
augaaagggaaggggcgaga

SEQ ID NO: 3217 - RNA, 20 nt, Artificial Sequence
  Synthetic
ugaaagggaaggggcgagau

SEQ ID NO: 3218 - RNA, 20 nt, Artificial Sequence
  Synthetic
gaaagggaaggggcgagaug

SEQ ID NO: 3219 - RNA, 20 nt, Artificial Sequence
  Synthetic
aaagggaaggggcgagaugg

SEQ ID NO: 3220 - RNA, 20 nt, Artificial Sequence
  Synthetic
aagggaaggggcgagaugga

SEQ ID NO: 3221 - RNA, 20 nt, Artificial Sequence
  Synthetic
agggaaggggcgagauggag

SEQ ID NO: 3222 - RNA, 20 nt, Artificial Sequence
  Synthetic
gggaaggggcgagauggagu

SEQ ID NO: 3223 - RNA, 20 nt, Artificial Sequence
  Synthetic
ggaaggggcgagauggaguu

SEQ ID NO: 3224 - RNA, 20 nt, Artificial Sequence
  Synthetic
gaaggggcgagauggaguua

SEQ ID NO: 3225 - RNA, 20 nt, Artificial Sequence
  Synthetic
aaggggcgagauggaguuau

SEQ ID NO: 3226 - RNA, 20 nt, Artificial Sequence
  Synthetic
aggggcgagauggaguuauc

SEQ ID NO: 3227 - RNA, 20 nt, Artificial Sequence
  Synthetic
ggggcgagauggaguuaucu

SEQ ID NO: 3228 - RNA, 20 nt, Artificial Sequence
  Synthetic
gggcgagauggaguuaucuu

SEQ ID NO: 3229 - RNA, 20 nt, Artificial Sequence
  Synthetic
ggcgagauggaguuaucuua

SEQ ID NO: 3230 - RNA, 20 nt, Artificial Sequence
  Synthetic
gcgagauggaguuaucuuau

SEQ ID NO: 3231 - RNA, 20 nt, Artificial Sequence
  Synthetic
cgagauggaguuaucuuauu

SEQ ID NO: 3232 - RNA, 20 nt, Artificial Sequence
  Synthetic
gagauggaguuaucuuauuu

SEQ ID NO: 3233 - RNA, 20 nt, Artificial Sequence
  Synthetic
agauggaguuaucuuauuuc

SEQ ID NO: 3234 - RNA, 20 nt, Artificial Sequence
  Synthetic
gauggaguuaucuuauuucu

SEQ ID NO: 3235 - RNA, 20 nt, Artificial Sequence
  Synthetic
auggaguuaucuuauuucug

SEQ ID NO: 3236 - RNA, 20 nt, Artificial Sequence
  Synthetic
uggaguuaucuuauuucugg

SEQ ID NO: 3237 - RNA, 20 nt, Artificial Sequence
  Synthetic
ggaguuaucuuauuucuggg

SEQ ID NO: 3238 - RNA, 20 nt, Artificial Sequence
  Synthetic
gaguuaucuuauuucugggu

SEQ ID NO: 3239 - RNA, 20 nt, Artificial Sequence
  Synthetic
aguuaucuuauuucugggua

SEQ ID NO: 3240 - RNA, 20 nt, Artificial Sequence
  Synthetic
guuaucuuauuucuggguaa

SEQ ID NO: 3241 - RNA, 20 nt, Artificial Sequence
  Synthetic
uuaucuuauuucuggguaaa

SEQ ID NO: 3242 - RNA, 20 nt, Artificial Sequence
  Synthetic
uaucuuauuucuggguaaaa

SEQ ID NO: 3243 - RNA, 20 nt, Artificial Sequence
  Synthetic
aucuuauuucuggguaaaac

SEQ ID NO: 3244 - RNA, 20 nt, Artificial Sequence
  Synthetic
ucuuauuucuggguaaaaca

SEQ ID NO: 3245 - RNA, 20 nt, Artificial Sequence
  Synthetic
cuuauuucuggguaaaacaa

SEQ ID NO: 3246 - RNA, 20 nt, Artificial Sequence
  Synthetic
uuauuucuggguaaaacaaa

SEQ ID NO: 3247 - RNA, 20 nt, Artificial Sequence
  Synthetic
uauuucuggguaaaacaaaa

SEQ ID NO: 3248 - RNA, 20 nt, Artificial Sequence
  Synthetic
auuucuggguaaaacaaaac

SEQ ID NO: 3249 - RNA, 20 nt, Artificial Sequence
  Synthetic
uuucuggguaaaacaaaaca

SEQ ID NO: 3250 - RNA, 20 nt, Artificial Sequence
  Synthetic
uucuggguaaaacaaaacaa

SEQ ID NO: 3251 - RNA, 20 nt, Artificial Sequence
  Synthetic
ucuggguaaaacaaaacaaa

SEQ ID NO: 3252 - RNA, 20 nt, Artificial Sequence
  Synthetic
cuggguaaaacaaaacaaac

SEQ ID NO: 3253 - RNA, 20 nt, Artificial Sequence
  Synthetic
uggguaaaacaaaacaaaca

SEQ ID NO: 3254 - RNA, 20 nt, Artificial Sequence
  Synthetic
ggguaaaacaaaacaaacaa

SEQ ID NO: 3255 - RNA, 20 nt, Artificial Sequence
  Synthetic
gguaaaacaaaacaaacaaa

SEQ ID NO: 3256 - RNA, 20 nt, Artificial Sequence
  Synthetic
guaaaacaaaacaaacaaac

SEQ ID NO: 3257 - RNA, 20 nt, Artificial Sequence
  Synthetic
uaaaacaaaacaaacaaaca

SEQ ID NO: 3258 - RNA, 20 nt, Artificial Sequence
  Synthetic
aaaacaaaacaaacaaacaa

SEQ ID NO: 3259 - RNA, 20 nt, Artificial Sequence
  Synthetic
aaacaaaacaaacaaacaaa

SEQ ID NO: 3260 - RNA, 20 nt, Artificial Sequence
  Synthetic
aacaaaacaaacaaacaaaa

SEQ ID NO: 3261 - RNA, 20 nt, Artificial Sequence
  Synthetic
acaaaacaaacaaacaaaaa

SEQ ID NO: 3262 - RNA, 20 nt, Artificial Sequence
  Synthetic
caaaacaaacaaacaaaaaa

SEQ ID NO: 3263 - RNA, 20 nt, Artificial Sequence
  Synthetic
aaaacaaacaaacaaaaaac

SEQ ID NO: 3264 - RNA, 20 nt, Artificial Sequence
  Synthetic
aaacaaacaaacaaaaaaca

SEQ ID NO: 3265 - RNA, 20 nt, Artificial Sequence
  Synthetic
aacaaacaaacaaaaaacaa

SEQ ID NO: 3266 - RNA, 20 nt, Artificial Sequence
  Synthetic
acaaacaaacaaaaaacaaa

SEQ ID NO: 3267 - RNA, 20 nt, Artificial Sequence
  Synthetic
caaacaaacaaaaaacaaaa

SEQ ID NO: 3268 - RNA, 20 nt, Artificial Sequence
  Synthetic
aaacaaacaaaaaacaaaac

SEQ ID NO: 3269 - RNA, 20 nt, Artificial Sequence
  Synthetic
aacaaacaaaaaacaaaaca

SEQ ID NO: 3270 - RNA, 20 nt, Artificial Sequence
  Synthetic
acaaacaaaaaacaaaacaa

SEQ ID NO: 3271 - RNA, 20 nt, Artificial Sequence
  Synthetic
caaacaaaaaacaaaacaaa

SEQ ID NO: 3272 - RNA, 20 nt, Artificial Sequence
  Synthetic
aaacaaaaaacaaaacaaaa

SEQ ID NO: 3273 - RNA, 20 nt, Artificial Sequence
  Synthetic
aacaaaaaacaaaacaaaaa

SEQ ID NO: 3274 - RNA, 20 nt, Artificial Sequence
  Synthetic
acaaaaaacaaaacaaaaau

SEQ ID NO: 3275 - RNA, 20 nt, Artificial Sequence
  Synthetic
caaaaaacaaaacaaaaaua

SEQ ID NO: 3276 - RNA, 20 nt, Artificial Sequence
  Synthetic
aaaaaacaaaacaaaaauac

SEQ ID NO: 3277 - RNA, 20 nt, Artificial Sequence
  Synthetic
aaaaacaaaacaaaaauacu

SEQ ID NO: 3278 - RNA, 20 nt, Artificial Sequence
  Synthetic
aaaacaaaacaaaaauacug

SEQ ID NO: 3279 - RNA, 20 nt, Artificial Sequence
  Synthetic
aaacaaaacaaaaauacuga

SEQ ID NO: 3280 - RNA, 20 nt, Artificial Sequence
  Synthetic
aacaaaacaaaaauacugag

SEQ ID NO: 3281 - RNA, 20 nt, Artificial Sequence
  Synthetic
acaaaacaaaaauacugagc

SEQ ID NO: 3282 - RNA, 20 nt, Artificial Sequence
  Synthetic
caaaacaaaaauacugagcu

SEQ ID NO: 3283 - RNA, 20 nt, Artificial Sequence
  Synthetic
aaaacaaaaauacugagcug

SEQ ID NO: 3284 - RNA, 20 nt, Artificial Sequence
  Synthetic
aaacaaaaauacugagcugg

SEQ ID NO: 3285 - RNA, 20 nt, Artificial Sequence
  Synthetic
aacaaaaauacugagcugga

SEQ ID NO: 3286 - RNA, 20 nt, Artificial Sequence
  Synthetic
acaaaaauacugagcuggau

SEQ ID NO: 3287 - RNA, 20 nt, Artificial Sequence
  Synthetic
caaaaauacugagcuggauu

SEQ ID NO: 3288 - RNA, 20 nt, Artificial Sequence
  Synthetic
aaaaauacugagcuggauua

SEQ ID NO: 3289 - RNA, 20 nt, Artificial Sequence
  Synthetic
aaaauacugagcuggauuau

SEQ ID NO: 3290 - RNA, 20 nt, Artificial Sequence
  Synthetic
aaauacugagcuggauuaua

SEQ ID NO: 3291 - RNA, 20 nt, Artificial Sequence
  Synthetic
aauacugagcuggauuauac

SEQ ID NO: 3292 - RNA, 20 nt, Artificial Sequence
  Synthetic
auacugagcuggauuauacu

SEQ ID NO: 3293 - RNA, 20 nt, Artificial Sequence
  Synthetic
uacugagcuggauuauacug

SEQ ID NO: 3294 - RNA, 20 nt, Artificial Sequence
  Synthetic
acugagcuggauuauacugu

SEQ ID NO: 3295 - RNA, 20 nt, Artificial Sequence
  Synthetic
cugagcuggauuauacuguu

SEQ ID NO: 3296 - RNA, 20 nt, Artificial Sequence
  Synthetic
ugagcuggauuauacuguua

SEQ ID NO: 3297 - RNA, 20 nt, Artificial Sequence
  Synthetic
gagcuggauuauacuguuag

SEQ ID NO: 3298 - RNA, 20 nt, Artificial Sequence
  Synthetic
agcuggauuauacuguuagg

SEQ ID NO: 3299 - RNA, 20 nt, Artificial Sequence
  Synthetic
gcuggauuauacuguuagga

SEQ ID NO: 3300 - RNA, 20 nt, Artificial Sequence
  Synthetic
cuggauuauacuguuaggau

SEQ ID NO: 3301 - RNA, 20 nt, Artificial Sequence
  Synthetic
uggauuauacuguuaggaug

SEQ ID NO: 3302 - RNA, 20 nt, Artificial Sequence
  Synthetic
ggauuauacuguuaggaugu

SEQ ID NO: 3303 - RNA, 20 nt, Artificial Sequence
  Synthetic
gauuauacuguuaggaugua

SEQ ID NO: 3304 - RNA, 20 nt, Artificial Sequence
  Synthetic
auuauacuguuaggauguaa

SEQ ID NO: 3305 - RNA, 20 nt, Artificial Sequence
  Synthetic
uuauacuguuaggauguaaa

SEQ ID NO: 3306 - RNA, 20 nt, Artificial Sequence
  Synthetic
uauacuguuaggauguaaag

SEQ ID NO: 3307 - RNA, 20 nt, Artificial Sequence
  Synthetic
auacuguuaggauguaaagu

SEQ ID NO: 3308 - RNA, 20 nt, Artificial Sequence
  Synthetic
uacuguuaggauguaaaguu

SEQ ID NO: 3309 - RNA, 20 nt, Artificial Sequence
  Synthetic
acuguuaggauguaaaguuc

SEQ ID NO: 3310 - RNA, 20 nt, Artificial Sequence
  Synthetic
cuguuaggauguaaaguucc

SEQ ID NO: 3311 - RNA, 20 nt, Artificial Sequence
  Synthetic
uguuaggauguaaaguuccu

SEQ ID NO: 3312 - RNA, 20 nt, Artificial Sequence
  Synthetic
guuaggauguaaaguuccuu

SEQ ID NO: 3313 - RNA, 20 nt, Artificial Sequence
  Synthetic
uuaggauguaaaguuccuua

SEQ ID NO: 3314 - RNA, 20 nt, Artificial Sequence
  Synthetic
uaggauguaaaguuccuuag

SEQ ID NO: 3315 - RNA, 20 nt, Artificial Sequence
  Synthetic
aggauguaaaguuccuuagc

SEQ ID NO: 3316 - RNA, 20 nt, Artificial Sequence
  Synthetic
ggauguaaaguuccuuagcu

SEQ ID NO: 3317 - RNA, 20 nt, Artificial Sequence
  Synthetic
gauguaaaguuccuuagcua

SEQ ID NO: 3318 - RNA, 20 nt, Artificial Sequence
  Synthetic
auguaaaguuccuuagcuac

SEQ ID NO: 3319 - RNA, 20 nt, Artificial Sequence
  Synthetic
uguaaaguuccuuagcuacu

SEQ ID NO: 3320 - RNA, 20 nt, Artificial Sequence
  Synthetic
guaaaguuccuuagcuacuu

SEQ ID NO: 3321 - RNA, 20 nt, Artificial Sequence
  Synthetic
uaaaguuccuuagcuacuuc

SEQ ID NO: 3322 - RNA, 20 nt, Artificial Sequence
  Synthetic
aaaguuccuuagcuacuucu

SEQ ID NO: 3323 - RNA, 20 nt, Artificial Sequence
  Synthetic
aaguuccuuagcuacuucuu

SEQ ID NO: 3324 - RNA, 20 nt, Artificial Sequence
  Synthetic
aguuccuuagcuacuucuuu

SEQ ID NO: 3325 - RNA, 20 nt, Artificial Sequence
  Synthetic
guuccuuagcuacuucuuua

SEQ ID NO: 3326 - RNA, 20 nt, Artificial Sequence
  Synthetic
uuccuuagcuacuucuuuaa

SEQ ID NO: 3327 - RNA, 20 nt, Artificial Sequence
  Synthetic
uccuuagcuacuucuuuaag

SEQ ID NO: 3328 - RNA, 20 nt, Artificial Sequence
  Synthetic
ccuuagcuacuucuuuaagg

SEQ ID NO: 3329 - RNA, 20 nt, Artificial Sequence
  Synthetic
cuuagcuacuucuuuaaggc

SEQ ID NO: 3330 - RNA, 20 nt, Artificial Sequence
  Synthetic
uuagcuacuucuuuaaggcu

SEQ ID NO: 3331 - RNA, 20 nt, Artificial Sequence
  Synthetic
uagcuacuucuuuaaggcuc

SEQ ID NO: 3332 - RNA, 20 nt, Artificial Sequence
  Synthetic
agcuacuucuuuaaggcuca

SEQ ID NO: 3333 - RNA, 20 nt, Artificial Sequence
  Synthetic
gcuacuucuuuaaggcucaa

SEQ ID NO: 3334 - RNA, 20 nt, Artificial Sequence
  Synthetic
cuacuucuuuaaggcucaac

SEQ ID NO: 3335 - RNA, 20 nt, Artificial Sequence
  Synthetic
uacuucuuuaaggcucaaca

SEQ ID NO: 3336 - RNA, 20 nt, Artificial Sequence
  Synthetic
acuucuuuaaggcucaacac

SEQ ID NO: 3337 - RNA, 20 nt, Artificial Sequence
  Synthetic
cuucuuuaaggcucaacacg

SEQ ID NO: 3338 - RNA, 20 nt, Artificial Sequence
  Synthetic
uucuuuaaggcucaacacga

SEQ ID NO: 3339 - RNA, 20 nt, Artificial Sequence
  Synthetic
ucuuuaaggcucaacacgag

SEQ ID NO: 3340 - RNA, 20 nt, Artificial Sequence
  Synthetic
cuuuaaggcucaacacgagg

SEQ ID NO: 3341 - RNA, 20 nt, Artificial Sequence
  Synthetic
uuuaaggcucaacacgaggc

SEQ ID NO: 3342 - RNA, 20 nt, Artificial Sequence
  Synthetic
uuaaggcucaacacgaggcu

SEQ ID NO: 3343 - RNA, 20 nt, Artificial Sequence
  Synthetic
uaaggcucaacacgaggcug

SEQ ID NO: 3344 - RNA, 20 nt, Artificial Sequence
  Synthetic
aaggcucaacacgaggcuga

SEQ ID NO: 3345 - RNA, 20 nt, Artificial Sequence
  Synthetic
aggcucaacacgaggcugau

SEQ ID NO: 3346 - RNA, 20 nt, Artificial Sequence
  Synthetic
ggcucaacacgaggcugaug

SEQ ID NO: 3347 - RNA, 20 nt, Artificial Sequence
  Synthetic
gcucaacacgaggcugaugg

SEQ ID NO: 3348 - RNA, 20 nt, Artificial Sequence
  Synthetic
cucaacacgaggcugauggu

SEQ ID NO: 3349 - RNA, 20 nt, Artificial Sequence
  Synthetic
ucaacacgaggcugaugguc

SEQ ID NO: 3350 - RNA, 20 nt, Artificial Sequence
  Synthetic
caacacgaggcugaugguca

SEQ ID NO: 3351 - RNA, 20 nt, Artificial Sequence
  Synthetic
aacacgaggcugauggucaa

SEQ ID NO: 3352 - RNA, 20 nt, Artificial Sequence
  Synthetic
acacgaggcugauggucaac

SEQ ID NO: 3353 - RNA, 20 nt, Artificial Sequence
  Synthetic
cacgaggcugauggucaaca

SEQ ID NO: 3354 - RNA, 20 nt, Artificial Sequence
  Synthetic
acgaggcugauggucaacau

SEQ ID NO: 3355 - RNA, 20 nt, Artificial Sequence
  Synthetic
cgaggcugauggucaacaua

SEQ ID NO: 3356 - RNA, 20 nt, Artificial Sequence
  Synthetic
gaggcugauggucaacauaa

SEQ ID NO: 3357 - RNA, 20 nt, Artificial Sequence
  Synthetic
aggcugauggucaacauaaa

SEQ ID NO: 3358 - RNA, 20 nt, Artificial Sequence
  Synthetic
ggcugauggucaacauaaaa

SEQ ID NO: 3359 - RNA, 20 nt, Artificial Sequence
  Synthetic
gcugauggucaacauaaaaa

SEQ ID NO: 3360 - RNA, 20 nt, Artificial Sequence
  Synthetic
cugauggucaacauaaaaag

SEQ ID NO: 3361 - RNA, 20 nt, Artificial Sequence
  Synthetic
ugauggucaacauaaaaagc

SEQ ID NO: 3362 - RNA, 20 nt, Artificial Sequence
  Synthetic
gauggucaacauaaaaagca

SEQ ID NO: 3363 - RNA, 20 nt, Artificial Sequence
  Synthetic
auggucaacauaaaaagcaa

SEQ ID NO: 3364 - RNA, 20 nt, Artificial Sequence
  Synthetic
uggucaacauaaaaagcaaa

SEQ ID NO: 3365 - RNA, 20 nt, Artificial Sequence
  Synthetic
ggucaacauaaaaagcaaac

SEQ ID NO: 3366 - RNA, 20 nt, Artificial Sequence
  Synthetic
gucaacauaaaaagcaaaca

SEQ ID NO: 3367 - RNA, 20 nt, Artificial Sequence
  Synthetic
ucaacauaaaaagcaaacaa

SEQ ID NO: 3368 - RNA, 20 nt, Artificial Sequence
  Synthetic
caacauaaaaagcaaacaau

SEQ ID NO: 3369 - RNA, 20 nt, Artificial Sequence
  Synthetic
aacauaaaaagcaaacaaua

SEQ ID NO: 3370 - RNA, 20 nt, Artificial Sequence
  Synthetic
acauaaaaagcaaacaauac

SEQ ID NO: 3371 - RNA, 20 nt, Artificial Sequence
  Synthetic
cauaaaaagcaaacaauacu

SEQ ID NO: 3372 - RNA, 20 nt, Artificial Sequence
  Synthetic
auaaaaagcaaacaauacua

SEQ ID NO: 3373 - RNA, 20 nt, Artificial Sequence
  Synthetic
uaaaaagcaaacaauacuau

SEQ ID NO: 3374 - RNA, 20 nt, Artificial Sequence
  Synthetic
aaaaagcaaacaauacuaug

SEQ ID NO: 3375 - RNA, 20 nt, Artificial Sequence
  Synthetic
aaaagcaaacaauacuaugu

SEQ ID NO: 3376 - RNA, 20 nt, Artificial Sequence
  Synthetic
aaagcaaacaauacuaugua

SEQ ID NO: 3377 - RNA, 20 nt, Artificial Sequence
  Synthetic
aagcaaacaauacuauguac

SEQ ID NO: 3378 - RNA, 20 nt, Artificial Sequence
  Synthetic
agcaaacaauacuauguaca

SEQ ID NO: 3379 - RNA, 20 nt, Artificial Sequence
  Synthetic
gcaaacaauacuauguacau

SEQ ID NO: 3380 - RNA, 20 nt, Artificial Sequence
  Synthetic
caaacaauacuauguacaua

SEQ ID NO: 3381 - RNA, 20 nt, Artificial Sequence
  Synthetic
aaacaauacuauguacauau

SEQ ID NO: 3382 - RNA, 20 nt, Artificial Sequence
  Synthetic
aacaauacuauguacauaua

SEQ ID NO: 3383 - RNA, 20 nt, Artificial Sequence
  Synthetic
acaauacuauguacauauau

SEQ ID NO: 3384 - RNA, 20 nt, Artificial Sequence
  Synthetic
caauacuauguacauauaug

SEQ ID NO: 3385 - RNA, 20 nt, Artificial Sequence
  Synthetic
aauacuauguacauauaugu

SEQ ID NO: 3386 - RNA, 20 nt, Artificial Sequence
  Synthetic
auacuauguacauauaugua

SEQ ID NO: 3387 - RNA, 20 nt, Artificial Sequence
  Synthetic
uacuauguacauauauguaa

SEQ ID NO: 3388 - RNA, 20 nt, Artificial Sequence
  Synthetic
acuauguacauauauguaaa

SEQ ID NO: 3389 - RNA, 20 nt, Artificial Sequence
  Synthetic
cuauguacauauauguaaaa

SEQ ID NO: 3390 - RNA, 20 nt, Artificial Sequence
  Synthetic
uauguacauauauguaaaaa

SEQ ID NO: 3391 - RNA, 20 nt, Artificial Sequence
  Synthetic
auguacauauauguaaaaag

SEQ ID NO: 3392 - RNA, 20 nt, Artificial Sequence
  Synthetic
uguacauauauguaaaaagu

SEQ ID NO: 3393 - RNA, 20 nt, Artificial Sequence
  Synthetic
guacauauauguaaaaagug

SEQ ID NO: 3394 - RNA, 20 nt, Artificial Sequence
  Synthetic
uacauauauguaaaaagugu

SEQ ID NO: 3395 - RNA, 20 nt, Artificial Sequence
  Synthetic
acauauauguaaaaaguguu

SEQ ID NO: 3396 - RNA, 20 nt, Artificial Sequence
  Synthetic
cauauauguaaaaaguguua

SEQ ID NO: 3397 - RNA, 20 nt, Artificial Sequence
  Synthetic
auauauguaaaaaguguuau

SEQ ID NO: 3398 - RNA, 20 nt, Artificial Sequence
  Synthetic
uauauguaaaaaguguuaua

SEQ ID NO: 3399 - RNA, 20 nt, Artificial Sequence
  Synthetic
auauguaaaaaguguuauaa

SEQ ID NO: 3400 - RNA, 20 nt, Artificial Sequence
  Synthetic
uauguaaaaaguguuauaaa

SEQ ID NO: 3401 - RNA, 20 nt, Artificial Sequence
  Synthetic
auguaaaaaguguuauaaau

SEQ ID NO: 3402 - RNA, 20 nt, Artificial Sequence
  Synthetic
uguaaaaaguguuauaaaua

SEQ ID NO: 3403 - RNA, 20 nt, Artificial Sequence
  Synthetic
guaaaaaguguuauaaauag

SEQ ID NO: 3404 - RNA, 20 nt, Artificial Sequence
  Synthetic
uaaaaaguguuauaaauagg

SEQ ID NO: 3405 - RNA, 20 nt, Artificial Sequence
  Synthetic
aaaaaguguuauaaauaggu

SEQ ID NO: 3406 - RNA, 20 nt, Artificial Sequence
  Synthetic
aaaaguguuauaaauagguu

SEQ ID NO: 3407 - RNA, 20 nt, Artificial Sequence
  Synthetic
aaaguguuauaaauagguuu

SEQ ID NO: 3408 - RNA, 20 nt, Artificial Sequence
  Synthetic
aaguguuauaaauagguuuu

SEQ ID NO: 3409 - RNA, 20 nt, Artificial Sequence
  Synthetic
aguguuauaaauagguuuua

SEQ ID NO: 3410 - RNA, 20 nt, Artificial Sequence
  Synthetic
guguuauaaauagguuuuau

SEQ ID NO: 3411 - RNA, 20 nt, Artificial Sequence
  Synthetic
uguuauaaauagguuuuaua

SEQ ID NO: 3412 - RNA, 20 nt, Artificial Sequence
  Synthetic
guuauaaauagguuuuauaa

SEQ ID NO: 3413 - RNA, 20 nt, Artificial Sequence
  Synthetic
uuauaaauagguuuuauaaa

SEQ ID NO: 3414 - RNA, 20 nt, Artificial Sequence
  Synthetic
uauaaauagguuuuauaaac

SEQ ID NO: 3415 - RNA, 20 nt, Artificial Sequence
  Synthetic
auaaauagguuuuauaaacc

SEQ ID NO: 3416 - RNA, 20 nt, Artificial Sequence
  Synthetic
uaaauagguuuuauaaaccg

SEQ ID NO: 3417 - RNA, 20 nt, Artificial Sequence
  Synthetic
aaauagguuuuauaaaccgg

SEQ ID NO: 3418 - RNA, 20 nt, Artificial Sequence
  Synthetic
aauagguuuuauaaaccgga

SEQ ID NO: 3419 - RNA, 20 nt, Artificial Sequence
  Synthetic
auagguuuuauaaaccggag

SEQ ID NO: 3420 - RNA, 20 nt, Artificial Sequence
  Synthetic
uagguuuuauaaaccggaga

SEQ ID NO: 3421 - RNA, 20 nt, Artificial Sequence
  Synthetic
agguuuuauaaaccggagau

SEQ ID NO: 3422 - RNA, 20 nt, Artificial Sequence
  Synthetic
gguuuuauaaaccggagaua

SEQ ID NO: 3423 - RNA, 20 nt, Artificial Sequence
  Synthetic
guuuuauaaaccggagauau

SEQ ID NO: 3424 - RNA, 20 nt, Artificial Sequence
  Synthetic
uuuuauaaaccggagauauu

SEQ ID NO: 3425 - RNA, 20 nt, Artificial Sequence
  Synthetic
uuuauaaaccggagauauua

SEQ ID NO: 3426 - RNA, 20 nt, Artificial Sequence
  Synthetic
uuauaaaccggagauauuau

SEQ ID NO: 3427 - RNA, 20 nt, Artificial Sequence
  Synthetic
uauaaaccggagauauuaua

SEQ ID NO: 3428 - RNA, 20 nt, Artificial Sequence
  Synthetic
auaaaccggagauauuauau

SEQ ID NO: 3429 - RNA, 20 nt, Artificial Sequence
  Synthetic
uaaaccggagauauuauaua

SEQ ID NO: 3430 - RNA, 20 nt, Artificial Sequence
  Synthetic
aaaccggagauauuauauac

SEQ ID NO: 3431 - RNA, 20 nt, Artificial Sequence
  Synthetic
aaccggagauauuauauaca

SEQ ID NO: 3432 - RNA, 20 nt, Artificial Sequence
  Synthetic
accggagauauuauauacau

SEQ ID NO: 3433 - RNA, 20 nt, Artificial Sequence
  Synthetic
ccggagauauuauauacauc

SEQ ID NO: 3434 - RNA, 20 nt, Artificial Sequence
  Synthetic
cggagauauuauauacaucu

SEQ ID NO: 3435 - RNA, 20 nt, Artificial Sequence
  Synthetic
ggagauauuauauacaucuu

SEQ ID NO: 3436 - RNA, 20 nt, Artificial Sequence
  Synthetic
gagauauuauauacaucuuc

SEQ ID NO: 3437 - RNA, 20 nt, Artificial Sequence
  Synthetic
agauauuauauacaucuuca

SEQ ID NO: 3438 - RNA, 20 nt, Artificial Sequence
  Synthetic
gauauuauauacaucuucaa

SEQ ID NO: 3439 - RNA, 20 nt, Artificial Sequence
  Synthetic
auauuauauacaucuucaau

SEQ ID NO: 3440 - RNA, 20 nt, Artificial Sequence
  Synthetic
uauuauauacaucuucaauc

SEQ ID NO: 3441 - RNA, 20 nt, Artificial Sequence
  Synthetic
auuauauacaucuucaauca

SEQ ID NO: 3442 - RNA, 20 nt, Artificial Sequence
  Synthetic
uuauauacaucuucaaucaa

SEQ ID NO: 3443 - RNA, 20 nt, Artificial Sequence
  Synthetic
uauauacaucuucaaucaac

SEQ ID NO: 3444 - RNA, 20 nt, Artificial Sequence
  Synthetic
auauacaucuucaaucaaca

SEQ ID NO: 3445 - RNA, 20 nt, Artificial Sequence
  Synthetic
uauacaucuucaaucaacag

SEQ ID NO: 3446 - RNA, 20 nt, Artificial Sequence
  Synthetic
auacaucuucaaucaacagc

SEQ ID NO: 3447 - RNA, 20 nt, Artificial Sequence
  Synthetic
uacaucuucaaucaacagca

SEQ ID NO: 3448 - RNA, 20 nt, Artificial Sequence
  Synthetic
acaucuucaaucaacagcaa

SEQ ID NO: 3449 - RNA, 20 nt, Artificial Sequence
  Synthetic
caucuucaaucaacagcaac

SEQ ID NO: 3450 - RNA, 20 nt, Artificial Sequence
  Synthetic
aucuucaaucaacagcaacc

SEQ ID NO: 3451 - RNA, 20 nt, Artificial Sequence
  Synthetic
ucuucaaucaacagcaaccc

SEQ ID NO: 3452 - RNA, 20 nt, Artificial Sequence
  Synthetic
cuucaaucaacagcaacccc

SEQ ID NO: 3453 - RNA, 20 nt, Artificial Sequence
  Synthetic
uucaaucaacagcaaccccc

SEQ ID NO: 3454 - RNA, 20 nt, Artificial Sequence
  Synthetic
ucaaucaacagcaaccccca

SEQ ID NO: 3455 - RNA, 20 nt, Artificial Sequence
  Synthetic
caaucaacagcaacccccac

SEQ ID NO: 3456 - RNA, 20 nt, Artificial Sequence
  Synthetic
aaucaacagcaacccccacc

SEQ ID NO: 3457 - RNA, 20 nt, Artificial Sequence
  Synthetic
aucaacagcaacccccaccu

SEQ ID NO: 3458 - RNA, 20 nt, Artificial Sequence
  Synthetic
ucaacagcaacccccaccuc

SEQ ID NO: 3459 - RNA, 20 nt, Artificial Sequence
  Synthetic
caacagcaacccccaccucc

SEQ ID NO: 3460 - RNA, 20 nt, Artificial Sequence
  Synthetic
aacagcaacccccaccucca

SEQ ID NO: 3461 - RNA, 20 nt, Artificial Sequence
  Synthetic
acagcaacccccaccuccac

SEQ ID NO: 3462 - RNA, 20 nt, Artificial Sequence
  Synthetic
cagcaacccccaccuccacu

SEQ ID NO: 3463 - RNA, 20 nt, Artificial Sequence
  Synthetic
agcaacccccaccuccacug

SEQ ID NO: 3464 - RNA, 20 nt, Artificial Sequence
  Synthetic
gcaacccccaccuccacugc

SEQ ID NO: 3465 - RNA, 20 nt, Artificial Sequence
  Synthetic
caacccccaccuccacugcu

SEQ ID NO: 3466 - RNA, 20 nt, Artificial Sequence
  Synthetic
aacccccaccuccacugcuu

SEQ ID NO: 3467 - RNA, 20 nt, Artificial Sequence
  Synthetic
acccccaccuccacugcuuu

SEQ ID NO: 3468 - RNA, 20 nt, Artificial Sequence
  Synthetic
cccccaccuccacugcuuuc

SEQ ID NO: 3469 - RNA, 20 nt, Artificial Sequence
  Synthetic
ccccaccuccacugcuuucu

SEQ ID NO: 3470 - RNA, 20 nt, Artificial Sequence
  Synthetic
cccaccuccacugcuuucug

SEQ ID NO: 3471 - RNA, 20 nt, Artificial Sequence
  Synthetic
ccaccuccacugcuuucugu

SEQ ID NO: 3472 - RNA, 20 nt, Artificial Sequence
  Synthetic
caccuccacugcuuucuguu

SEQ ID NO: 3473 - RNA, 20 nt, Artificial Sequence
  Synthetic
accuccacugcuuucuguuu

SEQ ID NO: 3474 - RNA, 20 nt, Artificial Sequence
  Synthetic
ccuccacugcuuucuguuug

SEQ ID NO: 3475 - RNA, 20 nt, Artificial Sequence
  Synthetic
cuccacugcuuucuguuugg

SEQ ID NO: 3476 - RNA, 20 nt, Artificial Sequence
  Synthetic
uccacugcuuucuguuuggu

SEQ ID NO: 3477 - RNA, 20 nt, Artificial Sequence
  Synthetic
ccacugcuuucuguuugguu

SEQ ID NO: 3478 - RNA, 20 nt, Artificial Sequence
  Synthetic
cacugcuuucuguuugguuu

SEQ ID NO: 3479 - RNA, 20 nt, Artificial Sequence
  Synthetic
acugcuuucuguuugguuug

SEQ ID NO: 3480 - RNA, 20 nt, Artificial Sequence
  Synthetic
cugcuuucuguuugguuugg

SEQ ID NO: 3481 - RNA, 20 nt, Artificial Sequence
  Synthetic
ugcuuucuguuugguuuggu

SEQ ID NO: 3482 - RNA, 20 nt, Artificial Sequence
  Synthetic
gcuuucuguuugguuugguu

SEQ ID NO: 3483 - RNA, 20 nt, Artificial Sequence
  Synthetic
cuuucuguuugguuugguuu

SEQ ID NO: 3484 - RNA, 20 nt, Artificial Sequence
  Synthetic
uuucuguuugguuugguuug

SEQ ID NO: 3485 - RNA, 20 nt, Artificial Sequence
  Synthetic
uucuguuugguuugguuuga

SEQ ID NO: 3486 - RNA, 20 nt, Artificial Sequence
  Synthetic
ucuguuugguuugguuugag

SEQ ID NO: 3487 - RNA, 20 nt, Artificial Sequence
  Synthetic
cuguuugguuugguuugagu

SEQ ID NO: 3488 - RNA, 20 nt, Artificial Sequence
  Synthetic
uguuugguuugguuugaguu

SEQ ID NO: 3489 - RNA, 20 nt, Artificial Sequence
  Synthetic
guuugguuugguuugaguuu

SEQ ID NO: 3490 - RNA, 20 nt, Artificial Sequence
  Synthetic
uuugguuugguuugaguuug

SEQ ID NO: 3491 - RNA, 20 nt, Artificial Sequence
  Synthetic
uugguuugguuugaguuugg

SEQ ID NO: 3492 - RNA, 20 nt, Artificial Sequence
  Synthetic
ugguuugguuugaguuuggg

SEQ ID NO: 3493 - RNA, 20 nt, Artificial Sequence
  Synthetic
gguuugguuugaguuuggga

SEQ ID NO: 3494 - RNA, 20 nt, Artificial Sequence
  Synthetic
guuugguuugaguuugggau

SEQ ID NO: 3495 - RNA, 20 nt, Artificial Sequence
  Synthetic
uuugguuugaguuugggauu

SEQ ID NO: 3496 - RNA, 20 nt, Artificial Sequence
  Synthetic
uugguuugaguuugggauuu

SEQ ID NO: 3497 - RNA, 20 nt, Artificial Sequence
  Synthetic
ugguuugaguuugggauuuu

SEQ ID NO: 3498 - RNA, 20 nt, Artificial Sequence
  Synthetic
gguuugaguuugggauuuug

SEQ ID NO: 3499 - RNA, 20 nt, Artificial Sequence
  Synthetic
guuugaguuugggauuuugg

SEQ ID NO: 3500 - RNA, 20 nt, Artificial Sequence
  Synthetic
uuugaguuugggauuuuggg

SEQ ID NO: 3501 - RNA, 20 nt, Artificial Sequence
  Synthetic
uugaguuugggauuuugggc

SEQ ID NO: 3502 - RNA, 20 nt, Artificial Sequence
  Synthetic
ugaguuugggauuuugggcu

SEQ ID NO: 3503 - RNA, 20 nt, Artificial Sequence
  Synthetic
gaguuugggauuuugggcua

SEQ ID NO: 3504 - RNA, 20 nt, Artificial Sequence
  Synthetic
aguuugggauuuugggcuag

SEQ ID NO: 3505 - RNA, 20 nt, Artificial Sequence
  Synthetic
guuugggauuuugggcuagc

SEQ ID NO: 3506 - RNA, 20 nt, Artificial Sequence
  Synthetic
uuugggauuuugggcuagcu

SEQ ID NO: 3507 - RNA, 20 nt, Artificial Sequence
  Synthetic
uugggauuuugggcuagcuc

SEQ ID NO: 3508 - RNA, 20 nt, Artificial Sequence
  Synthetic
ugggauuuugggcuagcucu

SEQ ID NO: 3509 - RNA, 20 nt, Artificial Sequence
  Synthetic
gggauuuugggcuagcucuu

SEQ ID NO: 3510 - RNA, 20 nt, Artificial Sequence
  Synthetic
ggauuuugggcuagcucuuu

SEQ ID NO: 3511 - RNA, 20 nt, Artificial Sequence
  Synthetic
gauuuugggcuagcucuuuu

SEQ ID NO: 3512 - RNA, 20 nt, Artificial Sequence
  Synthetic
auuuugggcuagcucuuuuu

SEQ ID NO: 3513 - RNA, 20 nt, Artificial Sequence
  Synthetic
uuuugggcuagcucuuuuuu

SEQ ID NO: 3514 - RNA, 20 nt, Artificial Sequence
  Synthetic
uuugggcuagcucuuuuuuc

SEQ ID NO: 3515 - RNA, 20 nt, Artificial Sequence
  Synthetic
uugggcuagcucuuuuuucu

SEQ ID NO: 3516 - RNA, 20 nt, Artificial Sequence
  Synthetic
ugggcuagcucuuuuuucuu

SEQ ID NO: 3517 - RNA, 20 nt, Artificial Sequence
  Synthetic
gggcuagcucuuuuuucuuu

SEQ ID NO: 3518 - RNA, 20 nt, Artificial Sequence
  Synthetic
ggcuagcucuuuuuucuuug

SEQ ID NO: 3519 - RNA, 20 nt, Artificial Sequence
  Synthetic
gcuagcucuuuuuucuuugu

SEQ ID NO: 3520 - RNA, 20 nt, Artificial Sequence
  Synthetic
cuagcucuuuuuucuuuguc

SEQ ID NO: 3521 - RNA, 20 nt, Artificial Sequence
  Synthetic
uagcucuuuuuucuuugucu

SEQ ID NO: 3522 - RNA, 20 nt, Artificial Sequence
  Synthetic
agcucuuuuuucuuugucug

SEQ ID NO: 3523 - RNA, 20 nt, Artificial Sequence
  Synthetic
gcucuuuuuucuuugucugc

SEQ ID NO: 3524 - RNA, 20 nt, Artificial Sequence
  Synthetic
cucuuuuuucuuugucugcu

SEQ ID NO: 3525 - RNA, 20 nt, Artificial Sequence
  Synthetic
ucuuuuuucuuugucugcuu

SEQ ID NO: 3526 - RNA, 20 nt, Artificial Sequence
  Synthetic
cuuuuuucuuugucugcuuu

SEQ ID NO: 3527 - RNA, 20 nt, Artificial Sequence
  Synthetic
uuuuuucuuugucugcuuuc

SEQ ID NO: 3528 - RNA, 20 nt, Artificial Sequence
  Synthetic
uuuuucuuugucugcuuucu

SEQ ID NO: 3529 - RNA, 20 nt, Artificial Sequence
  Synthetic
uuuucuuugucugcuuucug

SEQ ID NO: 3530 - RNA, 20 nt, Artificial Sequence
  Synthetic
uuucuuugucugcuuucugu

SEQ ID NO: 3531 - RNA, 20 nt, Artificial Sequence
  Synthetic
uucuuugucugcuuucuguu

SEQ ID NO: 3532 - RNA, 20 nt, Artificial Sequence
  Synthetic
ucuuugucugcuuucuguuu

SEQ ID NO: 3533 - RNA, 20 nt, Artificial Sequence
  Synthetic
cuuugucugcuuucuguuuu

SEQ ID NO: 3534 - RNA, 20 nt, Artificial Sequence
  Synthetic
uuugucugcuuucuguuuuc

SEQ ID NO: 3535 - RNA, 20 nt, Artificial Sequence
  Synthetic
uugucugcuuucuguuuucc

SEQ ID NO: 3536 - RNA, 20 nt, Artificial Sequence
  Synthetic
ugucugcuuucuguuuuccc

SEQ ID NO: 3537 - RNA, 20 nt, Artificial Sequence
  Synthetic
gucugcuuucuguuuucccu

SEQ ID NO: 3538 - RNA, 20 nt, Artificial Sequence
  Synthetic
ucugcuuucuguuuucccuu

SEQ ID NO: 3539 - RNA, 20 nt, Artificial Sequence
  Synthetic
cugcuuucuguuuucccuuc

SEQ ID NO: 3540 - RNA, 20 nt, Artificial Sequence
  Synthetic
ugcuuucuguuuucccuucc

SEQ ID NO: 3541 - RNA, 20 nt, Artificial Sequence
  Synthetic
gcuuucuguuuucccuuccu

SEQ ID NO: 3542 - RNA, 20 nt, Artificial Sequence
  Synthetic
cuuucuguuuucccuuccuc

SEQ ID NO: 3543 - RNA, 20 nt, Artificial Sequence
  Synthetic
uuucuguuuucccuuccucc

SEQ ID NO: 3544 - RNA, 20 nt, Artificial Sequence
  Synthetic
uucuguuuucccuuccuccc

SEQ ID NO: 3545 - RNA, 20 nt, Artificial Sequence
  Synthetic
ucuguuuucccuuccucccu

SEQ ID NO: 3546 - RNA, 20 nt, Artificial Sequence
  Synthetic
cuguuuucccuuccucccuu

SEQ ID NO: 3547 - RNA, 20 nt, Artificial Sequence
  Synthetic
uguuuucccuuccucccuuc

SEQ ID NO: 3548 - RNA, 20 nt, Artificial Sequence
  Synthetic
guuuucccuuccucccuucc

SEQ ID NO: 3549 - RNA, 20 nt, Artificial Sequence
  Synthetic
uuuucccuuccucccuuccc

SEQ ID NO: 3550 - RNA, 20 nt, Artificial Sequence
  Synthetic
uuucccuuccucccuucccu

SEQ ID NO: 3551 - RNA, 20 nt, Artificial Sequence
  Synthetic
uucccuuccucccuucccua

SEQ ID NO: 3552 - RNA, 20 nt, Artificial Sequence
  Synthetic
ucccuuccucccuucccuau

SEQ ID NO: 3553 - RNA, 20 nt, Artificial Sequence
  Synthetic
cccuuccucccuucccuaug

SEQ ID NO: 3554 - RNA, 20 nt, Artificial Sequence
  Synthetic
ccuuccucccuucccuaugu

SEQ ID NO: 3555 - RNA, 20 nt, Artificial Sequence
  Synthetic
cuuccucccuucccuaugua

SEQ ID NO: 3556 - RNA, 20 nt, Artificial Sequence
  Synthetic
uuccucccuucccuauguac

SEQ ID NO: 3557 - RNA, 20 nt, Artificial Sequence
  Synthetic
uccucccuucccuauguacg

SEQ ID NO: 3558 - RNA, 20 nt, Artificial Sequence
  Synthetic
ccucccuucccuauguacgc

SEQ ID NO: 3559 - RNA, 20 nt, Artificial Sequence
  Synthetic
cucccuucccuauguacgcu

SEQ ID NO: 3560 - RNA, 20 nt, Artificial Sequence
  Synthetic
ucccuucccuauguacgcuc

SEQ ID NO: 3561 - RNA, 20 nt, Artificial Sequence
  Synthetic
cccuucccuauguacgcuca

SEQ ID NO: 3562 - RNA, 20 nt, Artificial Sequence
  Synthetic
ccuucccuauguacgcucag

SEQ ID NO: 3563 - RNA, 20 nt, Artificial Sequence
  Synthetic
cuucccuauguacgcucaga

SEQ ID NO: 3564 - RNA, 20 nt, Artificial Sequence
  Synthetic
uucccuauguacgcucagag

SEQ ID NO: 3565 - RNA, 20 nt, Artificial Sequence
  Synthetic
ucccuauguacgcucagagc

SEQ ID NO: 3566 - RNA, 20 nt, Artificial Sequence
  Synthetic
cccuauguacgcucagagcc

SEQ ID NO: 3567 - RNA, 20 nt, Artificial Sequence
  Synthetic
ccuauguacgcucagagccu

SEQ ID NO: 3568 - RNA, 20 nt, Artificial Sequence
  Synthetic
cuauguacgcucagagccuc

SEQ ID NO: 3569 - RNA, 20 nt, Artificial Sequence
  Synthetic
uauguacgcucagagccuca

SEQ ID NO: 3570 - RNA, 20 nt, Artificial Sequence
  Synthetic
auguacgcucagagccucag

SEQ ID NO: 3571 - RNA, 20 nt, Artificial Sequence
  Synthetic
uguacgcucagagccucaga

SEQ ID NO: 3572 - RNA, 20 nt, Artificial Sequence
  Synthetic
guacgcucagagccucagac

SEQ ID NO: 3573 - RNA, 20 nt, Artificial Sequence
  Synthetic
uacgcucagagccucagaca

SEQ ID NO: 3574 - RNA, 20 nt, Artificial Sequence
  Synthetic
acgcucagagccucagacag

SEQ ID NO: 3575 - RNA, 20 nt, Artificial Sequence
  Synthetic
cgcucagagccucagacaga

SEQ ID NO: 3576 - RNA, 20 nt, Artificial Sequence
  Synthetic
gcucagagccucagacagac

SEQ ID NO: 3577 - RNA, 20 nt, Artificial Sequence
  Synthetic
cucagagccucagacagacc

SEQ ID NO: 3578 - RNA, 20 nt, Artificial Sequence
  Synthetic
ucagagccucagacagaccg

SEQ ID NO: 3579 - RNA, 20 nt, Artificial Sequence
  Synthetic
cagagccucagacagaccgu

SEQ ID NO: 3580 - RNA, 20 nt, Artificial Sequence
  Synthetic
agagccucagacagaccguc

SEQ ID NO: 3581 - RNA, 20 nt, Artificial Sequence
  Synthetic
gagccucagacagaccgucu

SEQ ID NO: 3582 - RNA, 20 nt, Artificial Sequence
  Synthetic
agccucagacagaccgucug

SEQ ID NO: 3583 - RNA, 20 nt, Artificial Sequence
  Synthetic
gccucagacagaccgucugg

SEQ ID NO: 3584 - RNA, 20 nt, Artificial Sequence
  Synthetic
ccucagacagaccgucuggg

SEQ ID NO: 3585 - RNA, 20 nt, Artificial Sequence
  Synthetic
cucagacagaccgucugggc

SEQ ID NO: 3586 - RNA, 20 nt, Artificial Sequence
  Synthetic
ucagacagaccgucugggcg

SEQ ID NO: 3587 - RNA, 20 nt, Artificial Sequence
  Synthetic
cagacagaccgucugggcgc

SEQ ID NO: 3588 - RNA, 20 nt, Artificial Sequence
  Synthetic
agacagaccgucugggcgcc

SEQ ID NO: 3589 - RNA, 20 nt, Artificial Sequence
  Synthetic
gacagaccgucugggcgccu

SEQ ID NO: 3590 - RNA, 20 nt, Artificial Sequence
  Synthetic
acagaccgucugggcgccuc

SEQ ID NO: 3591 - RNA, 20 nt, Artificial Sequence
  Synthetic
cagaccgucugggcgccuca

SEQ ID NO: 3592 - RNA, 20 nt, Artificial Sequence
  Synthetic
agaccgucugggcgccucau

SEQ ID NO: 3593 - RNA, 20 nt, Artificial Sequence
  Synthetic
gaccgucugggcgccucauu

SEQ ID NO: 3594 - RNA, 20 nt, Artificial Sequence
  Synthetic
accgucugggcgccucauuc

SEQ ID NO: 3595 - RNA, 20 nt, Artificial Sequence
  Synthetic
ccgucugggcgccucauucg

SEQ ID NO: 3596 - RNA, 20 nt, Artificial Sequence
  Synthetic
cgucugggcgccucauucgc

SEQ ID NO: 3597 - RNA, 20 nt, Artificial Sequence
  Synthetic
gucugggcgccucauucgcg

SEQ ID NO: 3598 - RNA, 20 nt, Artificial Sequence
  Synthetic
ucugggcgccucauucgcgu

SEQ ID NO: 3599 - RNA, 20 nt, Artificial Sequence
  Synthetic
cugggcgccucauucgcguu

SEQ ID NO: 3600 - RNA, 20 nt, Artificial Sequence
  Synthetic
ugggcgccucauucgcguuu

SEQ ID NO: 3601 - RNA, 20 nt, Artificial Sequence
  Synthetic
gggcgccucauucgcguuuc

SEQ ID NO: 3602 - RNA, 20 nt, Artificial Sequence
  Synthetic
ggcgccucauucgcguuucc

SEQ ID NO: 3603 - RNA, 20 nt, Artificial Sequence
  Synthetic
gcgccucauucgcguuuccg

SEQ ID NO: 3604 - RNA, 20 nt, Artificial Sequence
  Synthetic
cgccucauucgcguuuccgc

SEQ ID NO: 3605 - RNA, 20 nt, Artificial Sequence
  Synthetic
gccucauucgcguuuccgca

SEQ ID NO: 3606 - RNA, 20 nt, Artificial Sequence
  Synthetic
ccucauucgcguuuccgcaa

SEQ ID NO: 3607 - RNA, 20 nt, Artificial Sequence
  Synthetic
cucauucgcguuuccgcaag

SEQ ID NO: 3608 - RNA, 20 nt, Artificial Sequence
  Synthetic
ucauucgcguuuccgcaaga

SEQ ID NO: 3609 - RNA, 20 nt, Artificial Sequence
  Synthetic
cauucgcguuuccgcaagau

SEQ ID NO: 3610 - RNA, 20 nt, Artificial Sequence
  Synthetic
auucgcguuuccgcaagauc

SEQ ID NO: 3611 - RNA, 20 nt, Artificial Sequence
  Synthetic
uucgcguuuccgcaagauca

SEQ ID NO: 3612 - RNA, 20 nt, Artificial Sequence
  Synthetic
ucgcguuuccgcaagaucac

SEQ ID NO: 3613 - RNA, 20 nt, Artificial Sequence
  Synthetic
cgcguuuccgcaagaucaca

SEQ ID NO: 3614 - RNA, 20 nt, Artificial Sequence
  Synthetic
gcguuuccgcaagaucacau

SEQ ID NO: 3615 - RNA, 20 nt, Artificial Sequence
  Synthetic
cguuuccgcaagaucacaua

SEQ ID NO: 3616 - RNA, 20 nt, Artificial Sequence
  Synthetic
guuuccgcaagaucacauag

SEQ ID NO: 3617 - RNA, 20 nt, Artificial Sequence
  Synthetic
uuuccgcaagaucacauaga

SEQ ID NO: 3618 - RNA, 20 nt, Artificial Sequence
  Synthetic
uuccgcaagaucacauagau

SEQ ID NO: 3619 - RNA, 20 nt, Artificial Sequence
  Synthetic
uccgcaagaucacauagaug

SEQ ID NO: 3620 - RNA, 20 nt, Artificial Sequence
  Synthetic
ccgcaagaucacauagauga

SEQ ID NO: 3621 - RNA, 20 nt, Artificial Sequence
  Synthetic
cgcaagaucacauagaugac

SEQ ID NO: 3622 - RNA, 20 nt, Artificial Sequence
  Synthetic
gcaagaucacauagaugaca

SEQ ID NO: 3623 - RNA, 20 nt, Artificial Sequence
  Synthetic
caagaucacauagaugacac

SEQ ID NO: 3624 - RNA, 20 nt, Artificial Sequence
  Synthetic
aagaucacauagaugacacc

SEQ ID NO: 3625 - RNA, 20 nt, Artificial Sequence
  Synthetic
agaucacauagaugacaccg

SEQ ID NO: 3626 - RNA, 20 nt, Artificial Sequence
  Synthetic
gaucacauagaugacaccgc

SEQ ID NO: 3627 - RNA, 20 nt, Artificial Sequence
  Synthetic
aucacauagaugacaccgcu

SEQ ID NO: 3628 - RNA, 20 nt, Artificial Sequence
  Synthetic
ucacauagaugacaccgcug

SEQ ID NO: 3629 - RNA, 20 nt, Artificial Sequence
  Synthetic
cacauagaugacaccgcuga

SEQ ID NO: 3630 - RNA, 20 nt, Artificial Sequence
  Synthetic
acauagaugacaccgcugag

SEQ ID NO: 3631 - RNA, 20 nt, Artificial Sequence
  Synthetic
cauagaugacaccgcugaga

SEQ ID NO: 3632 - RNA, 20 nt, Artificial Sequence
  Synthetic
auagaugacaccgcugagaa

SEQ ID NO: 3633 - RNA, 20 nt, Artificial Sequence
  Synthetic
uagaugacaccgcugagaag

SEQ ID NO: 3634 - RNA, 20 nt, Artificial Sequence
  Synthetic
agaugacaccgcugagaagg

SEQ ID NO: 3635 - RNA, 20 nt, Artificial Sequence
  Synthetic
gaugacaccgcugagaaggg

SEQ ID NO: 3636 - RNA, 20 nt, Artificial Sequence
  Synthetic
augacaccgcugagaagggc

SEQ ID NO: 3637 - RNA, 20 nt, Artificial Sequence
  Synthetic
ugacaccgcugagaagggcc

SEQ ID NO: 3638 - RNA, 20 nt, Artificial Sequence
  Synthetic
gacaccgcugagaagggcca

SEQ ID NO: 3639 - RNA, 20 nt, Artificial Sequence
  Synthetic
acaccgcugagaagggccag

SEQ ID NO: 3640 - RNA, 20 nt, Artificial Sequence
  Synthetic
caccgcugagaagggccagg

SEQ ID NO: 3641 - RNA, 20 nt, Artificial Sequence
  Synthetic
accgcugagaagggccaggg

SEQ ID NO: 3642 - RNA, 20 nt, Artificial Sequence
  Synthetic
ccgcugagaagggccagggg

SEQ ID NO: 3643 - RNA, 20 nt, Artificial Sequence
  Synthetic
cgcugagaagggccaggggg

SEQ ID NO: 3644 - RNA, 20 nt, Artificial Sequence
  Synthetic
gcugagaagggccaggggga

SEQ ID NO: 3645 - RNA, 20 nt, Artificial Sequence
  Synthetic
cugagaagggccagggggaa

SEQ ID NO: 3646 - RNA, 20 nt, Artificial Sequence
  Synthetic
ugagaagggccagggggaag

SEQ ID NO: 3647 - RNA, 20 nt, Artificial Sequence
  Synthetic
gagaagggccagggggaagg

SEQ ID NO: 3648 - RNA, 20 nt, Artificial Sequence
  Synthetic
agaagggccagggggaaggc

SEQ ID NO: 3649 - RNA, 20 nt, Artificial Sequence
  Synthetic
gaagggccagggggaaggcc

SEQ ID NO: 3650 - RNA, 20 nt, Artificial Sequence
  Synthetic
aagggccagggggaaggcca

SEQ ID NO: 3651 - RNA, 20 nt, Artificial Sequence
  Synthetic
agggccagggggaaggccac

SEQ ID NO: 3652 - RNA, 20 nt, Artificial Sequence
  Synthetic
gggccagggggaaggccacc

SEQ ID NO: 3653 - RNA, 20 nt, Artificial Sequence
  Synthetic
ggccagggggaaggccaccc

SEQ ID NO: 3654 - RNA, 20 nt, Artificial Sequence
  Synthetic
gccagggggaaggccaccca

SEQ ID NO: 3655 - RNA, 20 nt, Artificial Sequence
  Synthetic
ccagggggaaggccacccag

SEQ ID NO: 3656 - RNA, 20 nt, Artificial Sequence
  Synthetic
cagggggaaggccacccagg

SEQ ID NO: 3657 - RNA, 20 nt, Artificial Sequence
  Synthetic
agggggaaggccacccaggc

SEQ ID NO: 3658 - RNA, 20 nt, Artificial Sequence
  Synthetic
gggggaaggccacccaggcc

SEQ ID NO: 3659 - RNA, 20 nt, Artificial Sequence
  Synthetic
ggggaaggccacccaggcca

SEQ ID NO: 3660 - RNA, 20 nt, Artificial Sequence
  Synthetic
gggaaggccacccaggccag

SEQ ID NO: 3661 - RNA, 20 nt, Artificial Sequence
  Synthetic
ggaaggccacccaggccagg

SEQ ID NO: 3662 - RNA, 20 nt, Artificial Sequence
  Synthetic
gaaggccacccaggccagga

SEQ ID NO: 3663 - RNA, 20 nt, Artificial Sequence
  Synthetic
aaggccacccaggccaggau

SEQ ID NO: 3664 - RNA, 20 nt, Artificial Sequence
  Synthetic
aggccacccaggccaggaug

SEQ ID NO: 3665 - RNA, 20 nt, Artificial Sequence
  Synthetic
ggccacccaggccaggaugu

SEQ ID NO: 3666 - RNA, 20 nt, Artificial Sequence
  Synthetic
gccacccaggccaggaugua

SEQ ID NO: 3667 - RNA, 20 nt, Artificial Sequence
  Synthetic
ccacccaggccaggauguag

SEQ ID NO: 3668 - RNA, 20 nt, Artificial Sequence
  Synthetic
cacccaggccaggauguagg

SEQ ID NO: 3669 - RNA, 20 nt, Artificial Sequence
  Synthetic
acccaggccaggauguaggc

SEQ ID NO: 3670 - RNA, 20 nt, Artificial Sequence
  Synthetic
cccaggccaggauguaggcg

SEQ ID NO: 3671 - RNA, 20 nt, Artificial Sequence
  Synthetic
ccaggccaggauguaggcga

SEQ ID NO: 3672 - RNA, 20 nt, Artificial Sequence
  Synthetic
caggccaggauguaggcgaa

SEQ ID NO: 3673 - RNA, 20 nt, Artificial Sequence
  Synthetic
aggccaggauguaggcgaaa

SEQ ID NO: 3674 - RNA, 20 nt, Artificial Sequence
  Synthetic
ggccaggauguaggcgaaac

SEQ ID NO: 3675 - RNA, 20 nt, Artificial Sequence
  Synthetic
gccaggauguaggcgaaacc

SEQ ID NO: 3676 - RNA, 20 nt, Artificial Sequence
  Synthetic
ccaggauguaggcgaaaccg

SEQ ID NO: 3677 - RNA, 20 nt, Artificial Sequence
  Synthetic
caggauguaggcgaaaccgu

SEQ ID NO: 3678 - RNA, 20 nt, Artificial Sequence
  Synthetic
aggauguaggcgaaaccgua

SEQ ID NO: 3679 - RNA, 20 nt, Artificial Sequence
  Synthetic
ggauguaggcgaaaccguag

SEQ ID NO: 3680 - RNA, 20 nt, Artificial Sequence
  Synthetic
gauguaggcgaaaccguagg

SEQ ID NO: 3681 - RNA, 20 nt, Artificial Sequence
  Synthetic
auguaggcgaaaccguagga

SEQ ID NO: 3682 - RNA, 20 nt, Artificial Sequence
  Synthetic
uguaggcgaaaccguaggag

SEQ ID NO: 3683 - RNA, 20 nt, Artificial Sequence
  Synthetic
guaggcgaaaccguaggagu

SEQ ID NO: 3684 - RNA, 20 nt, Artificial Sequence
  Synthetic
uaggcgaaaccguaggagua

SEQ ID NO: 3685 - RNA, 20 nt, Artificial Sequence
  Synthetic
aggcgaaaccguaggaguaa

SEQ ID NO: 3686 - RNA, 20 nt, Artificial Sequence
  Synthetic
ggcgaaaccguaggaguaau

SEQ ID NO: 3687 - RNA, 20 nt, Artificial Sequence
  Synthetic
gcgaaaccguaggaguaauc

SEQ ID NO: 3688 - RNA, 20 nt, Artificial Sequence
  Synthetic
cgaaaccguaggaguaaucc

SEQ ID NO: 3689 - RNA, 20 nt, Artificial Sequence
  Synthetic
gaaaccguaggaguaauccg

SEQ ID NO: 3690 - RNA, 20 nt, Artificial Sequence
  Synthetic
aaaccguaggaguaauccga

SEQ ID NO: 3691 - RNA, 20 nt, Artificial Sequence
  Synthetic
aaccguaggaguaauccgag

SEQ ID NO: 3692 - RNA, 20 nt, Artificial Sequence
  Synthetic
accguaggaguaauccgagu

SEQ ID NO: 3693 - RNA, 20 nt, Artificial Sequence
  Synthetic
ccguaggaguaauccgaguu

SEQ ID NO: 3694 - RNA, 20 nt, Artificial Sequence
  Synthetic
cguaggaguaauccgaguug

SEQ ID NO: 3695 - RNA, 20 nt, Artificial Sequence
  Synthetic
guaggaguaauccgaguuga

SEQ ID NO: 3696 - RNA, 20 nt, Artificial Sequence
  Synthetic
uaggaguaauccgaguugag

SEQ ID NO: 3697 - RNA, 20 nt, Artificial Sequence
  Synthetic
aggaguaauccgaguugaga

SEQ ID NO: 3698 - RNA, 20 nt, Artificial Sequence
  Synthetic
ggaguaauccgaguugagau

SEQ ID NO: 3699 - RNA, 20 nt, Artificial Sequence
  Synthetic
gaguaauccgaguugagaug

SEQ ID NO: 3700 - RNA, 20 nt, Artificial Sequence
  Synthetic
aguaauccgaguugagaugc

SEQ ID NO: 3701 - RNA, 20 nt, Artificial Sequence
  Synthetic
guaauccgaguugagaugcc

SEQ ID NO: 3702 - RNA, 20 nt, Artificial Sequence
  Synthetic
uaauccgaguugagaugcca

SEQ ID NO: 3703 - RNA, 20 nt, Artificial Sequence
  Synthetic
aauccgaguugagaugccac

SEQ ID NO: 3704 - RNA, 20 nt, Artificial Sequence
  Synthetic
auccgaguugagaugccacu

SEQ ID NO: 3705 - RNA, 20 nt, Artificial Sequence
  Synthetic
uccgaguugagaugccacuc

SEQ ID NO: 3706 - RNA, 20 nt, Artificial Sequence
  Synthetic
ccgaguugagaugccacucc

SEQ ID NO: 3707 - RNA, 20 nt, Artificial Sequence
  Synthetic
cgaguugagaugccacuccg

SEQ ID NO: 3708 - RNA, 20 nt, Artificial Sequence
  Synthetic
gaguugagaugccacuccgg

SEQ ID NO: 3709 - RNA, 20 nt, Artificial Sequence
  Synthetic
aguugagaugccacuccggg

SEQ ID NO: 3710 - RNA, 20 nt, Artificial Sequence
  Synthetic
guugagaugccacuccgggu

SEQ ID NO: 3711 - RNA, 20 nt, Artificial Sequence
  Synthetic
uugagaugccacuccgggug

SEQ ID NO: 3712 - RNA, 20 nt, Artificial Sequence
  Synthetic
ugagaugccacuccgggugc

SEQ ID NO: 3713 - RNA, 20 nt, Artificial Sequence
  Synthetic
gagaugccacuccgggugcc

SEQ ID NO: 3714 - RNA, 20 nt, Artificial Sequence
  Synthetic
agaugccacuccgggugccu

SEQ ID NO: 3715 - RNA, 20 nt, Artificial Sequence
  Synthetic
gaugccacuccgggugccuc

SEQ ID NO: 3716 - RNA, 20 nt, Artificial Sequence
  Synthetic
augccacuccgggugccuca

SEQ ID NO: 3717 - RNA, 20 nt, Artificial Sequence
  Synthetic
ugccacuccgggugccucac

SEQ ID NO: 3718 - RNA, 20 nt, Artificial Sequence
  Synthetic
gccacuccgggugccucacc

SEQ ID NO: 3719 - RNA, 20 nt, Artificial Sequence
  Synthetic
ccacuccgggugccucaccg

SEQ ID NO: 3720 - RNA, 20 nt, Artificial Sequence
  Synthetic
cacuccgggugccucaccgu

SEQ ID NO: 3721 - RNA, 20 nt, Artificial Sequence
  Synthetic
acuccgggugccucaccgug

SEQ ID NO: 3722 - RNA, 20 nt, Artificial Sequence
  Synthetic
cuccgggugccucaccgugu

SEQ ID NO: 3723 - RNA, 20 nt, Artificial Sequence
  Synthetic
uccgggugccucaccgugua

SEQ ID NO: 3724 - RNA, 20 nt, Artificial Sequence
  Synthetic
ccgggugccucaccguguag

SEQ ID NO: 3725 - RNA, 20 nt, Artificial Sequence
  Synthetic
cgggugccucaccguguaga

SEQ ID NO: 3726 - RNA, 20 nt, Artificial Sequence
  Synthetic
gggugccucaccguguagau

SEQ ID NO: 3727 - RNA, 20 nt, Artificial Sequence
  Synthetic
ggugccucaccguguagaug

SEQ ID NO: 3728 - RNA, 20 nt, Artificial Sequence
  Synthetic
gugccucaccguguagaugg

SEQ ID NO: 3729 - RNA, 20 nt, Artificial Sequence
  Synthetic
ugccucaccguguagauggc

SEQ ID NO: 3730 - RNA, 20 nt, Artificial Sequence
  Synthetic
gccucaccguguagauggcc

SEQ ID NO: 3731 - RNA, 20 nt, Artificial Sequence
  Synthetic
ccucaccguguagauggccg

SEQ ID NO: 3732 - RNA, 20 nt, Artificial Sequence
  Synthetic
cucaccguguagauggccgc

SEQ ID NO: 3733 - RNA, 20 nt, Artificial Sequence
  Synthetic
ucaccguguagauggccgca

SEQ ID NO: 3734 - RNA, 20 nt, Artificial Sequence
  Synthetic
caccguguagauggccgcag

SEQ ID NO: 3735 - RNA, 20 nt, Artificial Sequence
  Synthetic
accguguagauggccgcagc

SEQ ID NO: 3736 - RNA, 20 nt, Artificial Sequence
  Synthetic
ccguguagauggccgcagca

SEQ ID NO: 3737 - RNA, 20 nt, Artificial Sequence
  Synthetic
cguguagauggccgcagcac

SEQ ID NO: 3738 - RNA, 20 nt, Artificial Sequence
  Synthetic
guguagauggccgcagcacu

SEQ ID NO: 3739 - RNA, 20 nt, Artificial Sequence
  Synthetic
uguagauggccgcagcacuc

SEQ ID NO: 3740 - RNA, 20 nt, Artificial Sequence
  Synthetic
guagauggccgcagcacuca

SEQ ID NO: 3741 - RNA, 20 nt, Artificial Sequence
  Synthetic
uagauggccgcagcacucau

SEQ ID NO: 3742 - RNA, 20 nt, Artificial Sequence
  Synthetic
agauggccgcagcacucauc

SEQ ID NO: 3743 - RNA, 20 nt, Artificial Sequence
  Synthetic
gauggccgcagcacucauca

SEQ ID NO: 3744 - RNA, 20 nt, Artificial Sequence
  Synthetic
auggccgcagcacucaucac

SEQ ID NO: 3745 - RNA, 20 nt, Artificial Sequence
  Synthetic
uggccgcagcacucaucacg

SEQ ID NO: 3746 - RNA, 20 nt, Artificial Sequence
  Synthetic
ggccgcagcacucaucacgc

SEQ ID NO: 3747 - RNA, 20 nt, Artificial Sequence
  Synthetic
gccgcagcacucaucacgca

SEQ ID NO: 3748 - RNA, 20 nt, Artificial Sequence
  Synthetic
ccgcagcacucaucacgcac

SEQ ID NO: 3749 - RNA, 20 nt, Artificial Sequence
  Synthetic
cgcagcacucaucacgcaca

SEQ ID NO: 3750 - RNA, 20 nt, Artificial Sequence
  Synthetic
gcagcacucaucacgcacag

SEQ ID NO: 3751 - RNA, 20 nt, Artificial Sequence
  Synthetic
cagcacucaucacgcacaga

SEQ ID NO: 3752 - RNA, 20 nt, Artificial Sequence
  Synthetic
agcacucaucacgcacagac

SEQ ID NO: 3753 - RNA, 20 nt, Artificial Sequence
  Synthetic
gcacucaucacgcacagacc

SEQ ID NO: 3754 - RNA, 20 nt, Artificial Sequence
  Synthetic
cacucaucacgcacagacca

SEQ ID NO: 3755 - RNA, 20 nt, Artificial Sequence
  Synthetic
acucaucacgcacagaccag

SEQ ID NO: 3756 - RNA, 20 nt, Artificial Sequence
  Synthetic
cucaucacgcacagaccagc

SEQ ID NO: 3757 - RNA, 20 nt, Artificial Sequence
  Synthetic
ucaucacgcacagaccagca

SEQ ID NO: 3758 - RNA, 20 nt, Artificial Sequence
  Synthetic
caucacgcacagaccagcaa

SEQ ID NO: 3759 - RNA, 20 nt, Artificial Sequence
  Synthetic
aucacgcacagaccagcaag

SEQ ID NO: 3760 - RNA, 20 nt, Artificial Sequence
  Synthetic
ucacgcacagaccagcaaga

SEQ ID NO: 3761 - RNA, 20 nt, Artificial Sequence
  Synthetic
cacgcacagaccagcaagaa

SEQ ID NO: 3762 - RNA, 20 nt, Artificial Sequence
  Synthetic
acgcacagaccagcaagaau

SEQ ID NO: 3763 - RNA, 20 nt, Artificial Sequence
  Synthetic
cgcacagaccagcaagaauu

SEQ ID NO: 3764 - RNA, 20 nt, Artificial Sequence
  Synthetic
gcacagaccagcaagaauuu

SEQ ID NO: 3765 - RNA, 20 nt, Artificial Sequence
  Synthetic
cacagaccagcaagaauuug

SEQ ID NO: 3766 - RNA, 20 nt, Artificial Sequence
  Synthetic
acagaccagcaagaauuugg

SEQ ID NO: 3767 - RNA, 20 nt, Artificial Sequence
  Synthetic
cagaccagcaagaauuugga

SEQ ID NO: 3768 - RNA, 20 nt, Artificial Sequence
  Synthetic
agaccagcaagaauuuggaa

SEQ ID NO: 3769 - RNA, 20 nt, Artificial Sequence
  Synthetic
gaccagcaagaauuuggaag

SEQ ID NO: 3770 - RNA, 20 nt, Artificial Sequence
  Synthetic
accagcaagaauuuggaaga

SEQ ID NO: 3771 - RNA, 20 nt, Artificial Sequence
  Synthetic
ccagcaagaauuuggaagau

SEQ ID NO: 3772 - RNA, 20 nt, Artificial Sequence
  Synthetic
cagcaagaauuuggaagauu

SEQ ID NO: 3773 - RNA, 20 nt, Artificial Sequence
  Synthetic
agcaagaauuuggaagauuc

SEQ ID NO: 3774 - RNA, 20 nt, Artificial Sequence
  Synthetic
gcaagaauuuggaagauucc

SEQ ID NO: 3775 - RNA, 20 nt, Artificial Sequence
  Synthetic
caagaauuuggaagauucca

SEQ ID NO: 3776 - RNA, 20 nt, Artificial Sequence
  Synthetic
aagaauuuggaagauuccag

SEQ ID NO: 3777 - RNA, 20 nt, Artificial Sequence
  Synthetic
agaauuuggaagauuccagu

SEQ ID NO: 3778 - RNA, 20 nt, Artificial Sequence
  Synthetic
gaauuuggaagauuccagug

SEQ ID NO: 3779 - RNA, 20 nt, Artificial Sequence
  Synthetic
aauuuggaagauuccaguga

SEQ ID NO: 3780 - RNA, 20 nt, Artificial Sequence
  Synthetic
auuuggaagauuccagugau

SEQ ID NO: 3781 - RNA, 20 nt, Artificial Sequence
  Synthetic
uuuggaagauuccagugaug

SEQ ID NO: 3782 - RNA, 20 nt, Artificial Sequence
  Synthetic
uuggaagauuccagugaugu

SEQ ID NO: 3783 - RNA, 20 nt, Artificial Sequence
  Synthetic
uggaagauuccagugaugua

SEQ ID NO: 3784 - RNA, 20 nt, Artificial Sequence
  Synthetic
ggaagauuccagugauguaa

SEQ ID NO: 3785 - RNA, 20 nt, Artificial Sequence
  Synthetic
gaagauuccagugauguaaa

SEQ ID NO: 3786 - RNA, 20 nt, Artificial Sequence
  Synthetic
aagauuccagugauguaaaa

SEQ ID NO: 3787 - RNA, 20 nt, Artificial Sequence
  Synthetic
agauuccagugauguaaaac

SEQ ID NO: 3788 - RNA, 20 nt, Artificial Sequence
  Synthetic
gauuccagugauguaaaacc

SEQ ID NO: 3789 - RNA, 20 nt, Artificial Sequence
  Synthetic
auuccagugauguaaaaccu

SEQ ID NO: 3790 - RNA, 20 nt, Artificial Sequence
  Synthetic
uuccagugauguaaaaccug

SEQ ID NO: 3791 - RNA, 20 nt, Artificial Sequence
  Synthetic
uccagugauguaaaaccugc

SEQ ID NO: 3792 - RNA, 20 nt, Artificial Sequence
  Synthetic
ccagugauguaaaaccugcc

SEQ ID NO: 3793 - RNA, 20 nt, Artificial Sequence
  Synthetic
cagugauguaaaaccugccc

SEQ ID NO: 3794 - RNA, 20 nt, Artificial Sequence
  Synthetic
agugauguaaaaccugcccc

SEQ ID NO: 3795 - RNA, 20 nt, Artificial Sequence
  Synthetic
gugauguaaaaccugccccc

SEQ ID NO: 3796 - RNA, 20 nt, Artificial Sequence
  Synthetic
ugauguaaaaccugcccccc

SEQ ID NO: 3797 - RNA, 20 nt, Artificial Sequence
  Synthetic
gauguaaaaccugccccccu

SEQ ID NO: 3798 - RNA, 20 nt, Artificial Sequence
  Synthetic
auguaaaaccugccccccuu

SEQ ID NO: 3799 - RNA, 20 nt, Artificial Sequence
  Synthetic
uguaaaaccugccccccuug

SEQ ID NO: 3800 - RNA, 20 nt, Artificial Sequence
  Synthetic
guaaaaccugccccccuugg

SEQ ID NO: 3801 - RNA, 20 nt, Artificial Sequence
  Synthetic
uaaaaccugccccccuuggu

SEQ ID NO: 3802 - RNA, 20 nt, Artificial Sequence
  Synthetic
aaaaccugccccccuuggug

SEQ ID NO: 3803 - RNA, 20 nt, Artificial Sequence
  Synthetic
aaaccugccccccuugguga

SEQ ID NO: 3804 - RNA, 20 nt, Artificial Sequence
  Synthetic
aaccugccccccuuggugag

SEQ ID NO: 3805 - RNA, 20 nt, Artificial Sequence
  Synthetic
accugccccccuuggugagg

SEQ ID NO: 3806 - RNA, 20 nt, Artificial Sequence
  Synthetic
ccugccccccuuggugaggg

SEQ ID NO: 3807 - RNA, 20 nt, Artificial Sequence
  Synthetic
cugccccccuuggugagggu

SEQ ID NO: 3808 - RNA, 20 nt, Artificial Sequence
  Synthetic
ugccccccuuggugagggug

SEQ ID NO: 3809 - RNA, 20 nt, Artificial Sequence
  Synthetic
gccccccuuggugaggguga

SEQ ID NO: 3810 - RNA, 20 nt, Artificial Sequence
  Synthetic
ccccccuuggugagggugaa

SEQ ID NO: 3811 - RNA, 20 nt, Artificial Sequence
  Synthetic
cccccuuggugagggugaag

SEQ ID NO: 3812 - RNA, 20 nt, Artificial Sequence
  Synthetic
ccccuuggugagggugaaga

SEQ ID NO: 3813 - RNA, 20 nt, Artificial Sequence
  Synthetic
cccuuggugagggugaagag

SEQ ID NO: 3814 - RNA, 20 nt, Artificial Sequence
  Synthetic
ccuuggugagggugaagagu

SEQ ID NO: 3815 - RNA, 20 nt, Artificial Sequence
  Synthetic
cuuggugagggugaagaguu

SEQ ID NO: 3816 - RNA, 20 nt, Artificial Sequence
  Synthetic
uuggugagggugaagaguug

SEQ ID NO: 3817 - RNA, 20 nt, Artificial Sequence
  Synthetic
uggugagggugaagaguugg

SEQ ID NO: 3818 - RNA, 20 nt, Artificial Sequence
  Synthetic
ggugagggugaagaguuggc

SEQ ID NO: 3819 - RNA, 20 nt, Artificial Sequence
  Synthetic
gugagggugaagaguuggca

SEQ ID NO: 3820 - RNA, 20 nt, Artificial Sequence
  Synthetic
ugagggugaagaguuggcag

SEQ ID NO: 3821 - RNA, 20 nt, Artificial Sequence
  Synthetic
gagggugaagaguuggcaga

SEQ ID NO: 3822 - RNA, 20 nt, Artificial Sequence
  Synthetic
agggugaagaguuggcagaa

SEQ ID NO: 3823 - RNA, 20 nt, Artificial Sequence
  Synthetic
gggugaagaguuggcagaag

SEQ ID NO: 3824 - RNA, 20 nt, Artificial Sequence
  Synthetic
ggugaagaguuggcagaaga

SEQ ID NO: 3825 - RNA, 20 nt, Artificial Sequence
  Synthetic
gugaagaguuggcagaagaa

SEQ ID NO: 3826 - RNA, 20 nt, Artificial Sequence
  Synthetic
ugaagaguuggcagaagaac

SEQ ID NO: 3827 - RNA, 20 nt, Artificial Sequence
  Synthetic
gaagaguuggcagaagaaca

SEQ ID NO: 3828 - RNA, 20 nt, Artificial Sequence
  Synthetic
aagaguuggcagaagaacag

SEQ ID NO: 3829 - RNA, 20 nt, Artificial Sequence
  Synthetic
agaguuggcagaagaacagg

SEQ ID NO: 3830 - RNA, 20 nt, Artificial Sequence
  Synthetic
gaguuggcagaagaacagga

SEQ ID NO: 3831 - RNA, 20 nt, Artificial Sequence
  Synthetic
aguuggcagaagaacaggaa

SEQ ID NO: 3832 - RNA, 20 nt, Artificial Sequence
  Synthetic
guuggcagaagaacaggaac

SEQ ID NO: 3833 - RNA, 20 nt, Artificial Sequence
  Synthetic
uuggcagaagaacaggaaca

SEQ ID NO: 3834 - RNA, 20 nt, Artificial Sequence
  Synthetic
uggcagaagaacaggaacag

SEQ ID NO: 3835 - RNA, 20 nt, Artificial Sequence
  Synthetic
ggcagaagaacaggaacaga

SEQ ID NO: 3836 - RNA, 20 nt, Artificial Sequence
  Synthetic
gcagaagaacaggaacagag

SEQ ID NO: 3837 - RNA, 20 nt, Artificial Sequence
  Synthetic
cagaagaacaggaacagaga

SEQ ID NO: 3838 - RNA, 20 nt, Artificial Sequence
  Synthetic
agaagaacaggaacagagac

SEQ ID NO: 3839 - RNA, 20 nt, Artificial Sequence
  Synthetic
gaagaacaggaacagagaca

SEQ ID NO: 3840 - RNA, 20 nt, Artificial Sequence
  Synthetic
aagaacaggaacagagacag

SEQ ID NO: 3841 - RNA, 20 nt, Artificial Sequence
  Synthetic
agaacaggaacagagacaga

SEQ ID NO: 3842 - RNA, 20 nt, Artificial Sequence
  Synthetic
gaacaggaacagagacagaa

SEQ ID NO: 3843 - RNA, 20 nt, Artificial Sequence
  Synthetic
aacaggaacagagacagaau

SEQ ID NO: 3844 - RNA, 20 nt, Artificial Sequence
  Synthetic
acaggaacagagacagaaug

SEQ ID NO: 3845 - RNA, 20 nt, Artificial Sequence
  Synthetic
caggaacagagacagaaugc

SEQ ID NO: 3846 - RNA, 20 nt, Artificial Sequence
  Synthetic
aggaacagagacagaaugcu

SEQ ID NO: 3847 - RNA, 20 nt, Artificial Sequence
  Synthetic
ggaacagagacagaaugcug

SEQ ID NO: 3848 - RNA, 20 nt, Artificial Sequence
  Synthetic
gaacagagacagaaugcuga

SEQ ID NO: 3849 - RNA, 20 nt, Artificial Sequence
  Synthetic
aacagagacagaaugcugaa

SEQ ID NO: 3850 - RNA, 20 nt, Artificial Sequence
  Synthetic
acagagacagaaugcugaag

SEQ ID NO: 3851 - RNA, 20 nt, Artificial Sequence
  Synthetic
cagagacagaaugcugaaga

SEQ ID NO: 3852 - RNA, 20 nt, Artificial Sequence
  Synthetic
agagacagaaugcugaagau

SEQ ID NO: 3853 - RNA, 20 nt, Artificial Sequence
  Synthetic
gagacagaaugcugaagaug

SEQ ID NO: 3854 - RNA, 20 nt, Artificial Sequence
  Synthetic
agacagaaugcugaagauga

SEQ ID NO: 3855 - RNA, 20 nt, Artificial Sequence
  Synthetic
gacagaaugcugaagaugau

SEQ ID NO: 3856 - RNA, 20 nt, Artificial Sequence
  Synthetic
acagaaugcugaagaugauc

SEQ ID NO: 3857 - RNA, 20 nt, Artificial Sequence
  Synthetic
cagaaugcugaagaugaucg

SEQ ID NO: 3858 - RNA, 20 nt, Artificial Sequence
  Synthetic
agaaugcugaagaugaucga

SEQ ID NO: 3859 - RNA, 20 nt, Artificial Sequence
  Synthetic
gaaugcugaagaugaucgac

SEQ ID NO: 3860 - RNA, 20 nt, Artificial Sequence
  Synthetic
aaugcugaagaugaucgaca

SEQ ID NO: 3861 - RNA, 20 nt, Artificial Sequence
  Synthetic
augcugaagaugaucgacag

SEQ ID NO: 3862 - RNA, 20 nt, Artificial Sequence
  Synthetic
ugcugaagaugaucgacagg

SEQ ID NO: 3863 - RNA, 20 nt, Artificial Sequence
  Synthetic
gcugaagaugaucgacagga

SEQ ID NO: 3864 - RNA, 20 nt, Artificial Sequence
  Synthetic
cugaagaugaucgacaggau

SEQ ID NO: 3865 - RNA, 20 nt, Artificial Sequence
  Synthetic
ugaagaugaucgacaggauc

SEQ ID NO: 3866 - RNA, 20 nt, Artificial Sequence
  Synthetic
gaagaugaucgacaggauca

SEQ ID NO: 3867 - RNA, 20 nt, Artificial Sequence
  Synthetic
aagaugaucgacaggaucau

SEQ ID NO: 3868 - RNA, 20 nt, Artificial Sequence
  Synthetic
agaugaucgacaggaucaug

SEQ ID NO: 3869 - RNA, 20 nt, Artificial Sequence
  Synthetic
gaugaucgacaggaucaugg

SEQ ID NO: 3870 - RNA, 20 nt, Artificial Sequence
  Synthetic
augaucgacaggaucauggu

SEQ ID NO: 3871 - RNA, 20 nt, Artificial Sequence
  Synthetic
ugaucgacaggaucauggug

SEQ ID NO: 3872 - RNA, 20 nt, Artificial Sequence
  Synthetic
gaucgacaggaucauggugg

SEQ ID NO: 3873 - RNA, 20 nt, Artificial Sequence
  Synthetic
aucgacaggaucaugguggc

SEQ ID NO: 3874 - RNA, 20 nt, Artificial Sequence
  Synthetic
ucgacaggaucaugguggcc

SEQ ID NO: 3875 - RNA, 20 nt, Artificial Sequence
  Synthetic
cgacaggaucaugguggccu

SEQ ID NO: 3876 - RNA, 20 nt, Artificial Sequence
  Synthetic
gacaggaucaugguggccug

SEQ ID NO: 3877 - RNA, 20 nt, Artificial Sequence
  Synthetic
acaggaucaugguggccugg

SEQ ID NO: 3878 - RNA, 20 nt, Artificial Sequence
  Synthetic
caggaucaugguggccugga

SEQ ID NO: 3879 - RNA, 20 nt, Artificial Sequence
  Synthetic
aggaucaugguggccuggac

SEQ ID NO: 3880 - RNA, 20 nt, Artificial Sequence
  Synthetic
ggaucaugguggccuggaca

SEQ ID NO: 3881 - RNA, 20 nt, Artificial Sequence
  Synthetic
gaucaugguggccuggacag

SEQ ID NO: 3882 - RNA, 20 nt, Artificial Sequence
  Synthetic
aucaugguggccuggacaga

SEQ ID NO: 3883 - RNA, 20 nt, Artificial Sequence
  Synthetic
ucaugguggccuggacagac

SEQ ID NO: 3884 - RNA, 20 nt, Artificial Sequence
  Synthetic
caugguggccuggacagacu

SEQ ID NO: 3885 - RNA, 20 nt, Artificial Sequence
  Synthetic
augguggccuggacagacug

SEQ ID NO: 3886 - RNA, 20 nt, Artificial Sequence
  Synthetic
ugguggccuggacagacugc

SEQ ID NO: 3887 - RNA, 20 nt, Artificial Sequence
  Synthetic
gguggccuggacagacugca

SEQ ID NO: 3888 - RNA, 20 nt, Artificial Sequence
  Synthetic
guggccuggacagacugcag

SEQ ID NO: 3889 - RNA, 20 nt, Artificial Sequence
  Synthetic
uggccuggacagacugcagc

SEQ ID NO: 3890 - RNA, 20 nt, Artificial Sequence
  Synthetic
ggccuggacagacugcagcc

SEQ ID NO: 3891 - RNA, 20 nt, Artificial Sequence
  Synthetic
gccuggacagacugcagcca

SEQ ID NO: 3892 - RNA, 20 nt, Artificial Sequence
  Synthetic
ccuggacagacugcagccau

SEQ ID NO: 3893 - RNA, 20 nt, Artificial Sequence
  Synthetic
cuggacagacugcagccauu

SEQ ID NO: 3894 - RNA, 20 nt, Artificial Sequence
  Synthetic
uggacagacugcagccauuc

SEQ ID NO: 3895 - RNA, 20 nt, Artificial Sequence
  Synthetic
ggacagacugcagccauucg

SEQ ID NO: 3896 - RNA, 20 nt, Artificial Sequence
  Synthetic
gacagacugcagccauucgu

SEQ ID NO: 3897 - RNA, 20 nt, Artificial Sequence
  Synthetic
acagacugcagccauucguu

SEQ ID NO: 3898 - RNA, 20 nt, Artificial Sequence
  Synthetic
cagacugcagccauucguuu

SEQ ID NO: 3899 - RNA, 20 nt, Artificial Sequence
  Synthetic
agacugcagccauucguuug

SEQ ID NO: 3900 - RNA, 20 nt, Artificial Sequence
  Synthetic
gacugcagccauucguuugg

SEQ ID NO: 3901 - RNA, 20 nt, Artificial Sequence
  Synthetic
acugcagccauucguuuggu

SEQ ID NO: 3902 - RNA, 20 nt, Artificial Sequence
  Synthetic
cugcagccauucguuuggug

SEQ ID NO: 3903 - RNA, 20 nt, Artificial Sequence
  Synthetic
ugcagccauucguuugguga

SEQ ID NO: 3904 - RNA, 20 nt, Artificial Sequence
  Synthetic
gcagccauucguuuggugau

SEQ ID NO: 3905 - RNA, 20 nt, Artificial Sequence
  Synthetic
cagccauucguuuggugaug

SEQ ID NO: 3906 - RNA, 20 nt, Artificial Sequence
  Synthetic
agccauucguuuggugauga

SEQ ID NO: 3907 - RNA, 20 nt, Artificial Sequence
  Synthetic
gccauucguuuggugaugau

SEQ ID NO: 3908 - RNA, 20 nt, Artificial Sequence
  Synthetic
ccauucguuuggugaugaug

SEQ ID NO: 3909 - RNA, 20 nt, Artificial Sequence
  Synthetic
cauucguuuggugaugauga

SEQ ID NO: 3910 - RNA, 20 nt, Artificial Sequence
  Synthetic
auucguuuggugaugaugag

SEQ ID NO: 3911 - RNA, 20 nt, Artificial Sequence
  Synthetic
uucguuuggugaugaugaga

SEQ ID NO: 3912 - RNA, 20 nt, Artificial Sequence
  Synthetic
ucguuuggugaugaugagaa

SEQ ID NO: 3913 - RNA, 20 nt, Artificial Sequence
  Synthetic
cguuuggugaugaugagaaa

SEQ ID NO: 3914 - RNA, 20 nt, Artificial Sequence
  Synthetic
guuuggugaugaugagaaac

SEQ ID NO: 3915 - RNA, 20 nt, Artificial Sequence
  Synthetic
uuuggugaugaugagaaaca

SEQ ID NO: 3916 - RNA, 20 nt, Artificial Sequence
  Synthetic
uuggugaugaugagaaacag

SEQ ID NO: 3917 - RNA, 20 nt, Artificial Sequence
  Synthetic
uggugaugaugagaaacagu

SEQ ID NO: 3918 - RNA, 20 nt, Artificial Sequence
  Synthetic
ggugaugaugagaaacagug

SEQ ID NO: 3919 - RNA, 20 nt, Artificial Sequence
  Synthetic
gugaugaugagaaacagugg

SEQ ID NO: 3920 - RNA, 20 nt, Artificial Sequence
  Synthetic
ugaugaugagaaacaguggu

SEQ ID NO: 3921 - RNA, 20 nt, Artificial Sequence
  Synthetic
gaugaugagaaacaguggug

SEQ ID NO: 3922 - RNA, 20 nt, Artificial Sequence
  Synthetic
augaugagaaacaguggugg

SEQ ID NO: 3923 - RNA, 20 nt, Artificial Sequence
  Synthetic
ugaugagaaacaguggugga

SEQ ID NO: 3924 - RNA, 20 nt, Artificial Sequence
  Synthetic
gaugagaaacagugguggac

SEQ ID NO: 3925 - RNA, 20 nt, Artificial Sequence
  Synthetic
augagaaacagugguggaca

SEQ ID NO: 3926 - RNA, 20 nt, Artificial Sequence
  Synthetic
ugagaaacagugguggacau

SEQ ID NO: 3927 - RNA, 20 nt, Artificial Sequence
  Synthetic
gagaaacagugguggacauu

SEQ ID NO: 3928 - RNA, 20 nt, Artificial Sequence
  Synthetic
agaaacagugguggacauuu

SEQ ID NO: 3929 - RNA, 20 nt, Artificial Sequence
  Synthetic
gaaacagugguggacauuuc

SEQ ID NO: 3930 - RNA, 20 nt, Artificial Sequence
  Synthetic
aaacagugguggacauuucc

SEQ ID NO: 3931 - RNA, 20 nt, Artificial Sequence
  Synthetic
aacagugguggacauuuccu

SEQ ID NO: 3932 - RNA, 20 nt, Artificial Sequence
  Synthetic
acagugguggacauuuccug

SEQ ID NO: 3933 - RNA, 20 nt, Artificial Sequence
  Synthetic
cagugguggacauuuccuga

SEQ ID NO: 3934 - RNA, 20 nt, Artificial Sequence
  Synthetic
agugguggacauuuccugag

SEQ ID NO: 3935 - RNA, 20 nt, Artificial Sequence
  Synthetic
gugguggacauuuccugagg

SEQ ID NO: 3936 - RNA, 20 nt, Artificial Sequence
  Synthetic
ugguggacauuuccugagga

SEQ ID NO: 3937 - RNA, 20 nt, Artificial Sequence
  Synthetic
gguggacauuuccugaggaa

SEQ ID NO: 3938 - RNA, 20 nt, Artificial Sequence
  Synthetic
guggacauuuccugaggaag

SEQ ID NO: 3939 - RNA, 20 nt, Artificial Sequence
  Synthetic
uggacauuuccugaggaaga

SEQ ID NO: 3940 - RNA, 20 nt, Artificial Sequence
  Synthetic
ggacauuuccugaggaagag

SEQ ID NO: 3941 - RNA, 20 nt, Artificial Sequence
  Synthetic
gacauuuccugaggaagagg

SEQ ID NO: 3942 - RNA, 20 nt, Artificial Sequence
  Synthetic
acauuuccugaggaagaggu

SEQ ID NO: 3943 - RNA, 20 nt, Artificial Sequence
  Synthetic
cauuuccugaggaagaggug

SEQ ID NO: 3944 - RNA, 20 nt, Artificial Sequence
  Synthetic
auuuccugaggaagaggugc

SEQ ID NO: 3945 - RNA, 20 nt, Artificial Sequence
  Synthetic
uuuccugaggaagaggugcu

SEQ ID NO: 3946 - RNA, 20 nt, Artificial Sequence
  Synthetic
uuccugaggaagaggugcua

SEQ ID NO: 3947 - RNA, 20 nt, Artificial Sequence
  Synthetic
uccugaggaagaggugcuac

SEQ ID NO: 3948 - RNA, 20 nt, Artificial Sequence
  Synthetic
ccugaggaagaggugcuaca

SEQ ID NO: 3949 - RNA, 20 nt, Artificial Sequence
  Synthetic
cugaggaagaggugcuacag

SEQ ID NO: 3950 - RNA, 20 nt, Artificial Sequence
  Synthetic
ugaggaagaggugcuacagu

SEQ ID NO: 3951 - RNA, 20 nt, Artificial Sequence
  Synthetic
gaggaagaggugcuacaguu

SEQ ID NO: 3952 - RNA, 20 nt, Artificial Sequence
  Synthetic
aggaagaggugcuacaguuc

SEQ ID NO: 3953 - RNA, 20 nt, Artificial Sequence
  Synthetic
ggaagaggugcuacaguucu

SEQ ID NO: 3954 - RNA, 20 nt, Artificial Sequence
  Synthetic
gaagaggugcuacaguucug

SEQ ID NO: 3955 - RNA, 20 nt, Artificial Sequence
  Synthetic
aagaggugcuacaguucugc

SEQ ID NO: 3956 - RNA, 20 nt, Artificial Sequence
  Synthetic
agaggugcuacaguucugcc

SEQ ID NO: 3957 - RNA, 20 nt, Artificial Sequence
  Synthetic
gaggugcuacaguucugcca

SEQ ID NO: 3958 - RNA, 20 nt, Artificial Sequence
  Synthetic
aggugcuacaguucugccag

SEQ ID NO: 3959 - RNA, 20 nt, Artificial Sequence
  Synthetic
ggugcuacaguucugccaga

SEQ ID NO: 3960 - RNA, 20 nt, Artificial Sequence
  Synthetic
gugcuacaguucugccagag

SEQ ID NO: 3961 - RNA, 20 nt, Artificial Sequence
  Synthetic
ugcuacaguucugccagaga

SEQ ID NO: 3962 - RNA, 20 nt, Artificial Sequence
  Synthetic
gcuacaguucugccagagau

SEQ ID NO: 3963 - RNA, 20 nt, Artificial Sequence
  Synthetic
cuacaguucugccagagauc

SEQ ID NO: 3964 - RNA, 20 nt, Artificial Sequence
  Synthetic
uacaguucugccagagauca

SEQ ID NO: 3965 - RNA, 20 nt, Artificial Sequence
  Synthetic
acaguucugccagagaucag

SEQ ID NO: 3966 - RNA, 20 nt, Artificial Sequence
  Synthetic
caguucugccagagaucagu

SEQ ID NO: 3967 - RNA, 20 nt, Artificial Sequence
  Synthetic
aguucugccagagaucaguu

SEQ ID NO: 3968 - RNA, 20 nt, Artificial Sequence
  Synthetic
guucugccagagaucaguug

SEQ ID NO: 3969 - RNA, 20 nt, Artificial Sequence
  Synthetic
uucugccagagaucaguugc

SEQ ID NO: 3970 - RNA, 20 nt, Artificial Sequence
  Synthetic
ucugccagagaucaguugcg

SEQ ID NO: 3971 - RNA, 20 nt, Artificial Sequence
  Synthetic
cugccagagaucaguugcgu

SEQ ID NO: 3972 - RNA, 20 nt, Artificial Sequence
  Synthetic
ugccagagaucaguugcgug

SEQ ID NO: 3973 - RNA, 20 nt, Artificial Sequence
  Synthetic
gccagagaucaguugcgugu

SEQ ID NO: 3974 - RNA, 20 nt, Artificial Sequence
  Synthetic
ccagagaucaguugcguguc

SEQ ID NO: 3975 - RNA, 20 nt, Artificial Sequence
  Synthetic
cagagaucaguugcgugucc

SEQ ID NO: 3976 - RNA, 20 nt, Artificial Sequence
  Synthetic
agagaucaguugcgugucca

SEQ ID NO: 3977 - RNA, 20 nt, Artificial Sequence
  Synthetic
gagaucaguugcguguccau

SEQ ID NO: 3978 - RNA, 20 nt, Artificial Sequence
  Synthetic
agaucaguugcguguccauu

SEQ ID NO: 3979 - RNA, 20 nt, Artificial Sequence
  Synthetic
gaucaguugcguguccauug

SEQ ID NO: 3980 - RNA, 20 nt, Artificial Sequence
  Synthetic
aucaguugcguguccauugc

SEQ ID NO: 3981 - RNA, 20 nt, Artificial Sequence
  Synthetic
ucaguugcguguccauugcc

SEQ ID NO: 3982 - RNA, 20 nt, Artificial Sequence
  Synthetic
caguugcguguccauugccc

SEQ ID NO: 3983 - RNA, 20 nt, Artificial Sequence
  Synthetic
aguugcguguccauugccca

SEQ ID NO: 3984 - RNA, 20 nt, Artificial Sequence
  Synthetic
guugcguguccauugcccac

SEQ ID NO: 3985 - RNA, 20 nt, Artificial Sequence
  Synthetic
uugcguguccauugcccacg

SEQ ID NO: 3986 - RNA, 20 nt, Artificial Sequence
  Synthetic
ugcguguccauugcccacga

SEQ ID NO: 3987 - RNA, 20 nt, Artificial Sequence
  Synthetic
gcguguccauugcccacgau

SEQ ID NO: 3988 - RNA, 20 nt, Artificial Sequence
  Synthetic
cguguccauugcccacgauc

SEQ ID NO: 3989 - RNA, 20 nt, Artificial Sequence
  Synthetic
guguccauugcccacgaucc

SEQ ID NO: 3990 - RNA, 20 nt, Artificial Sequence
  Synthetic
uguccauugcccacgaucca

SEQ ID NO: 3991 - RNA, 20 nt, Artificial Sequence
  Synthetic
guccauugcccacgauccau

SEQ ID NO: 3992 - RNA, 20 nt, Artificial Sequence
  Synthetic
uccauugcccacgauccauu

SEQ ID NO: 3993 - RNA, 20 nt, Artificial Sequence
  Synthetic
ccauugcccacgauccauug

SEQ ID NO: 3994 - RNA, 20 nt, Artificial Sequence
  Synthetic
cauugcccacgauccauugg

SEQ ID NO: 3995 - RNA, 20 nt, Artificial Sequence
  Synthetic
auugcccacgauccauuggc

SEQ ID NO: 3996 - RNA, 20 nt, Artificial Sequence
  Synthetic
uugcccacgauccauuggcu

SEQ ID NO: 3997 - RNA, 20 nt, Artificial Sequence
  Synthetic
ugcccacgauccauuggcug

SEQ ID NO: 3998 - RNA, 20 nt, Artificial Sequence
  Synthetic
gcccacgauccauuggcuga

SEQ ID NO: 3999 - RNA, 20 nt, Artificial Sequence
  Synthetic
cccacgauccauuggcugac

SEQ ID NO: 4000 - RNA, 20 nt, Artificial Sequence
  Synthetic
ccacgauccauuggcugacg

SEQ ID NO: 4001 - RNA, 20 nt, Artificial Sequence
  Synthetic
cacgauccauuggcugacga

SEQ ID NO: 4002 - RNA, 20 nt, Artificial Sequence
  Synthetic
acgauccauuggcugacgau

SEQ ID NO: 4003 - RNA, 20 nt, Artificial Sequence
  Synthetic
cgauccauuggcugacgauc

SEQ ID NO: 4004 - RNA, 20 nt, Artificial Sequence
  Synthetic
gauccauuggcugacgaucg

SEQ ID NO: 4005 - RNA, 20 nt, Artificial Sequence
  Synthetic
auccauuggcugacgaucgu

SEQ ID NO: 4006 - RNA, 20 nt, Artificial Sequence
  Synthetic
uccauuggcugacgaucgug

SEQ ID NO: 4007 - RNA, 20 nt, Artificial Sequence
  Synthetic
ccauuggcugacgaucgugg

SEQ ID NO: 4008 - RNA, 20 nt, Artificial Sequence
  Synthetic
cauuggcugacgaucgugga

SEQ ID NO: 4009 - RNA, 20 nt, Artificial Sequence
  Synthetic
auuggcugacgaucguggag

SEQ ID NO: 4010 - RNA, 20 nt, Artificial Sequence
  Synthetic
uuggcugacgaucguggaga

SEQ ID NO: 4011 - RNA, 20 nt, Artificial Sequence
  Synthetic
uggcugacgaucguggagac

SEQ ID NO: 4012 - RNA, 20 nt, Artificial Sequence
  Synthetic
ggcugacgaucguggagacg

SEQ ID NO: 4013 - RNA, 20 nt, Artificial Sequence
  Synthetic
gcugacgaucguggagacga

SEQ ID NO: 4014 - RNA, 20 nt, Artificial Sequence
  Synthetic
cugacgaucguggagacgaa

SEQ ID NO: 4015 - RNA, 20 nt, Artificial Sequence
  Synthetic
ugacgaucguggagacgaac

SEQ ID NO: 4016 - RNA, 20 nt, Artificial Sequence
  Synthetic
gacgaucguggagacgaaca

SEQ ID NO: 4017 - RNA, 20 nt, Artificial Sequence
  Synthetic
acgaucguggagacgaacag

SEQ ID NO: 4018 - RNA, 20 nt, Artificial Sequence
  Synthetic
cgaucguggagacgaacagc

SEQ ID NO: 4019 - RNA, 20 nt, Artificial Sequence
  Synthetic
gaucguggagacgaacagca

SEQ ID NO: 4020 - RNA, 20 nt, Artificial Sequence
  Synthetic
aucguggagacgaacagcag

SEQ ID NO: 4021 - RNA, 20 nt, Artificial Sequence
  Synthetic
ucguggagacgaacagcagc

SEQ ID NO: 4022 - RNA, 20 nt, Artificial Sequence
  Synthetic
cguggagacgaacagcagca

SEQ ID NO: 4023 - RNA, 20 nt, Artificial Sequence
  Synthetic
guggagacgaacagcagcac

SEQ ID NO: 4024 - RNA, 20 nt, Artificial Sequence
  Synthetic
uggagacgaacagcagcacc

SEQ ID NO: 4025 - RNA, 20 nt, Artificial Sequence
  Synthetic
ggagacgaacagcagcacca

SEQ ID NO: 4026 - RNA, 20 nt, Artificial Sequence
  Synthetic
gagacgaacagcagcaccag

SEQ ID NO: 4027 - RNA, 20 nt, Artificial Sequence
  Synthetic
agacgaacagcagcaccagc

SEQ ID NO: 4028 - RNA, 20 nt, Artificial Sequence
  Synthetic
gacgaacagcagcaccagca

SEQ ID NO: 4029 - RNA, 20 nt, Artificial Sequence
  Synthetic
acgaacagcagcaccagcac

SEQ ID NO: 4030 - RNA, 20 nt, Artificial Sequence
  Synthetic
cgaacagcagcaccagcacc

SEQ ID NO: 4031 - RNA, 20 nt, Artificial Sequence
  Synthetic
gaacagcagcaccagcaccg

SEQ ID NO: 4032 - RNA, 20 nt, Artificial Sequence
  Synthetic
aacagcagcaccagcaccgc

SEQ ID NO: 4033 - RNA, 20 nt, Artificial Sequence
  Synthetic
acagcagcaccagcaccgcg

SEQ ID NO: 4034 - RNA, 20 nt, Artificial Sequence
  Synthetic
cagcagcaccagcaccgcga

SEQ ID NO: 4035 - RNA, 20 nt, Artificial Sequence
  Synthetic
agcagcaccagcaccgcgac

SEQ ID NO: 4036 - RNA, 20 nt, Artificial Sequence
  Synthetic
gcagcaccagcaccgcgacg

SEQ ID NO: 4037 - RNA, 20 nt, Artificial Sequence
  Synthetic
cagcaccagcaccgcgacgu

SEQ ID NO: 4038 - RNA, 20 nt, Artificial Sequence
  Synthetic
agcaccagcaccgcgacgug

SEQ ID NO: 4039 - RNA, 20 nt, Artificial Sequence
  Synthetic
gcaccagcaccgcgacgugg

SEQ ID NO: 4040 - RNA, 20 nt, Artificial Sequence
  Synthetic
caccagcaccgcgacgugga

SEQ ID NO: 4041 - RNA, 20 nt, Artificial Sequence
  Synthetic
accagcaccgcgacguggag

SEQ ID NO: 4042 - RNA, 20 nt, Artificial Sequence
  Synthetic
ccagcaccgcgacguggagg

SEQ ID NO: 4043 - RNA, 20 nt, Artificial Sequence
  Synthetic
cagcaccgcgacguggagga

SEQ ID NO: 4044 - RNA, 20 nt, Artificial Sequence
  Synthetic
agcaccgcgacguggaggac

SEQ ID NO: 4045 - RNA, 20 nt, Artificial Sequence
  Synthetic
gcaccgcgacguggaggacg

SEQ ID NO: 4046 - RNA, 20 nt, Artificial Sequence
  Synthetic
caccgcgacguggaggacga

SEQ ID NO: 4047 - RNA, 20 nt, Artificial Sequence
  Synthetic
accgcgacguggaggacgau

SEQ ID NO: 4048 - RNA, 20 nt, Artificial Sequence
  Synthetic
ccgcgacguggaggacgaug

SEQ ID NO: 4049 - RNA, 20 nt, Artificial Sequence
  Synthetic
cgcgacguggaggacgauga

SEQ ID NO: 4050 - RNA, 20 nt, Artificial Sequence
  Synthetic
gcgacguggaggacgaugau

SEQ ID NO: 4051 - RNA, 20 nt, Artificial Sequence
  Synthetic
cgacguggaggacgaugaua

SEQ ID NO: 4052 - RNA, 20 nt, Artificial Sequence
  Synthetic
gacguggaggacgaugauac

SEQ ID NO: 4053 - RNA, 20 nt, Artificial Sequence
  Synthetic
acguggaggacgaugauacu

SEQ ID NO: 4054 - RNA, 20 nt, Artificial Sequence
  Synthetic
cguggaggacgaugauacuc

SEQ ID NO: 4055 - RNA, 20 nt, Artificial Sequence
  Synthetic
guggaggacgaugauacuca

SEQ ID NO: 4056 - RNA, 20 nt, Artificial Sequence
  Synthetic
uggaggacgaugauacucag

SEQ ID NO: 4057 - RNA, 20 nt, Artificial Sequence
  Synthetic
ggaggacgaugauacucagc

SEQ ID NO: 4058 - RNA, 20 nt, Artificial Sequence
  Synthetic
gaggacgaugauacucagca

SEQ ID NO: 4059 - RNA, 20 nt, Artificial Sequence
  Synthetic
aggacgaugauacucagcaa

SEQ ID NO: 4060 - RNA, 20 nt, Artificial Sequence
  Synthetic
ggacgaugauacucagcaac

SEQ ID NO: 4061 - RNA, 20 nt, Artificial Sequence
  Synthetic
gacgaugauacucagcaaca

SEQ ID NO: 4062 - RNA, 20 nt, Artificial Sequence
  Synthetic
acgaugauacucagcaacag

SEQ ID NO: 4063 - RNA, 20 nt, Artificial Sequence
  Synthetic
cgaugauacucagcaacagg

SEQ ID NO: 4064 - RNA, 20 nt, Artificial Sequence
  Synthetic
gaugauacucagcaacagga

SEQ ID NO: 4065 - RNA, 20 nt, Artificial Sequence
  Synthetic
augauacucagcaacaggag

SEQ ID NO: 4066 - RNA, 20 nt, Artificial Sequence
  Synthetic
ugauacucagcaacaggagg

SEQ ID NO: 4067 - RNA, 20 nt, Artificial Sequence
  Synthetic
gauacucagcaacaggagga

SEQ ID NO: 4068 - RNA, 20 nt, Artificial Sequence
  Synthetic
auacucagcaacaggaggag

SEQ ID NO: 4069 - RNA, 20 nt, Artificial Sequence
  Synthetic
uacucagcaacaggaggagc

SEQ ID NO: 4070 - RNA, 20 nt, Artificial Sequence
  Synthetic
acucagcaacaggaggagca

SEQ ID NO: 4071 - RNA, 20 nt, Artificial Sequence
  Synthetic
cucagcaacaggaggagcau

SEQ ID NO: 4072 - RNA, 20 nt, Artificial Sequence
  Synthetic
ucagcaacaggaggagcauu

SEQ ID NO: 4073 - RNA, 20 nt, Artificial Sequence
  Synthetic
cagcaacaggaggagcauuc

SEQ ID NO: 4074 - RNA, 20 nt, Artificial Sequence
  Synthetic
agcaacaggaggagcauucu

SEQ ID NO: 4075 - RNA, 20 nt, Artificial Sequence
  Synthetic
gcaacaggaggagcauucug

SEQ ID NO: 4076 - RNA, 20 nt, Artificial Sequence
  Synthetic
caacaggaggagcauucugg

SEQ ID NO: 4077 - RNA, 20 nt, Artificial Sequence
  Synthetic
aacaggaggagcauucuggc

SEQ ID NO: 4078 - RNA, 20 nt, Artificial Sequence
  Synthetic
acaggaggagcauucuggcg

SEQ ID NO: 4079 - RNA, 20 nt, Artificial Sequence
  Synthetic
caggaggagcauucuggcgg

SEQ ID NO: 4080 - RNA, 20 nt, Artificial Sequence
  Synthetic
aggaggagcauucuggcggc

SEQ ID NO: 4081 - RNA, 20 nt, Artificial Sequence
  Synthetic
ggaggagcauucuggcggca

SEQ ID NO: 4082 - RNA, 20 nt, Artificial Sequence
  Synthetic
gaggagcauucuggcggcaa

SEQ ID NO: 4083 - RNA, 20 nt, Artificial Sequence
  Synthetic
aggagcauucuggcggcaag

SEQ ID NO: 4084 - RNA, 20 nt, Artificial Sequence
  Synthetic
ggagcauucuggcggcaagu

SEQ ID NO: 4085 - RNA, 20 nt, Artificial Sequence
  Synthetic
gagcauucuggcggcaaguu

SEQ ID NO: 4086 - RNA, 20 nt, Artificial Sequence
  Synthetic
agcauucuggcggcaaguuc

SEQ ID NO: 4087 - RNA, 20 nt, Artificial Sequence
  Synthetic
gcauucuggcggcaaguucu

SEQ ID NO: 4088 - RNA, 20 nt, Artificial Sequence
  Synthetic
cauucuggcggcaaguucug

SEQ ID NO: 4089 - RNA, 20 nt, Artificial Sequence
  Synthetic
auucuggcggcaaguucugc

SEQ ID NO: 4090 - RNA, 20 nt, Artificial Sequence
  Synthetic
uucuggcggcaaguucugcu

SEQ ID NO: 4091 - RNA, 20 nt, Artificial Sequence
  Synthetic
ucuggcggcaaguucugcuc

SEQ ID NO: 4092 - RNA, 20 nt, Artificial Sequence
  Synthetic
cuggcggcaaguucugcuca

SEQ ID NO: 4093 - RNA, 20 nt, Artificial Sequence
  Synthetic
uggcggcaaguucugcucag

SEQ ID NO: 4094 - RNA, 20 nt, Artificial Sequence
  Synthetic
ggcggcaaguucugcucagc

SEQ ID NO: 4095 - RNA, 20 nt, Artificial Sequence
  Synthetic
gcggcaaguucugcucagcg

SEQ ID NO: 4096 - RNA, 20 nt, Artificial Sequence
  Synthetic
cggcaaguucugcucagcgg

SEQ ID NO: 4097 - RNA, 20 nt, Artificial Sequence
  Synthetic
ggcaaguucugcucagcgga

SEQ ID NO: 4098 - RNA, 20 nt, Artificial Sequence
  Synthetic
gcaaguucugcucagcggag

SEQ ID NO: 4099 - RNA, 20 nt, Artificial Sequence
  Synthetic
caaguucugcucagcggagu

SEQ ID NO: 4100 - RNA, 20 nt, Artificial Sequence
  Synthetic
aaguucugcucagcggaguu

SEQ ID NO: 4101 - RNA, 20 nt, Artificial Sequence
  Synthetic
aguucugcucagcggaguuu

SEQ ID NO: 4102 - RNA, 20 nt, Artificial Sequence
  Synthetic
guucugcucagcggaguuuc

SEQ ID NO: 4103 - RNA, 20 nt, Artificial Sequence
  Synthetic
uucugcucagcggaguuucu

SEQ ID NO: 4104 - RNA, 20 nt, Artificial Sequence
  Synthetic
ucugcucagcggaguuucug

SEQ ID NO: 4105 - RNA, 20 nt, Artificial Sequence
  Synthetic
cugcucagcggaguuucugc

SEQ ID NO: 4106 - RNA, 20 nt, Artificial Sequence
  Synthetic
ugcucagcggaguuucugca

SEQ ID NO: 4107 - RNA, 20 nt, Artificial Sequence
  Synthetic
gcucagcggaguuucugcag

SEQ ID NO: 4108 - RNA, 20 nt, Artificial Sequence
  Synthetic
cucagcggaguuucugcagc

SEQ ID NO: 4109 - RNA, 20 nt, Artificial Sequence
  Synthetic
ucagcggaguuucugcagcc

SEQ ID NO: 4110 - RNA, 20 nt, Artificial Sequence
  Synthetic
cagcggaguuucugcagccc

SEQ ID NO: 4111 - RNA, 20 nt, Artificial Sequence
  Synthetic
agcggaguuucugcagccca

SEQ ID NO: 4112 - RNA, 20 nt, Artificial Sequence
  Synthetic
gcggaguuucugcagcccaa

SEQ ID NO: 4113 - RNA, 20 nt, Artificial Sequence
  Synthetic
cggaguuucugcagcccaaa

SEQ ID NO: 4114 - RNA, 20 nt, Artificial Sequence
  Synthetic
ggaguuucugcagcccaaag

SEQ ID NO: 4115 - RNA, 20 nt, Artificial Sequence
  Synthetic
gaguuucugcagcccaaagg

SEQ ID NO: 4116 - RNA, 20 nt, Artificial Sequence
  Synthetic
aguuucugcagcccaaagga

SEQ ID NO: 4117 - RNA, 20 nt, Artificial Sequence
  Synthetic
guuucugcagcccaaaggaa

SEQ ID NO: 4118 - RNA, 20 nt, Artificial Sequence
  Synthetic
uuucugcagcccaaaggaac

SEQ ID NO: 4119 - RNA, 20 nt, Artificial Sequence
  Synthetic
uucugcagcccaaaggaaca

SEQ ID NO: 4120 - RNA, 20 nt, Artificial Sequence
  Synthetic
ucugcagcccaaaggaacag

SEQ ID NO: 4121 - RNA, 20 nt, Artificial Sequence
  Synthetic
cugcagcccaaaggaacagc

SEQ ID NO: 4122 - RNA, 20 nt, Artificial Sequence
  Synthetic
ugcagcccaaaggaacagcu

SEQ ID NO: 4123 - RNA, 20 nt, Artificial Sequence
  Synthetic
gcagcccaaaggaacagcug

SEQ ID NO: 4124 - RNA, 20 nt, Artificial Sequence
  Synthetic
cagcccaaaggaacagcugu

SEQ ID NO: 4125 - RNA, 20 nt, Artificial Sequence
  Synthetic
agcccaaaggaacagcuguc

SEQ ID NO: 4126 - RNA, 20 nt, Artificial Sequence
  Synthetic
gcccaaaggaacagcugucc

SEQ ID NO: 4127 - RNA, 20 nt, Artificial Sequence
  Synthetic
cccaaaggaacagcuguccc

SEQ ID NO: 4128 - RNA, 20 nt, Artificial Sequence
  Synthetic
ccaaaggaacagcugucccg

SEQ ID NO: 4129 - RNA, 20 nt, Artificial Sequence
  Synthetic
caaaggaacagcugucccga

SEQ ID NO: 4130 - RNA, 20 nt, Artificial Sequence
  Synthetic
aaaggaacagcugucccgau

SEQ ID NO: 4131 - RNA, 20 nt, Artificial Sequence
  Synthetic
aaggaacagcugucccgauc

SEQ ID NO: 4132 - RNA, 20 nt, Artificial Sequence
  Synthetic
aggaacagcugucccgaucc

SEQ ID NO: 4133 - RNA, 20 nt, Artificial Sequence
  Synthetic
ggaacagcugucccgauccu

SEQ ID NO: 4134 - RNA, 20 nt, Artificial Sequence
  Synthetic
gaacagcugucccgauccuc

SEQ ID NO: 4135 - RNA, 20 nt, Artificial Sequence
  Synthetic
aacagcugucccgauccuca

SEQ ID NO: 4136 - RNA, 20 nt, Artificial Sequence
  Synthetic
acagcugucccgauccucag

SEQ ID NO: 4137 - RNA, 20 nt, Artificial Sequence
  Synthetic
cagcugucccgauccucagg

SEQ ID NO: 4138 - RNA, 20 nt, Artificial Sequence
  Synthetic
agcugucccgauccucaggg

SEQ ID NO: 4139 - RNA, 20 nt, Artificial Sequence
  Synthetic
gcugucccgauccucagggu

SEQ ID NO: 4140 - RNA, 20 nt, Artificial Sequence
  Synthetic
cugucccgauccucagggug

SEQ ID NO: 4141 - RNA, 20 nt, Artificial Sequence
  Synthetic
ugucccgauccucagggugg

SEQ ID NO: 4142 - RNA, 20 nt, Artificial Sequence
  Synthetic
gucccgauccucaggguggc

SEQ ID NO: 4143 - RNA, 20 nt, Artificial Sequence
  Synthetic
ucccgauccucaggguggcc

SEQ ID NO: 4144 - RNA, 20 nt, Artificial Sequence
  Synthetic
cccgauccucaggguggccu

SEQ ID NO: 4145 - RNA, 20 nt, Artificial Sequence
  Synthetic
ccgauccucaggguggccuc

SEQ ID NO: 4146 - RNA, 20 nt, Artificial Sequence
  Synthetic
cgauccucaggguggccuca

SEQ ID NO: 4147 - RNA, 20 nt, Artificial Sequence
  Synthetic
gauccucaggguggccucaa

SEQ ID NO: 4148 - RNA, 20 nt, Artificial Sequence
  Synthetic
auccucaggguggccucaaa

SEQ ID NO: 4149 - RNA, 20 nt, Artificial Sequence
  Synthetic
uccucaggguggccucaaac

SEQ ID NO: 4150 - RNA, 20 nt, Artificial Sequence
  Synthetic
ccucaggguggccucaaaca

SEQ ID NO: 4151 - RNA, 20 nt, Artificial Sequence
  Synthetic
cucaggguggccucaaacac

SEQ ID NO: 4152 - RNA, 20 nt, Artificial Sequence
  Synthetic
ucaggguggccucaaacaca

SEQ ID NO: 4153 - RNA, 20 nt, Artificial Sequence
  Synthetic
caggguggccucaaacacaa

SEQ ID NO: 4154 - RNA, 20 nt, Artificial Sequence
  Synthetic
aggguggccucaaacacaaa

SEQ ID NO: 4155 - RNA, 20 nt, Artificial Sequence
  Synthetic
ggguggccucaaacacaaac

SEQ ID NO: 4156 - RNA, 20 nt, Artificial Sequence
  Synthetic
gguggccucaaacacaaacu

SEQ ID NO: 4157 - RNA, 20 nt, Artificial Sequence
  Synthetic
guggccucaaacacaaacuc

SEQ ID NO: 4158 - RNA, 20 nt, Artificial Sequence
  Synthetic
uggccucaaacacaaacucg

SEQ ID NO: 4159 - RNA, 20 nt, Artificial Sequence
  Synthetic
ggccucaaacacaaacucgg

SEQ ID NO: 4160 - RNA, 20 nt, Artificial Sequence
  Synthetic
gccucaaacacaaacucggg

SEQ ID NO: 4161 - RNA, 20 nt, Artificial Sequence
  Synthetic
ccucaaacacaaacucgggu

SEQ ID NO: 4162 - RNA, 20 nt, Artificial Sequence
  Synthetic
cucaaacacaaacucgggug

SEQ ID NO: 4163 - RNA, 20 nt, Artificial Sequence
  Synthetic
ucaaacacaaacucgggugc

SEQ ID NO: 4164 - RNA, 20 nt, Artificial Sequence
  Synthetic
caaacacaaacucgggugcg

SEQ ID NO: 4165 - RNA, 20 nt, Artificial Sequence
  Synthetic
aaacacaaacucgggugcgu

SEQ ID NO: 4166 - RNA, 20 nt, Artificial Sequence
  Synthetic
aacacaaacucgggugcguu

SEQ ID NO: 4167 - RNA, 20 nt, Artificial Sequence
  Synthetic
acacaaacucgggugcguug

SEQ ID NO: 4168 - RNA, 20 nt, Artificial Sequence
  Synthetic
cacaaacucgggugcguugg

SEQ ID NO: 4169 - RNA, 20 nt, Artificial Sequence
  Synthetic
acaaacucgggugcguuggc

SEQ ID NO: 4170 - RNA, 20 nt, Artificial Sequence
  Synthetic
caaacucgggugcguuggcu

SEQ ID NO: 4171 - RNA, 20 nt, Artificial Sequence
  Synthetic
aaacucgggugcguuggcuc

SEQ ID NO: 4172 - RNA, 20 nt, Artificial Sequence
  Synthetic
aacucgggugcguuggcucc

SEQ ID NO: 4173 - RNA, 20 nt, Artificial Sequence
  Synthetic
acucgggugcguuggcuccg

SEQ ID NO: 4174 - RNA, 20 nt, Artificial Sequence
  Synthetic
cucgggugcguuggcuccgc

SEQ ID NO: 4175 - RNA, 20 nt, Artificial Sequence
  Synthetic
ucgggugcguuggcuccgcu

SEQ ID NO: 4176 - RNA, 20 nt, Artificial Sequence
  Synthetic
cgggugcguuggcuccgcug

SEQ ID NO: 4177 - RNA, 20 nt, Artificial Sequence
  Synthetic
gggugcguuggcuccgcugc

SEQ ID NO: 4178 - RNA, 20 nt, Artificial Sequence
  Synthetic
ggugcguuggcuccgcugcu

SEQ ID NO: 4179 - RNA, 20 nt, Artificial Sequence
  Synthetic
gugcguuggcuccgcugcug

SEQ ID NO: 4180 - RNA, 20 nt, Artificial Sequence
  Synthetic
ugcguuggcuccgcugcugg

SEQ ID NO: 4181 - RNA, 20 nt, Artificial Sequence
  Synthetic
gcguuggcuccgcugcuggc

SEQ ID NO: 4182 - RNA, 20 nt, Artificial Sequence
  Synthetic
cguuggcuccgcugcuggcg

SEQ ID NO: 4183 - RNA, 20 nt, Artificial Sequence
  Synthetic
guuggcuccgcugcuggcgc

SEQ ID NO: 4184 - RNA, 20 nt, Artificial Sequence
  Synthetic
uuggcuccgcugcuggcgcc

SEQ ID NO: 4185 - RNA, 20 nt, Artificial Sequence
  Synthetic
uggcuccgcugcuggcgccg

SEQ ID NO: 4186 - RNA, 20 nt, Artificial Sequence
  Synthetic
ggcuccgcugcuggcgccgc

SEQ ID NO: 4187 - RNA, 20 nt, Artificial Sequence
  Synthetic
gcuccgcugcuggcgccgcc

SEQ ID NO: 4188 - RNA, 20 nt, Artificial Sequence
  Synthetic
cuccgcugcuggcgccgcca

SEQ ID NO: 4189 - RNA, 20 nt, Artificial Sequence
  Synthetic
uccgcugcuggcgccgccaa

SEQ ID NO: 4190 - RNA, 20 nt, Artificial Sequence
  Synthetic
ccgcugcuggcgccgccaaa

SEQ ID NO: 4191 - RNA, 20 nt, Artificial Sequence
  Synthetic
cgcugcuggcgccgccaaag

SEQ ID NO: 4192 - RNA, 20 nt, Artificial Sequence
  Synthetic
gcugcuggcgccgccaaagc

SEQ ID NO: 4193 - RNA, 20 nt, Artificial Sequence
  Synthetic
cugcuggcgccgccaaagcu

SEQ ID NO: 4194 - RNA, 20 nt, Artificial Sequence
  Synthetic
ugcuggcgccgccaaagcug

SEQ ID NO: 4195 - RNA, 20 nt, Artificial Sequence
  Synthetic
gcuggcgccgccaaagcugc

SEQ ID NO: 4196 - RNA, 20 nt, Artificial Sequence
  Synthetic
cuggcgccgccaaagcugcg

SEQ ID NO: 4197 - RNA, 20 nt, Artificial Sequence
  Synthetic
uggcgccgccaaagcugcgc

SEQ ID NO: 4198 - RNA, 20 nt, Artificial Sequence
  Synthetic
ggcgccgccaaagcugcgcu

SEQ ID NO: 4199 - RNA, 20 nt, Artificial Sequence
  Synthetic
gcgccgccaaagcugcgcug

SEQ ID NO: 4200 - RNA, 20 nt, Artificial Sequence
  Synthetic
cgccgccaaagcugcgcugc

SEQ ID NO: 4201 - RNA, 20 nt, Artificial Sequence
  Synthetic
gccgccaaagcugcgcugcg

SEQ ID NO: 4202 - RNA, 20 nt, Artificial Sequence
  Synthetic
ccgccaaagcugcgcugcgg

SEQ ID NO: 4203 - RNA, 20 nt, Artificial Sequence
  Synthetic
cgccaaagcugcgcugcggg

SEQ ID NO: 4204 - RNA, 20 nt, Artificial Sequence
  Synthetic
gccaaagcugcgcugcgggg

SEQ ID NO: 4205 - RNA, 20 nt, Artificial Sequence
  Synthetic
ccaaagcugcgcugcggggc

SEQ ID NO: 4206 - RNA, 20 nt, Artificial Sequence
  Synthetic
caaagcugcgcugcggggcu

SEQ ID NO: 4207 - RNA, 20 nt, Artificial Sequence
  Synthetic
aaagcugcgcugcggggcug

SEQ ID NO: 4208 - RNA, 20 nt, Artificial Sequence
  Synthetic
aagcugcgcugcggggcugc

SEQ ID NO: 4209 - RNA, 20 nt, Artificial Sequence
  Synthetic
agcugcgcugcggggcugcg

SEQ ID NO: 4210 - RNA, 20 nt, Artificial Sequence
  Synthetic
gcugcgcugcggggcugcgc

SEQ ID NO: 4211 - RNA, 20 nt, Artificial Sequence
  Synthetic
cugcgcugcggggcugcgcg

SEQ ID NO: 4212 - RNA, 20 nt, Artificial Sequence
  Synthetic
ugcgcugcggggcugcgcgc

SEQ ID NO: 4213 - RNA, 20 nt, Artificial Sequence
  Synthetic
gcgcugcggggcugcgcgcg

SEQ ID NO: 4214 - RNA, 20 nt, Artificial Sequence
  Synthetic
cgcugcggggcugcgcgcgc

SEQ ID NO: 4215 - RNA, 20 nt, Artificial Sequence
  Synthetic
gcugcggggcugcgcgcgcg

SEQ ID NO: 4216 - RNA, 20 nt, Artificial Sequence
  Synthetic
cugcggggcugcgcgcgcgc

SEQ ID NO: 4217 - RNA, 20 nt, Artificial Sequence
  Synthetic
ugcggggcugcgcgcgcgcg

SEQ ID NO: 4218 - RNA, 20 nt, Artificial Sequence
  Synthetic
gcggggcugcgcgcgcgcga

SEQ ID NO: 4219 - RNA, 20 nt, Artificial Sequence
  Synthetic
cggggcugcgcgcgcgcgaa

SEQ ID NO: 4220 - RNA, 20 nt, Artificial Sequence
  Synthetic
ggggcugcgcgcgcgcgaag

SEQ ID NO: 4221 - RNA, 20 nt, Artificial Sequence
  Synthetic
gggcugcgcgcgcgcgaagc

SEQ ID NO: 4222 - RNA, 20 nt, Artificial Sequence
  Synthetic
ggcugcgcgcgcgcgaagca

SEQ ID NO: 4223 - RNA, 20 nt, Artificial Sequence
  Synthetic
gcugcgcgcgcgcgaagcaa

SEQ ID NO: 4224 - RNA, 20 nt, Artificial Sequence
  Synthetic
cugcgcgcgcgcgaagcaag

SEQ ID NO: 4225 - RNA, 20 nt, Artificial Sequence
  Synthetic
ugcgcgcgcgcgaagcaagg

SEQ ID NO: 4226 - RNA, 20 nt, Artificial Sequence
  Synthetic
gcgcgcgcgcgaagcaaggg

SEQ ID NO: 4227 - RNA, 20 nt, Artificial Sequence
  Synthetic
cgcgcgcgcgaagcaagggg

SEQ ID NO: 4228 - RNA, 20 nt, Artificial Sequence
  Synthetic
gcgcgcgcgaagcaaggggg

SEQ ID NO: 4229 - RNA, 20 nt, Artificial Sequence
  Synthetic
cgcgcgcgaagcaagggggc

SEQ ID NO: 4230 - RNA, 20 nt, Artificial Sequence
  Synthetic
gcgcgcgaagcaagggggca

SEQ ID NO: 4231 - RNA, 20 nt, Artificial Sequence
  Synthetic
cgcgcgaagcaagggggcag

SEQ ID NO: 4232 - RNA, 20 nt, Artificial Sequence
  Synthetic
gcgcgaagcaagggggcagu

SEQ ID NO: 4233 - RNA, 20 nt, Artificial Sequence
  Synthetic
cgcgaagcaagggggcagug

SEQ ID NO: 4234 - RNA, 20 nt, Artificial Sequence
  Synthetic
gcgaagcaagggggcagugg

SEQ ID NO: 4235 - RNA, 20 nt, Artificial Sequence
  Synthetic
cgaagcaagggggcaguggg

SEQ ID NO: 4236 - RNA, 20 nt, Artificial Sequence
  Synthetic
gaagcaagggggcaguggga

SEQ ID NO: 4237 - RNA, 20 nt, Artificial Sequence
  Synthetic
aagcaagggggcagugggag

SEQ ID NO: 4238 - RNA, 20 nt, Artificial Sequence
  Synthetic
agcaagggggcagugggagg

SEQ ID NO: 4239 - RNA, 20 nt, Artificial Sequence
  Synthetic
gcaagggggcagugggaggc

SEQ ID NO: 4240 - RNA, 20 nt, Artificial Sequence
  Synthetic
caagggggcagugggaggcu

SEQ ID NO: 4241 - RNA, 20 nt, Artificial Sequence
  Synthetic
aagggggcagugggaggcuc

SEQ ID NO: 4242 - RNA, 20 nt, Artificial Sequence
  Synthetic
agggggcagugggaggcucc

SEQ ID NO: 4243 - RNA, 20 nt, Artificial Sequence
  Synthetic
gggggcagugggaggcuccu

SEQ ID NO: 4244 - RNA, 20 nt, Artificial Sequence
  Synthetic
ggggcagugggaggcuccug

SEQ ID NO: 4245 - RNA, 20 nt, Artificial Sequence
  Synthetic
gggcagugggaggcuccugg

SEQ ID NO: 4246 - RNA, 20 nt, Artificial Sequence
  Synthetic
ggcagugggaggcuccuggc

SEQ ID NO: 4247 - RNA, 20 nt, Artificial Sequence
  Synthetic
gcagugggaggcuccuggcg

SEQ ID NO: 4248 - RNA, 20 nt, Artificial Sequence
  Synthetic
cagugggaggcuccuggcgu

SEQ ID NO: 4249 - RNA, 20 nt, Artificial Sequence
  Synthetic
agugggaggcuccuggcguu

SEQ ID NO: 4250 - RNA, 20 nt, Artificial Sequence
  Synthetic
gugggaggcuccuggcguuc

SEQ ID NO: 4251 - RNA, 20 nt, Artificial Sequence
  Synthetic
ugggaggcuccuggcguucc

SEQ ID NO: 4252 - RNA, 20 nt, Artificial Sequence
  Synthetic
gggaggcuccuggcguuccc

SEQ ID NO: 4253 - RNA, 20 nt, Artificial Sequence
  Synthetic
ggaggcuccuggcguucccc

SEQ ID NO: 4254 - RNA, 20 nt, Artificial Sequence
  Synthetic
gaggcuccuggcguuccccu

SEQ ID NO: 4255 - RNA, 20 nt, Artificial Sequence
  Synthetic
aggcuccuggcguuccccuu

SEQ ID NO: 4256 - RNA, 20 nt, Artificial Sequence
  Synthetic
ggcuccuggcguuccccuuu

SEQ ID NO: 4257 - RNA, 20 nt, Artificial Sequence
  Synthetic
gcuccuggcguuccccuuua

SEQ ID NO: 4258 - RNA, 20 nt, Artificial Sequence
  Synthetic
cuccuggcguuccccuuuaa

SEQ ID NO: 4259 - RNA, 20 nt, Artificial Sequence
  Synthetic
uccuggcguuccccuuuaac

SEQ ID NO: 4260 - RNA, 20 nt, Artificial Sequence
  Synthetic
ccuggcguuccccuuuaacg

SEQ ID NO: 4261 - RNA, 20 nt, Artificial Sequence
  Synthetic
cuggcguuccccuuuaacgg

SEQ ID NO: 4262 - RNA, 20 nt, Artificial Sequence
  Synthetic
uggcguuccccuuuaacggg

SEQ ID NO: 4263 - RNA, 20 nt, Artificial Sequence
  Synthetic
ggcguuccccuuuaacggga

SEQ ID NO: 4264 - RNA, 20 nt, Artificial Sequence
  Synthetic
gcguuccccuuuaacgggaa

SEQ ID NO: 4265 - RNA, 20 nt, Artificial Sequence
  Synthetic
cguuccccuuuaacgggaac

SEQ ID NO: 4266 - RNA, 20 nt, Artificial Sequence
  Synthetic
guuccccuuuaacgggaaca

SEQ ID NO: 4267 - RNA, 20 nt, Artificial Sequence
  Synthetic
uuccccuuuaacgggaacaa

SEQ ID NO: 4268 - RNA, 20 nt, Artificial Sequence
  Synthetic
uccccuuuaacgggaacaac

SEQ ID NO: 4269 - RNA, 20 nt, Artificial Sequence
  Synthetic
ccccuuuaacgggaacaacg

SEQ ID NO: 4270 - RNA, 20 nt, Artificial Sequence
  Synthetic
cccuuuaacgggaacaacgc

SEQ ID NO: 4271 - RNA, 20 nt, Artificial Sequence
  Synthetic
ccuuuaacgggaacaacgcc

SEQ ID NO: 4272 - RNA, 20 nt, Artificial Sequence
  Synthetic
cuuuaacgggaacaacgccc

SEQ ID NO: 4273 - RNA, 20 nt, Artificial Sequence
  Synthetic
uuuaacgggaacaacgcccu

SEQ ID NO: 4274 - RNA, 20 nt, Artificial Sequence
  Synthetic
uuaacgggaacaacgcccug

SEQ ID NO: 4275 - RNA, 20 nt, Artificial Sequence
  Synthetic
uaacgggaacaacgcccugu

SEQ ID NO: 4276 - RNA, 20 nt, Artificial Sequence
  Synthetic
aacgggaacaacgcccuguu

SEQ ID NO: 4277 - RNA, 20 nt, Artificial Sequence
  Synthetic
acgggaacaacgcccuguuu

SEQ ID NO: 4278 - RNA, 20 nt, Artificial Sequence
  Synthetic
cgggaacaacgcccuguuug

SEQ ID NO: 4279 - RNA, 20 nt, Artificial Sequence
  Synthetic
gggaacaacgcccuguuugc

SEQ ID NO: 4280 - RNA, 20 nt, Artificial Sequence
  Synthetic
ggaacaacgcccuguuugcg

SEQ ID NO: 4281 - RNA, 20 nt, Artificial Sequence
  Synthetic
gaacaacgcccuguuugcgu

SEQ ID NO: 4282 - RNA, 20 nt, Artificial Sequence
  Synthetic
aacaacgcccuguuugcguc

SEQ ID NO: 4283 - RNA, 20 nt, Artificial Sequence
  Synthetic
acaacgcccuguuugcgucg

SEQ ID NO: 4284 - RNA, 20 nt, Artificial Sequence
  Synthetic
caacgcccuguuugcgucgc

SEQ ID NO: 4285 - RNA, 20 nt, Artificial Sequence
  Synthetic
aacgcccuguuugcgucgcu

SEQ ID NO: 4286 - RNA, 20 nt, Artificial Sequence
  Synthetic
acgcccuguuugcgucgcug

SEQ ID NO: 4287 - RNA, 20 nt, Artificial Sequence
  Synthetic
cgcccuguuugcgucgcugc

SEQ ID NO: 4288 - RNA, 20 nt, Artificial Sequence
  Synthetic
gcccuguuugcgucgcugca

SEQ ID NO: 4289 - RNA, 20 nt, Artificial Sequence
  Synthetic
cccuguuugcgucgcugcag

SEQ ID NO: 4290 - RNA, 20 nt, Artificial Sequence
  Synthetic
ccuguuugcgucgcugcagu

SEQ ID NO: 4291 - RNA, 20 nt, Artificial Sequence
  Synthetic
cuguuugcgucgcugcagua

SEQ ID NO: 4292 - RNA, 20 nt, Artificial Sequence
  Synthetic
uguuugcgucgcugcaguag

SEQ ID NO: 4293 - RNA, 20 nt, Artificial Sequence
  Synthetic
guuugcgucgcugcaguagg

SEQ ID NO: 4294 - RNA, 20 nt, Artificial Sequence
  Synthetic
uuugcgucgcugcaguaggg

SEQ ID NO: 4295 - RNA, 20 nt, Artificial Sequence
  Synthetic
uugcgucgcugcaguagggu

SEQ ID NO: 4296 - RNA, 20 nt, Artificial Sequence
  Synthetic
ugcgucgcugcaguagggug

SEQ ID NO: 4297 - RNA, 20 nt, Artificial Sequence
  Synthetic
gcgucgcugcaguagggugu

SEQ ID NO: 4298 - RNA, 20 nt, Artificial Sequence
  Synthetic
cgucgcugcaguagggugug

SEQ ID NO: 4299 - RNA, 20 nt, Artificial Sequence
  Synthetic
gucgcugcaguagggugugu

SEQ ID NO: 4300 - RNA, 20 nt, Artificial Sequence
  Synthetic
ucgcugcaguaggguguguc

SEQ ID NO: 4301 - RNA, 20 nt, Artificial Sequence
  Synthetic
cgcugcaguagggugugucc

SEQ ID NO: 4302 - RNA, 20 nt, Artificial Sequence
  Synthetic
gcugcaguaggguguguccc

SEQ ID NO: 4303 - RNA, 20 nt, Artificial Sequence
  Synthetic
cugcaguagggugugucccu

SEQ ID NO: 4304 - RNA, 20 nt, Artificial Sequence
  Synthetic
ugcaguagggugugucccug

SEQ ID NO: 4305 - RNA, 20 nt, Artificial Sequence
  Synthetic
gcaguagggugugucccugg

SEQ ID NO: 4306 - RNA, 20 nt, Artificial Sequence
  Synthetic
caguagggugugucccuggg

SEQ ID NO: 4307 - RNA, 20 nt, Artificial Sequence
  Synthetic
aguagggugugucccugggu

SEQ ID NO: 4308 - RNA, 20 nt, Artificial Sequence
  Synthetic
guagggugugucccuggguc

SEQ ID NO: 4309 - RNA, 20 nt, Artificial Sequence
  Synthetic
uagggugugucccuggguca

SEQ ID NO: 4310 - RNA, 20 nt, Artificial Sequence
  Synthetic
agggugugucccugggucag

SEQ ID NO: 4311 - RNA, 20 nt, Artificial Sequence
  Synthetic
gggugugucccugggucagc

SEQ ID NO: 4312 - RNA, 20 nt, Artificial Sequence
  Synthetic
ggugugucccugggucagcg

SEQ ID NO: 4313 - RNA, 20 nt, Artificial Sequence
  Synthetic
gugugucccugggucagcgu

SEQ ID NO: 4314 - RNA, 20 nt, Artificial Sequence
  Synthetic
ugugucccugggucagcgug

SEQ ID NO: 4315 - RNA, 20 nt, Artificial Sequence
  Synthetic
gugucccugggucagcgugu

SEQ ID NO: 4316 - RNA, 20 nt, Artificial Sequence
  Synthetic
ugucccugggucagcgugug

SEQ ID NO: 4317 - RNA, 20 nt, Artificial Sequence
  Synthetic
gucccugggucagcgugugc

SEQ ID NO: 4318 - RNA, 20 nt, Artificial Sequence
  Synthetic
ucccugggucagcgugugcg

SEQ ID NO: 4319 - RNA, 20 nt, Artificial Sequence
  Synthetic
cccugggucagcgugugcgg

SEQ ID NO: 4320 - RNA, 20 nt, Artificial Sequence
  Synthetic
ccugggucagcgugugcggg

SEQ ID NO: 4321 - RNA, 20 nt, Artificial Sequence
  Synthetic
cugggucagcgugugcggga

SEQ ID NO: 4322 - RNA, 20 nt, Artificial Sequence
  Synthetic
ugggucagcgugugcgggag

SEQ ID NO: 4323 - RNA, 20 nt, Artificial Sequence
  Synthetic
gggucagcgugugcgggagg

SEQ ID NO: 4324 - RNA, 20 nt, Artificial Sequence
  Synthetic
ggucagcgugugcgggaggg

SEQ ID NO: 4325 - RNA, 20 nt, Artificial Sequence
  Synthetic
gucagcgugugcgggagggc

SEQ ID NO: 4326 - RNA, 20 nt, Artificial Sequence
  Synthetic
ucagcgugugcgggagggcg

SEQ ID NO: 4327 - RNA, 20 nt, Artificial Sequence
  Synthetic
cagcgugugcgggagggcgg

SEQ ID NO: 4328 - RNA, 20 nt, Artificial Sequence
  Synthetic
agcgugugcgggagggcggg

SEQ ID NO: 4329 - RNA, 20 nt, Artificial Sequence
  Synthetic
gcgugugcgggagggcggga

SEQ ID NO: 4330 - RNA, 20 nt, Artificial Sequence
  Synthetic
cgugugcgggagggcgggac

SEQ ID NO: 4331 - RNA, 20 nt, Artificial Sequence
  Synthetic
gugugcgggagggcgggacu

SEQ ID NO: 4332 - RNA, 20 nt, Artificial Sequence
  Synthetic
ugugcgggagggcgggacuc

SEQ ID NO: 4333 - RNA, 20 nt, Artificial Sequence
  Synthetic
gugcgggagggcgggacuca

SEQ ID NO: 4334 - RNA, 20 nt, Artificial Sequence
  Synthetic
ugcgggagggcgggacucag

SEQ ID NO: 4335 - RNA, 20 nt, Artificial Sequence
  Synthetic
gcgggagggcgggacucagg

SEQ ID NO: 4336 - RNA, 20 nt, Artificial Sequence
  Synthetic
cgggagggcgggacucaggg

SEQ ID NO: 4337 - RNA, 20 nt, Artificial Sequence
  Synthetic
gggagggcgggacucaggga

SEQ ID NO: 4338 - RNA, 20 nt, Artificial Sequence
  Synthetic
ggagggcgggacucagggag

SEQ ID NO: 4339 - RNA, 20 nt, Artificial Sequence
  Synthetic
gagggcgggacucagggagg

SEQ ID NO: 4340 - RNA, 20 nt, Artificial Sequence
  Synthetic
agggcgggacucagggagga

SEQ ID NO: 4341 - RNA, 20 nt, Artificial Sequence
  Synthetic
gggcgggacucagggaggag

SEQ ID NO: 4342 - RNA, 20 nt, Artificial Sequence
  Synthetic
ggcgggacucagggaggaga

SEQ ID NO: 4343 - RNA, 20 nt, Artificial Sequence
  Synthetic
gcgggacucagggaggagag

SEQ ID NO: 4344 - RNA, 20 nt, Artificial Sequence
  Synthetic
cgggacucagggaggagagg

SEQ ID NO: 4345 - RNA, 20 nt, Artificial Sequence
  Synthetic
gggacucagggaggagaggg

SEQ ID NO: 4346 - RNA, 20 nt, Artificial Sequence
  Synthetic
ggacucagggaggagagggg

SEQ ID NO: 4347 - RNA, 20 nt, Artificial Sequence
  Synthetic
gacucagggaggagaggggg

SEQ ID NO: 4348 - RNA, 20 nt, Artificial Sequence
  Synthetic
acucagggaggagagggggc

SEQ ID NO: 4349 - RNA, 20 nt, Artificial Sequence
  Synthetic
cucagggaggagagggggca

SEQ ID NO: 4350 - RNA, 20 nt, Artificial Sequence
  Synthetic
ucagggaggagagggggcag

SEQ ID NO: 4351 - RNA, 20 nt, Artificial Sequence
  Synthetic
cagggaggagagggggcagg

SEQ ID NO: 4352 - RNA, 20 nt, Artificial Sequence
  Synthetic
agggaggagagggggcagga

SEQ ID NO: 4353 - RNA, 20 nt, Artificial Sequence
  Synthetic
gggaggagagggggcaggag

SEQ ID NO: 4354 - RNA, 20 nt, Artificial Sequence
  Synthetic
ggaggagagggggcaggaga

SEQ ID NO: 4355 - RNA, 20 nt, Artificial Sequence
  Synthetic
gaggagagggggcaggagag

SEQ ID NO: 4356 - RNA, 20 nt, Artificial Sequence
  Synthetic
aggagagggggcaggagaga

SEQ ID NO: 4357 - RNA, 20 nt, Artificial Sequence
  Synthetic
ggagagggggcaggagagag

SEQ ID NO: 4358 - RNA, 20 nt, Artificial Sequence
  Synthetic
gagagggggcaggagagagg

SEQ ID NO: 4359 - RNA, 20 nt, Artificial Sequence
  Synthetic
agagggggcaggagagaggg

SEQ ID NO: 4360 - RNA, 20 nt, Artificial Sequence
  Synthetic
gagggggcaggagagaggga

SEQ ID NO: 4361 - RNA, 20 nt, Artificial Sequence
  Synthetic
agggggcaggagagagggag

SEQ ID NO: 4362 - RNA, 20 nt, Artificial Sequence
  Synthetic
gggggcaggagagagggagg

SEQ ID NO: 4363 - RNA, 20 nt, Artificial Sequence
  Synthetic
ggggcaggagagagggaggg

SEQ ID NO: 4364 - RNA, 20 nt, Artificial Sequence
  Synthetic
gggcaggagagagggagggc

SEQ ID NO: 4365 - RNA, 20 nt, Artificial Sequence
  Synthetic
ggcaggagagagggagggca

SEQ ID NO: 4366 - RNA, 20 nt, Artificial Sequence
  Synthetic
gcaggagagagggagggcag

SEQ ID NO: 4367 - RNA, 20 nt, Artificial Sequence
  Synthetic
caggagagagggagggcagg

SEQ ID NO: 4368 - RNA, 20 nt, Artificial Sequence
  Synthetic
aggagagagggagggcagga

SEQ ID NO: 4369 - RNA, 20 nt, Artificial Sequence
  Synthetic
ggagagagggagggcaggag

SEQ ID NO: 4370 - RNA, 20 nt, Artificial Sequence
  Synthetic
gagagagggagggcaggaga

SEQ ID NO: 4371 - RNA, 20 nt, Artificial Sequence
  Synthetic
agagagggagggcaggagac

SEQ ID NO: 4372 - RNA, 20 nt, Artificial Sequence
  Synthetic
gagagggagggcaggagaca

SEQ ID NO: 4373 - RNA, 20 nt, Artificial Sequence
  Synthetic
agagggagggcaggagacag

SEQ ID NO: 4374 - RNA, 20 nt, Artificial Sequence
  Synthetic
gagggagggcaggagacagu

SEQ ID NO: 4375 - RNA, 20 nt, Artificial Sequence
  Synthetic
agggagggcaggagacaguc

SEQ ID NO: 4376 - RNA, 20 nt, Artificial Sequence
  Synthetic
gggagggcaggagacaguca

SEQ ID NO: 4377 - RNA, 20 nt, Artificial Sequence
  Synthetic
ggagggcaggagacagucac

SEQ ID NO: 4378 - RNA, 20 nt, Artificial Sequence
  Synthetic
gagggcaggagacagucacu

SEQ ID NO: 4379 - RNA, 20 nt, Artificial Sequence
  Synthetic
agggcaggagacagucacuu

SEQ ID NO: 4380 - RNA, 20 nt, Artificial Sequence
  Synthetic
gggcaggagacagucacuug

SEQ ID NO: 4381 - RNA, 20 nt, Artificial Sequence
  Synthetic
ggcaggagacagucacuugg

SEQ ID NO: 4382 - RNA, 20 nt, Artificial Sequence
  Synthetic
gcaggagacagucacuuggc

SEQ ID NO: 4383 - RNA, 20 nt, Artificial Sequence
  Synthetic
caggagacagucacuuggcc

SEQ ID NO: 4384 - RNA, 20 nt, Artificial Sequence
  Synthetic
aggagacagucacuuggccu

SEQ ID NO: 4385 - RNA, 20 nt, Artificial Sequence
  Synthetic
ggagacagucacuuggccuu

SEQ ID NO: 4386 - RNA, 20 nt, Artificial Sequence
  Synthetic
gagacagucacuuggccuua

SEQ ID NO: 4387 - RNA, 20 nt, Artificial Sequence
  Synthetic
agacagucacuuggccuuaa

SEQ ID NO: 4388 - RNA, 20 nt, Artificial Sequence
  Synthetic
gacagucacuuggccuuaaa

SEQ ID NO: 4389 - RNA, 20 nt, Artificial Sequence
  Synthetic
acagucacuuggccuuaaau

SEQ ID NO: 4390 - RNA, 20 nt, Artificial Sequence
  Synthetic
cagucacuuggccuuaaaug

SEQ ID NO: 4391 - RNA, 20 nt, Artificial Sequence
  Synthetic
agucacuuggccuuaaaugc

SEQ ID NO: 4392 - RNA, 20 nt, Artificial Sequence
  Synthetic
gucacuuggccuuaaaugcg

SEQ ID NO: 4393 - RNA, 20 nt, Artificial Sequence
  Synthetic
ucacuuggccuuaaaugcgc

SEQ ID NO: 4394 - RNA, 20 nt, Artificial Sequence
  Synthetic
cacuuggccuuaaaugcgcc

SEQ ID NO: 4395 - RNA, 20 nt, Artificial Sequence
  Synthetic
acuuggccuuaaaugcgccu

SEQ ID NO: 4396 - RNA, 20 nt, Artificial Sequence
  Synthetic
cuuggccuuaaaugcgccuc

SEQ ID NO: 4397 - RNA, 20 nt, Artificial Sequence
  Synthetic
uuggccuuaaaugcgccuca

SEQ ID NO: 4398 - RNA, 20 nt, Artificial Sequence
  Synthetic
uggccuuaaaugcgccucaa

SEQ ID NO: 4399 - RNA, 20 nt, Artificial Sequence
  Synthetic
ggccuuaaaugcgccucaag

SEQ ID NO: 4400 - RNA, 20 nt, Artificial Sequence
  Synthetic
gccuuaaaugcgccucaaga

SEQ ID NO: 4401 - RNA, 20 nt, Artificial Sequence
  Synthetic
ccuuaaaugcgccucaagaa

SEQ ID NO: 4402 - RNA, 20 nt, Artificial Sequence
  Synthetic
cuuaaaugcgccucaagaaa

SEQ ID NO: 4403 - RNA, 20 nt, Artificial Sequence
  Synthetic
uuaaaugcgccucaagaaaa

SEQ ID NO: 4404 - RNA, 20 nt, Artificial Sequence
  Synthetic
uaaaugcgccucaagaaaaa

SEQ ID NO: 4405 - RNA, 20 nt, Artificial Sequence
  Synthetic
aaaugcgccucaagaaaaag

SEQ ID NO: 4406 - RNA, 20 nt, Artificial Sequence
  Synthetic
aaugcgccucaagaaaaagu

SEQ ID NO: 4407 - RNA, 20 nt, Artificial Sequence
  Synthetic
augcgccucaagaaaaaguc

SEQ ID NO: 4408 - RNA, 20 nt, Artificial Sequence
  Synthetic
ugcgccucaagaaaaagucg

SEQ ID NO: 4409 - RNA, 20 nt, Artificial Sequence
  Synthetic
gcgccucaagaaaaagucgg

SEQ ID NO: 4410 - RNA, 20 nt, Artificial Sequence
  Synthetic
cgccucaagaaaaagucggu

SEQ ID NO: 4411 - RNA, 20 nt, Artificial Sequence
  Synthetic
gccucaagaaaaagucgguc

SEQ ID NO: 4412 - RNA, 20 nt, Artificial Sequence
  Synthetic
ccucaagaaaaagucggucc

SEQ ID NO: 4413 - RNA, 20 nt, Artificial Sequence
  Synthetic
cucaagaaaaagucgguccc

SEQ ID NO: 4414 - RNA, 20 nt, Artificial Sequence
  Synthetic
ucaagaaaaagucggucccu

SEQ ID NO: 4415 - RNA, 20 nt, Artificial Sequence
  Synthetic
caagaaaaagucggucccug

SEQ ID NO: 4416 - RNA, 20 nt, Artificial Sequence
  Synthetic
aagaaaaagucggucccugc

SEQ ID NO: 4417 - RNA, 20 nt, Artificial Sequence
  Synthetic
agaaaaagucggucccugca

SEQ ID NO: 4418 - RNA, 20 nt, Artificial Sequence
  Synthetic
gaaaaagucggucccugcaa

SEQ ID NO: 4419 - RNA, 20 nt, Artificial Sequence
  Synthetic
aaaaagucggucccugcaaa

SEQ ID NO: 4420 - RNA, 20 nt, Artificial Sequence
  Synthetic
aaaagucggucccugcaaaa

SEQ ID NO: 4421 - RNA, 20 nt, Artificial Sequence
  Synthetic
aaagucggucccugcaaaac

SEQ ID NO: 4422 - RNA, 20 nt, Artificial Sequence
  Synthetic
aagucggucccugcaaaacc

SEQ ID NO: 4423 - RNA, 20 nt, Artificial Sequence
  Synthetic
agucggucccugcaaaaccg

SEQ ID NO: 4424 - RNA, 20 nt, Artificial Sequence
  Synthetic
gucggucccugcaaaaccgc

SEQ ID NO: 4425 - RNA, 20 nt, Artificial Sequence
  Synthetic
ucggucccugcaaaaccgcg

SEQ ID NO: 4426 - RNA, 20 nt, Artificial Sequence
  Synthetic
cggucccugcaaaaccgcgg

SEQ ID NO: 4427 - RNA, 20 nt, Artificial Sequence
  Synthetic
ggucccugcaaaaccgcggc

SEQ ID NO: 4428 - RNA, 20 nt, Artificial Sequence
  Synthetic
gucccugcaaaaccgcggcg

SEQ ID NO: 4429 - RNA, 20 nt, Artificial Sequence
  Synthetic
ucccugcaaaaccgcggcga

SEQ ID NO: 4430 - RNA, 20 nt, Artificial Sequence
  Synthetic
cccugcaaaaccgcggcgac

SEQ ID NO: 4431 - RNA, 20 nt, Artificial Sequence
  Synthetic
ccugcaaaaccgcggcgacu

SEQ ID NO: 4432 - RNA, 20 nt, Artificial Sequence
  Synthetic
cugcaaaaccgcggcgacuu

SEQ ID NO: 4433 - RNA, 20 nt, Artificial Sequence
  Synthetic
ugcaaaaccgcggcgacuuu

SEQ ID NO: 4434 - RNA, 20 nt, Artificial Sequence
  Synthetic
gcaaaaccgcggcgacuuuu

SEQ ID NO: 4435 - RNA, 20 nt, Artificial Sequence
  Synthetic
caaaaccgcggcgacuuuua

SEQ ID NO: 4436 - RNA, 20 nt, Artificial Sequence
  Synthetic
aaaaccgcggcgacuuuuac

SEQ ID NO: 4437 - RNA, 20 nt, Artificial Sequence
  Synthetic
aaaccgcggcgacuuuuacu

SEQ ID NO: 4438 - RNA, 20 nt, Artificial Sequence
  Synthetic
aaccgcggcgacuuuuacuc

SEQ ID NO: 4439 - RNA, 20 nt, Artificial Sequence
  Synthetic
accgcggcgacuuuuacucg

SEQ ID NO: 4440 - RNA, 20 nt, Artificial Sequence
  Synthetic
ccgcggcgacuuuuacucga

SEQ ID NO: 4441 - RNA, 20 nt, Artificial Sequence
  Synthetic
cgcggcgacuuuuacucgaa

SEQ ID NO: 4442 - RNA, 20 nt, Artificial Sequence
  Synthetic
gcggcgacuuuuacucgaaa

SEQ ID NO: 4443 - RNA, 20 nt, Artificial Sequence
  Synthetic
cggcgacuuuuacucgaaac

SEQ ID NO: 4444 - RNA, 20 nt, Artificial Sequence
  Synthetic
ggcgacuuuuacucgaaacc

SEQ ID NO: 4445 - RNA, 20 nt, Artificial Sequence
  Synthetic
gcgacuuuuacucgaaacca

SEQ ID NO: 4446 - RNA, 20 nt, Artificial Sequence
  Synthetic
cgacuuuuacucgaaaccag

SEQ ID NO: 4447 - RNA, 20 nt, Artificial Sequence
  Synthetic
gacuuuuacucgaaaccaga

SEQ ID NO: 4448 - RNA, 20 nt, Artificial Sequence
  Synthetic
acuuuuacucgaaaccagag

SEQ ID NO: 4449 - RNA, 20 nt, Artificial Sequence
  Synthetic
cuuuuacucgaaaccagagg

SEQ ID NO: 4450 - RNA, 20 nt, Artificial Sequence
  Synthetic
uuuuacucgaaaccagaggc

SEQ ID NO: 4451 - RNA, 20 nt, Artificial Sequence
  Synthetic
uuuacucgaaaccagaggcg

SEQ ID NO: 4452 - RNA, 20 nt, Artificial Sequence
  Synthetic
uuacucgaaaccagaggcgg

SEQ ID NO: 4453 - RNA, 20 nt, Artificial Sequence
  Synthetic
uacucgaaaccagaggcggc

SEQ ID NO: 4454 - RNA, 20 nt, Artificial Sequence
  Synthetic
acucgaaaccagaggcggcu

SEQ ID NO: 4455 - RNA, 20 nt, Artificial Sequence
  Synthetic
cucgaaaccagaggcggcug

SEQ ID NO: 4456 - RNA, 20 nt, Artificial Sequence
  Synthetic
ucgaaaccagaggcggcuga

SEQ ID NO: 4457 - RNA, 20 nt, Artificial Sequence
  Synthetic
cgaaaccagaggcggcugag

SEQ ID NO: 4458 - RNA, 20 nt, Artificial Sequence
  Synthetic
gaaaccagaggcggcugagc

SEQ ID NO: 4459 - RNA, 20 nt, Artificial Sequence
  Synthetic
aaaccagaggcggcugagcu

SEQ ID NO: 4460 - RNA, 20 nt, Artificial Sequence
  Synthetic
aaccagaggcggcugagcuu

SEQ ID NO: 4461 - RNA, 20 nt, Artificial Sequence
  Synthetic
accagaggcggcugagcuuu

SEQ ID NO: 4462 - RNA, 20 nt, Artificial Sequence
  Synthetic
ccagaggcggcugagcuuuc

SEQ ID NO: 4463 - RNA, 20 nt, Artificial Sequence
  Synthetic
cagaggcggcugagcuuucu

SEQ ID NO: 4464 - RNA, 20 nt, Artificial Sequence
  Synthetic
agaggcggcugagcuuucuc

SEQ ID NO: 4465 - RNA, 20 nt, Artificial Sequence
  Synthetic
gaggcggcugagcuuucuca

SEQ ID NO: 4466 - RNA, 20 nt, Artificial Sequence
  Synthetic
aggcggcugagcuuucucac

SEQ ID NO: 4467 - RNA, 20 nt, Artificial Sequence
  Synthetic
ggcggcugagcuuucucacc

SEQ ID NO: 4468 - RNA, 20 nt, Artificial Sequence
  Synthetic
gcggcugagcuuucucaccu

SEQ ID NO: 4469 - RNA, 20 nt, Artificial Sequence
  Synthetic
cggcugagcuuucucaccuc

SEQ ID NO: 4470 - RNA, 20 nt, Artificial Sequence
  Synthetic
ggcugagcuuucucaccucc

SEQ ID NO: 4471 - RNA, 20 nt, Artificial Sequence
  Synthetic
gcugagcuuucucaccuccc

SEQ ID NO: 4472 - RNA, 20 nt, Artificial Sequence
  Synthetic
cugagcuuucucaccuccca

SEQ ID NO: 4473 - RNA, 20 nt, Artificial Sequence
  Synthetic
ugagcuuucucaccucccac

SEQ ID NO: 4474 - RNA, 20 nt, Artificial Sequence
  Synthetic
gagcuuucucaccucccacc

SEQ ID NO: 4475 - RNA, 20 nt, Artificial Sequence
  Synthetic
agcuuucucaccucccaccu

SEQ ID NO: 4476 - RNA, 20 nt, Artificial Sequence
  Synthetic
gcuuucucaccucccaccuc

SEQ ID NO: 4477 - RNA, 20 nt, Artificial Sequence
  Synthetic
cuuucucaccucccaccucc

SEQ ID NO: 4478 - RNA, 20 nt, Artificial Sequence
  Synthetic
uuucucaccucccaccuccc

SEQ ID NO: 4479 - RNA, 20 nt, Artificial Sequence
  Synthetic
uucucaccucccaccucccu

SEQ ID NO: 4480 - RNA, 20 nt, Artificial Sequence
  Synthetic
ucucaccucccaccucccuu

SEQ ID NO: 4481 - RNA, 20 nt, Artificial Sequence
  Synthetic
cucaccucccaccucccuuc

SEQ ID NO: 4482 - RNA, 20 nt, Artificial Sequence
  Synthetic
ucaccucccaccucccuucu

SEQ ID NO: 4483 - RNA, 20 nt, Artificial Sequence
  Synthetic
caccucccaccucccuucuc

SEQ ID NO: 4484 - RNA, 20 nt, Artificial Sequence
  Synthetic
accucccaccucccuucucc

SEQ ID NO: 4485 - RNA, 20 nt, Artificial Sequence
  Synthetic
ccucccaccucccuucuccc

SEQ ID NO: 4486 - RNA, 20 nt, Artificial Sequence
  Synthetic
cucccaccucccuucucccc

SEQ ID NO: 4487 - RNA, 20 nt, Artificial Sequence
  Synthetic
ucccaccucccuucuccccu

SEQ ID NO: 4488 - RNA, 20 nt, Artificial Sequence
  Synthetic
cccaccucccuucuccccug

SEQ ID NO: 4489 - RNA, 20 nt, Artificial Sequence
  Synthetic
ccaccucccuucuccccugg

SEQ ID NO: 4490 - RNA, 20 nt, Artificial Sequence
  Synthetic
caccucccuucuccccuggc

SEQ ID NO: 4491 - RNA, 20 nt, Artificial Sequence
  Synthetic
accucccuucuccccuggcc

SEQ ID NO: 4492 - RNA, 20 nt, Artificial Sequence
  Synthetic
ccucccuucuccccuggccc

SEQ ID NO: 4493 - RNA, 20 nt, Artificial Sequence
  Synthetic
cucccuucuccccuggcccc

SEQ ID NO: 4494 - RNA, 20 nt, Artificial Sequence
  Synthetic
ucccuucuccccuggccccg

SEQ ID NO: 4495 - RNA, 20 nt, Artificial Sequence
  Synthetic
cccuucuccccuggccccgu

SEQ ID NO: 4496 - RNA, 20 nt, Artificial Sequence
  Synthetic
ccuucuccccuggccccgug

SEQ ID NO: 4497 - RNA, 20 nt, Artificial Sequence
  Synthetic
cuucuccccuggccccgugg

SEQ ID NO: 4498 - RNA, 20 nt, Artificial Sequence
  Synthetic
uucuccccuggccccgugga

SEQ ID NO: 4499 - RNA, 20 nt, Artificial Sequence
  Synthetic
ucuccccuggccccguggag

SEQ ID NO: 4500 - RNA, 20 nt, Artificial Sequence
  Synthetic
cuccccuggccccguggaga

SEQ ID NO: 4501 - RNA, 20 nt, Artificial Sequence
  Synthetic
uccccuggccccguggagac

SEQ ID NO: 4502 - RNA, 20 nt, Artificial Sequence
  Synthetic
ccccuggccccguggagacc

SEQ ID NO: 4503 - RNA, 20 nt, Artificial Sequence
  Synthetic
cccuggccccguggagaccu

SEQ ID NO: 4504 - RNA, 20 nt, Artificial Sequence
  Synthetic
ccuggccccguggagaccua

SEQ ID NO: 4505 - RNA, 20 nt, Artificial Sequence
  Synthetic
cuggccccguggagaccuag

SEQ ID NO: 4506 - RNA, 20 nt, Artificial Sequence
  Synthetic
uggccccguggagaccuagu

SEQ ID NO: 4507 - RNA, 20 nt, Artificial Sequence
  Synthetic
ggccccguggagaccuagug

SEQ ID NO: 4508 - RNA, 20 nt, Artificial Sequence
  Synthetic
gccccguggagaccuagugu

SEQ ID NO: 4509 - RNA, 20 nt, Artificial Sequence
  Synthetic
ccccguggagaccuaguguu

SEQ ID NO: 4510 - RNA, 20 nt, Artificial Sequence
  Synthetic
cccguggagaccuaguguug

SEQ ID NO: 4511 - RNA, 20 nt, Artificial Sequence
  Synthetic
ccguggagaccuaguguuga

SEQ ID NO: 4512 - RNA, 20 nt, Artificial Sequence
  Synthetic
cguggagaccuaguguugac

SEQ ID NO: 4513 - RNA, 20 nt, Artificial Sequence
  Synthetic
guggagaccuaguguugacc

SEQ ID NO: 4514 - RNA, 20 nt, Artificial Sequence
  Synthetic
uggagaccuaguguugaccg

SEQ ID NO: 4515 - RNA, 20 nt, Artificial Sequence
  Synthetic
ggagaccuaguguugaccga

SEQ ID NO: 4516 - RNA, 20 nt, Artificial Sequence
  Synthetic
gagaccuaguguugaccgag

SEQ ID NO: 4517 - RNA, 20 nt, Artificial Sequence
  Synthetic
agaccuaguguugaccgaga

SEQ ID NO: 4518 - RNA, 20 nt, Artificial Sequence
  Synthetic
gaccuaguguugaccgagaa

SEQ ID NO: 4519 - RNA, 20 nt, Artificial Sequence
  Synthetic
accuaguguugaccgagaaa

SEQ ID NO: 4520 - RNA, 20 nt, Artificial Sequence
  Synthetic
ccuaguguugaccgagaaac

SEQ ID NO: 4521 - RNA, 20 nt, Artificial Sequence
  Synthetic
cuaguguugaccgagaaacu

SEQ ID NO: 4522 - RNA, 20 nt, Artificial Sequence
  Synthetic
uaguguugaccgagaaacug

SEQ ID NO: 4523 - RNA, 20 nt, Artificial Sequence
  Synthetic
aguguugaccgagaaacugg

SEQ ID NO: 4524 - RNA, 20 nt, Artificial Sequence
  Synthetic
guguugaccgagaaacuggc

SEQ ID NO: 4525 - RNA, 20 nt, Artificial Sequence
  Synthetic
uguugaccgagaaacuggcu

SEQ ID NO: 4526 - RNA, 20 nt, Artificial Sequence
  Synthetic
guugaccgagaaacuggcuc

SEQ ID NO: 4527 - RNA, 20 nt, Artificial Sequence
  Synthetic
uugaccgagaaacuggcucc

SEQ ID NO: 4528 - RNA, 20 nt, Artificial Sequence
  Synthetic
ugaccgagaaacuggcuccu

SEQ ID NO: 4529 - RNA, 20 nt, Artificial Sequence
  Synthetic
gaccgagaaacuggcuccuc

SEQ ID NO: 4530 - RNA, 20 nt, Artificial Sequence
  Synthetic
accgagaaacuggcuccuca

SEQ ID NO: 4531 - RNA, 20 nt, Artificial Sequence
  Synthetic
ccgagaaacuggcuccucag

SEQ ID NO: 4532 - RNA, 20 nt, Artificial Sequence
  Synthetic
cgagaaacuggcuccucagc

SEQ ID NO: 4533 - RNA, 20 nt, Artificial Sequence
  Synthetic
gagaaacuggcuccucagcc

SEQ ID NO: 4534 - RNA, 20 nt, Artificial Sequence
  Synthetic
agaaacuggcuccucagccc

SEQ ID NO: 4535 - RNA, 20 nt, Artificial Sequence
  Synthetic
gaaacuggcuccucagccca

SEQ ID NO: 4536 - RNA, 20 nt, Artificial Sequence
  Synthetic
aaacuggcuccucagcccac

SEQ ID NO: 4537 - RNA, 20 nt, Artificial Sequence
  Synthetic
aacuggcuccucagcccacu

SEQ ID NO: 4538 - RNA, 20 nt, Artificial Sequence
  Synthetic
acuggcuccucagcccacuc

SEQ ID NO: 4539 - RNA, 20 nt, Artificial Sequence
  Synthetic
cuggcuccucagcccacucu

SEQ ID NO: 4540 - RNA, 20 nt, Artificial Sequence
  Synthetic
uggcuccucagcccacucug

SEQ ID NO: 4541 - RNA, 20 nt, Artificial Sequence
  Synthetic
ggcuccucagcccacucugg

SEQ ID NO: 4542 - RNA, 20 nt, Artificial Sequence
  Synthetic
gcuccucagcccacucuggg

SEQ ID NO: 4543 - RNA, 20 nt, Artificial Sequence
  Synthetic
cuccucagcccacucuggga

SEQ ID NO: 4544 - RNA, 20 nt, Artificial Sequence
  Synthetic
uccucagcccacucugggaa

SEQ ID NO: 4545 - RNA, 20 nt, Artificial Sequence
  Synthetic
ccucagcccacucugggaag

SEQ ID NO: 4546 - RNA, 20 nt, Artificial Sequence
  Synthetic
cucagcccacucugggaaga

SEQ ID NO: 4547 - RNA, 20 nt, Artificial Sequence
  Synthetic
ucagcccacucugggaagac

SEQ ID NO: 4548 - RNA, 20 nt, Artificial Sequence
  Synthetic
cagcccacucugggaagacc

SEQ ID NO: 4549 - RNA, 20 nt, Artificial Sequence
  Synthetic
agcccacucugggaagaccc

SEQ ID NO: 4550 - RNA, 20 nt, Artificial Sequence
  Synthetic
gcccacucugggaagaccca

SEQ ID NO: 4551 - RNA, 20 nt, Artificial Sequence
  Synthetic
cccacucugggaagacccag

SEQ ID NO: 4552 - RNA, 20 nt, Artificial Sequence
  Synthetic
ccacucugggaagacccagc

SEQ ID NO: 4553 - RNA, 20 nt, Artificial Sequence
  Synthetic
cacucugggaagacccagcc

SEQ ID NO: 4554 - RNA, 20 nt, Artificial Sequence
  Synthetic
acucugggaagacccagcca

SEQ ID NO: 4555 - RNA, 20 nt, Artificial Sequence
  Synthetic
cucugggaagacccagccaa

SEQ ID NO: 4556 - RNA, 20 nt, Artificial Sequence
  Synthetic
ucugggaagacccagccaaa

SEQ ID NO: 4557 - RNA, 20 nt, Artificial Sequence
  Synthetic
cugggaagacccagccaaau

SEQ ID NO: 4558 - RNA, 20 nt, Artificial Sequence
  Synthetic
ugggaagacccagccaaaug

SEQ ID NO: 4559 - RNA, 20 nt, Artificial Sequence
  Synthetic
gggaagacccagccaaaugu

SEQ ID NO: 4560 - RNA, 20 nt, Artificial Sequence
  Synthetic
ggaagacccagccaaaugua

SEQ ID NO: 4561 - RNA, 20 nt, Artificial Sequence
  Synthetic
gaagacccagccaaauguag

SEQ ID NO: 4562 - RNA, 20 nt, Artificial Sequence
  Synthetic
aagacccagccaaauguagc

SEQ ID NO: 4563 - RNA, 20 nt, Artificial Sequence
  Synthetic
agacccagccaaauguagcu

SEQ ID NO: 4564 - RNA, 20 nt, Artificial Sequence
  Synthetic
gacccagccaaauguagcuc

SEQ ID NO: 4565 - RNA, 20 nt, Artificial Sequence
  Synthetic
acccagccaaauguagcuca

SEQ ID NO: 4566 - RNA, 20 nt, Artificial Sequence
  Synthetic
cccagccaaauguagcucag

SEQ ID NO: 4567 - RNA, 20 nt, Artificial Sequence
  Synthetic
ccagccaaauguagcucagc

SEQ ID NO: 4568 - RNA, 20 nt, Artificial Sequence
  Synthetic
cagccaaauguagcucagcg

SEQ ID NO: 4569 - RNA, 20 nt, Artificial Sequence
  Synthetic
agccaaauguagcucagcgg

SEQ ID NO: 4570 - RNA, 20 nt, Artificial Sequence
  Synthetic
gccaaauguagcucagcgga

SEQ ID NO: 4571 - RNA, 20 nt, Artificial Sequence
  Synthetic
ccaaauguagcucagcggau

SEQ ID NO: 4572 - RNA, 20 nt, Artificial Sequence
  Synthetic
caaauguagcucagcggaug

SEQ ID NO: 4573 - RNA, 20 nt, Artificial Sequence
  Synthetic
aaauguagcucagcggaugc

SEQ ID NO: 4574 - RNA, 20 nt, Artificial Sequence
  Synthetic
aauguagcucagcggaugcc

SEQ ID NO: 4575 - RNA, 20 nt, Artificial Sequence
  Synthetic
auguagcucagcggaugccc

SEQ ID NO: 4576 - RNA, 20 nt, Artificial Sequence
  Synthetic
uguagcucagcggaugccca

SEQ ID NO: 4577 - RNA, 20 nt, Artificial Sequence
  Synthetic
guagcucagcggaugcccag

SEQ ID NO: 4578 - RNA, 20 nt, Artificial Sequence
  Synthetic
uagcucagcggaugcccagg

SEQ ID NO: 4579 - RNA, 20 nt, Artificial Sequence
  Synthetic
agcucagcggaugcccaggg

SEQ ID NO: 4580 - RNA, 20 nt, Artificial Sequence
  Synthetic
gcucagcggaugcccagggc

SEQ ID NO: 4581 - RNA, 20 nt, Artificial Sequence
  Synthetic
cucagcggaugcccagggcu

SEQ ID NO: 4582 - RNA, 20 nt, Artificial Sequence
  Synthetic
ucagcggaugcccagggcug

SEQ ID NO: 4583 - RNA, 20 nt, Artificial Sequence
  Synthetic
cagcggaugcccagggcugg

SEQ ID NO: 4584 - RNA, 20 nt, Artificial Sequence
  Synthetic
agcggaugcccagggcuggg

SEQ ID NO: 4585 - RNA, 20 nt, Artificial Sequence
  Synthetic
gcggaugcccagggcugggc

SEQ ID NO: 4586 - RNA, 20 nt, Artificial Sequence
  Synthetic
cggaugcccagggcugggcu

SEQ ID NO: 4587 - RNA, 20 nt, Artificial Sequence
  Synthetic
ggaugcccagggcugggcuu

SEQ ID NO: 4588 - RNA, 20 nt, Artificial Sequence
  Synthetic
gaugcccagggcugggcuuc

SEQ ID NO: 4589 - RNA, 20 nt, Artificial Sequence
  Synthetic
augcccagggcugggcuucu

SEQ ID NO: 4590 - RNA, 20 nt, Artificial Sequence
  Synthetic
ugcccagggcugggcuucug

SEQ ID NO: 4591 - RNA, 20 nt, Artificial Sequence
  Synthetic
gcccagggcugggcuucugg

SEQ ID NO: 4592 - RNA, 20 nt, Artificial Sequence
  Synthetic
cccagggcugggcuucuggg

SEQ ID NO: 4593 - RNA, 20 nt, Artificial Sequence
  Synthetic
ccagggcugggcuucugggc

SEQ ID NO: 4594 - RNA, 20 nt, Artificial Sequence
  Synthetic
cagggcugggcuucugggcc

SEQ ID NO: 4595 - RNA, 20 nt, Artificial Sequence
  Synthetic
agggcugggcuucugggccc

SEQ ID NO: 4596 - RNA, 20 nt, Artificial Sequence
  Synthetic
gggcugggcuucugggcccg

SEQ ID NO: 4597 - RNA, 20 nt, Artificial Sequence
  Synthetic
ggcugggcuucugggcccgc

SEQ ID NO: 4598 - RNA, 20 nt, Artificial Sequence
  Synthetic
gcugggcuucugggcccgcc

SEQ ID NO: 4599 - RNA, 20 nt, Artificial Sequence
  Synthetic
cugggcuucugggcccgccg

SEQ ID NO: 4600 - RNA, 20 nt, Artificial Sequence
  Synthetic
ugggcuucugggcccgccga

SEQ ID NO: 4601 - RNA, 20 nt, Artificial Sequence
  Synthetic
gggcuucugggcccgccgac

SEQ ID NO: 4602 - RNA, 20 nt, Artificial Sequence
  Synthetic
ggcuucugggcccgccgacg

SEQ ID NO: 4603 - RNA, 20 nt, Artificial Sequence
  Synthetic
gcuucugggcccgccgacgc

SEQ ID NO: 4604 - RNA, 20 nt, Artificial Sequence
  Synthetic
cuucugggcccgccgacgcc

SEQ ID NO: 4605 - RNA, 20 nt, Artificial Sequence
  Synthetic
uucugggcccgccgacgccg

SEQ ID NO: 4606 - RNA, 20 nt, Artificial Sequence
  Synthetic
ucugggcccgccgacgccga

SEQ ID NO: 4607 - RNA, 20 nt, Artificial Sequence
  Synthetic
cugggcccgccgacgccgac

SEQ ID NO: 4608 - RNA, 20 nt, Artificial Sequence
  Synthetic
ugggcccgccgacgccgacc

SEQ ID NO: 4609 - RNA, 20 nt, Artificial Sequence
  Synthetic
gggcccgccgacgccgaccg

SEQ ID NO: 4610 - RNA, 20 nt, Artificial Sequence
  Synthetic
ggcccgccgacgccgaccgc

SEQ ID NO: 4611 - RNA, 20 nt, Artificial Sequence
  Synthetic
gcccgccgacgccgaccgcg

SEQ ID NO: 4612 - RNA, 20 nt, Artificial Sequence
  Synthetic
cccgccgacgccgaccgcgc

SEQ ID NO: 4613 - RNA, 20 nt, Artificial Sequence
  Synthetic
ccgccgacgccgaccgcgcc

SEQ ID NO: 4614 - RNA, 20 nt, Artificial Sequence
  Synthetic
cgccgacgccgaccgcgccc

SEQ ID NO: 4615 - RNA, 20 nt, Artificial Sequence
  Synthetic
gccgacgccgaccgcgcccg

SEQ ID NO: 4616 - RNA, 20 nt, Artificial Sequence
  Synthetic
ccgacgccgaccgcgcccgc

SEQ ID NO: 4617 - RNA, 20 nt, Artificial Sequence
  Synthetic
cgacgccgaccgcgcccgcg

SEQ ID NO: 4618 - RNA, 20 nt, Artificial Sequence
  Synthetic
gacgccgaccgcgcccgcgc

SEQ ID NO: 4619 - RNA, 20 nt, Artificial Sequence
  Synthetic
acgccgaccgcgcccgcgcg

SEQ ID NO: 4620 - RNA, 20 nt, Artificial Sequence
  Synthetic
cgccgaccgcgcccgcgcgg

SEQ ID NO: 4621 - RNA, 20 nt, Artificial Sequence
  Synthetic
gccgaccgcgcccgcgcggg

SEQ ID NO: 4622 - RNA, 20 nt, Artificial Sequence
  Synthetic
ccgaccgcgcccgcgcgggg

SEQ ID NO: 4623 - RNA, 20 nt, Artificial Sequence
  Synthetic
cgaccgcgcccgcgcggggc

SEQ ID NO: 4624 - RNA, 20 nt, Artificial Sequence
  Synthetic
gaccgcgcccgcgcggggcu

SEQ ID NO: 4625 - RNA, 20 nt, Artificial Sequence
  Synthetic
accgcgcccgcgcggggcug

SEQ ID NO: 4626 - RNA, 20 nt, Artificial Sequence
  Synthetic
ccgcgcccgcgcggggcuga

SEQ ID NO: 4627 - RNA, 20 nt, Artificial Sequence
  Synthetic
cgcgcccgcgcggggcugag

SEQ ID NO: 4628 - RNA, 20 nt, Artificial Sequence
  Synthetic
gcgcccgcgcggggcugagg

SEQ ID NO: 4629 - RNA, 20 nt, Artificial Sequence
  Synthetic
cgcccgcgcggggcugaggc

SEQ ID NO: 4630 - RNA, 20 nt, Artificial Sequence
  Synthetic
gcccgcgcggggcugaggcu

SEQ ID NO: 4631 - RNA, 20 nt, Artificial Sequence
  Synthetic
cccgcgcggggcugaggcug

SEQ ID NO: 4632 - RNA, 20 nt, Artificial Sequence
  Synthetic
ccgcgcggggcugaggcugg

SEQ ID NO: 4633 - RNA, 20 nt, Artificial Sequence
  Synthetic
cgcgcggggcugaggcugga

SEQ ID NO: 4634 - RNA, 20 nt, Artificial Sequence
  Synthetic
gcgcggggcugaggcuggau

SEQ ID NO: 4635 - RNA, 20 nt, Artificial Sequence
  Synthetic
cgcggggcugaggcuggauu

SEQ ID NO: 4636 - RNA, 20 nt, Artificial Sequence
  Synthetic
gcggggcugaggcuggauuc

SEQ ID NO: 4637 - RNA, 20 nt, Artificial Sequence
  Synthetic
cggggcugaggcuggauucc

SEQ ID NO: 4638 - RNA, 20 nt, Artificial Sequence
  Synthetic
ggggcugaggcuggauuccu

SEQ ID NO: 4639 - RNA, 20 nt, Artificial Sequence
  Synthetic
gggcugaggcuggauuccuu

SEQ ID NO: 4640 - RNA, 20 nt, Artificial Sequence
  Synthetic
ggcugaggcuggauuccuuu

SEQ ID NO: 4641 - RNA, 20 nt, Artificial Sequence
  Synthetic
gcugaggcuggauuccuuuc

SEQ ID NO: 4642 - RNA, 20 nt, Artificial Sequence
  Synthetic
cugaggcuggauuccuuucc

SEQ ID NO: 4643 - RNA, 20 nt, Artificial Sequence
  Synthetic
ugaggcuggauuccuuuccc

SEQ ID NO: 4644 - RNA, 20 nt, Artificial Sequence
  Synthetic
gaggcuggauuccuuuccca

SEQ ID NO: 4645 - RNA, 20 nt, Artificial Sequence
  Synthetic
aggcuggauuccuuucccac

SEQ ID NO: 4646 - RNA, 20 nt, Artificial Sequence
  Synthetic
ggcuggauuccuuucccacu

SEQ ID NO: 4647 - RNA, 20 nt, Artificial Sequence
  Synthetic
gcuggauuccuuucccacua

SEQ ID NO: 4648 - RNA, 20 nt, Artificial Sequence
  Synthetic
cuggauuccuuucccacuaa

SEQ ID NO: 4649 - RNA, 20 nt, Artificial Sequence
  Synthetic
uggauuccuuucccacuaau

SEQ ID NO: 4650 - RNA, 20 nt, Artificial Sequence
  Synthetic
ggauuccuuucccacuaaua

SEQ ID NO: 4651 - RNA, 20 nt, Artificial Sequence
  Synthetic
gauuccuuucccacuaauag

SEQ ID NO: 4652 - RNA, 20 nt, Artificial Sequence
  Synthetic
auuccuuucccacuaauaga

SEQ ID NO: 4653 - RNA, 20 nt, Artificial Sequence
  Synthetic
uuccuuucccacuaauagag

SEQ ID NO: 4654 - RNA, 20 nt, Artificial Sequence
  Synthetic
uccuuucccacuaauagagg

SEQ ID NO: 4655 - RNA, 20 nt, Artificial Sequence
  Synthetic
ccuuucccacuaauagaggg

SEQ ID NO: 4656 - RNA, 20 nt, Artificial Sequence
  Synthetic
cuuucccacuaauagagggc

SEQ ID NO: 4657 - RNA, 20 nt, Artificial Sequence
  Synthetic
uuucccacuaauagagggca

SEQ ID NO: 4658 - RNA, 20 nt, Artificial Sequence
  Synthetic
uucccacuaauagagggcag

SEQ ID NO: 4659 - RNA, 20 nt, Artificial Sequence
  Synthetic
ucccacuaauagagggcagc

SEQ ID NO: 4660 - RNA, 20 nt, Artificial Sequence
  Synthetic
cccacuaauagagggcagcg

SEQ ID NO: 4661 - RNA, 20 nt, Artificial Sequence
  Synthetic
ccacuaauagagggcagcgg

SEQ ID NO: 4662 - RNA, 20 nt, Artificial Sequence
  Synthetic
cacuaauagagggcagcggg

SEQ ID NO: 4663 - RNA, 20 nt, Artificial Sequence
  Synthetic
acuaauagagggcagcgggc

SEQ ID NO: 4664 - RNA, 20 nt, Artificial Sequence
  Synthetic
cuaauagagggcagcgggcg

SEQ ID NO: 4665 - RNA, 20 nt, Artificial Sequence
  Synthetic
uaauagagggcagcgggcgc

SEQ ID NO: 4666 - RNA, 20 nt, Artificial Sequence
  Synthetic
aauagagggcagcgggcgcu

SEQ ID NO: 4667 - RNA, 20 nt, Artificial Sequence
  Synthetic
auagagggcagcgggcgcuu

SEQ ID NO: 4668 - RNA, 20 nt, Artificial Sequence
  Synthetic
uagagggcagcgggcgcuug

SEQ ID NO: 4669 - RNA, 20 nt, Artificial Sequence
  Synthetic
agagggcagcgggcgcuuga

SEQ ID NO: 4670 - RNA, 20 nt, Artificial Sequence
  Synthetic
gagggcagcgggcgcuugag

SEQ ID NO: 4671 - RNA, 20 nt, Artificial Sequence
  Synthetic
agggcagcgggcgcuugagc

SEQ ID NO: 4672 - RNA, 20 nt, Artificial Sequence
  Synthetic
gggcagcgggcgcuugagcg

SEQ ID NO: 4673 - RNA, 20 nt, Artificial Sequence
  Synthetic
ggcagcgggcgcuugagcgc

SEQ ID NO: 4674 - RNA, 20 nt, Artificial Sequence
  Synthetic
gcagcgggcgcuugagcgcu

SEQ ID NO: 4675 - RNA, 20 nt, Artificial Sequence
  Synthetic
cagcgggcgcuugagcgcug

SEQ ID NO: 4676 - RNA, 20 nt, Artificial Sequence
  Synthetic
agcgggcgcuugagcgcugg

SEQ ID NO: 4677 - RNA, 20 nt, Artificial Sequence
  Synthetic
gcgggcgcuugagcgcugga

SEQ ID NO: 4678 - RNA, 20 nt, Artificial Sequence
  Synthetic
cgggcgcuugagcgcuggaa

SEQ ID NO: 4679 - RNA, 20 nt, Artificial Sequence
  Synthetic
gggcgcuugagcgcuggaag

SEQ ID NO: 4680 - RNA, 20 nt, Artificial Sequence
  Synthetic
ggcgcuugagcgcuggaaga

SEQ ID NO: 4681 - RNA, 20 nt, Artificial Sequence
  Synthetic
gcgcuugagcgcuggaagaa

SEQ ID NO: 4682 - RNA, 20 nt, Artificial Sequence
  Synthetic
cgcuugagcgcuggaagaag

SEQ ID NO: 4683 - RNA, 20 nt, Artificial Sequence
  Synthetic
gcuugagcgcuggaagaagu

SEQ ID NO: 4684 - RNA, 20 nt, Artificial Sequence
  Synthetic
cuugagcgcuggaagaaguc

SEQ ID NO: 4685 - RNA, 20 nt, Artificial Sequence
  Synthetic
uugagcgcuggaagaagucc

SEQ ID NO: 4686 - RNA, 20 nt, Artificial Sequence
  Synthetic
ugagcgcuggaagaaguccc

SEQ ID NO: 4687 - RNA, 20 nt, Artificial Sequence
  Synthetic
gagcgcuggaagaagucccu

SEQ ID NO: 4688 - RNA, 20 nt, Artificial Sequence
  Synthetic
agcgcuggaagaagucccuc

SEQ ID NO: 4689 - RNA, 20 nt, Artificial Sequence
  Synthetic
gcgcuggaagaagucccucu

SEQ ID NO: 4690 - RNA, 20 nt, Artificial Sequence
  Synthetic
cgcuggaagaagucccucuc

SEQ ID NO: 4691 - RNA, 20 nt, Artificial Sequence
  Synthetic
gcuggaagaagucccucucc

SEQ ID NO: 4692 - RNA, 20 nt, Artificial Sequence
  Synthetic
cuggaagaagucccucuccu

SEQ ID NO: 4693 - RNA, 20 nt, Artificial Sequence
  Synthetic
uggaagaagucccucuccuc

SEQ ID NO: 4694 - RNA, 20 nt, Artificial Sequence
  Synthetic
ggaagaagucccucuccucu

SEQ ID NO: 4695 - RNA, 20 nt, Artificial Sequence
  Synthetic
gaagaagucccucuccucuc

SEQ ID NO: 4696 - RNA, 20 nt, Artificial Sequence
  Synthetic
aagaagucccucuccucucg

SEQ ID NO: 4697 - RNA, 20 nt, Artificial Sequence
  Synthetic
agaagucccucuccucucgg

SEQ ID NO: 4698 - RNA, 20 nt, Artificial Sequence
  Synthetic
gaagucccucuccucucggg

SEQ ID NO: 4699 - RNA, 20 nt, Artificial Sequence
  Synthetic
aagucccucuccucucgggu

SEQ ID NO: 4700 - RNA, 20 nt, Artificial Sequence
  Synthetic
agucccucuccucucggguc

SEQ ID NO: 4701 - RNA, 20 nt, Artificial Sequence
  Synthetic
gucccucuccucucgggucc

SEQ ID NO: 4702 - RNA, 20 nt, Artificial Sequence
  Synthetic
ucccucuccucucggguccu

SEQ ID NO: 4703 - RNA, 20 nt, Artificial Sequence
  Synthetic
cccucuccucucggguccug

SEQ ID NO: 4704 - RNA, 20 nt, Artificial Sequence
  Synthetic
ccucuccucucggguccugg

SEQ ID NO: 4705 - RNA, 20 nt, Artificial Sequence
  Synthetic
cucuccucucggguccugga

SEQ ID NO: 4706 - RNA, 20 nt, Artificial Sequence
  Synthetic
ucuccucucggguccuggag

SEQ ID NO: 4707 - RNA, 20 nt, Artificial Sequence
  Synthetic
cuccucucggguccuggagc

SEQ ID NO: 4708 - RNA, 20 nt, Artificial Sequence
  Synthetic
uccucucggguccuggagcc

SEQ ID NO: 4709 - RNA, 20 nt, Artificial Sequence
  Synthetic
ccucucggguccuggagccc

SEQ ID NO: 4710 - RNA, 20 nt, Artificial Sequence
  Synthetic
cucucggguccuggagcccc

SEQ ID NO: 4711 - RNA, 20 nt, Artificial Sequence
  Synthetic
ucucggguccuggagccccu

SEQ ID NO: 4712 - RNA, 20 nt, Artificial Sequence
  Synthetic
cucggguccuggagccccug

SEQ ID NO: 4713 - RNA, 20 nt, Artificial Sequence
  Synthetic
ucggguccuggagccccugc

SEQ ID NO: 4714 - RNA, 20 nt, Artificial Sequence
  Synthetic
cggguccuggagccccugcc

SEQ ID NO: 4715 - RNA, 20 nt, Artificial Sequence
  Synthetic
ggguccuggagccccugccc

SEQ ID NO: 4716 - RNA, 20 nt, Artificial Sequence
  Synthetic
gguccuggagccccugcccu

SEQ ID NO: 4717 - RNA, 20 nt, Artificial Sequence
  Synthetic
guccuggagccccugcccug

SEQ ID NO: 4718 - RNA, 20 nt, Artificial Sequence
  Synthetic
uccuggagccccugcccugu

SEQ ID NO: 4719 - RNA, 20 nt, Artificial Sequence
  Synthetic
ccuggagccccugcccuguc

SEQ ID NO: 4720 - RNA, 20 nt, Artificial Sequence
  Synthetic
cuggagccccugcccugucc

SEQ ID NO: 4721 - RNA, 20 nt, Artificial Sequence
  Synthetic
uggagccccugcccuguccu

SEQ ID NO: 4722 - RNA, 20 nt, Artificial Sequence
  Synthetic
ggagccccugcccuguccug

SEQ ID NO: 4723 - RNA, 20 nt, Artificial Sequence
  Synthetic
gagccccugcccuguccugg

SEQ ID NO: 4724 - RNA, 20 nt, Artificial Sequence
  Synthetic
agccccugcccuguccuggc

SEQ ID NO: 4725 - RNA, 20 nt, Artificial Sequence
  Synthetic
gccccugcccuguccuggcg

SEQ ID NO: 4726 - RNA, 20 nt, Artificial Sequence
  Synthetic
ccccugcccuguccuggcgu

SEQ ID NO: 4727 - RNA, 20 nt, Artificial Sequence
  Synthetic
cccugcccuguccuggcguc

SEQ ID NO: 4728 - RNA, 20 nt, Artificial Sequence
  Synthetic
ccugcccuguccuggcgucu

SEQ ID NO: 4729 - RNA, 20 nt, Artificial Sequence
  Synthetic
cugcccuguccuggcgucuu

SEQ ID NO: 4730 - RNA, 20 nt, Artificial Sequence
  Synthetic
ugcccuguccuggcgucuua

SEQ ID NO: 4731 - RNA, 20 nt, Artificial Sequence
  Synthetic
gcccuguccuggcgucuuag

SEQ ID NO: 4732 - RNA, 20 nt, Artificial Sequence
  Synthetic
cccuguccuggcgucuuagc

SEQ ID NO: 4733 - RNA, 20 nt, Artificial Sequence
  Synthetic
ccuguccuggcgucuuagcc

SEQ ID NO: 4734 - RNA, 20 nt, Artificial Sequence
  Synthetic
cuguccuggcgucuuagccg

SEQ ID NO: 4735 - RNA, 20 nt, Artificial Sequence
  Synthetic
uguccuggcgucuuagccgg

SEQ ID NO: 4736 - RNA, 20 nt, Artificial Sequence
  Synthetic
guccuggcgucuuagccgga

SEQ ID NO: 4737 - RNA, 20 nt, Artificial Sequence
  Synthetic
uccuggcgucuuagccggac

SEQ ID NO: 4738 - RNA, 20 nt, Artificial Sequence
  Synthetic
ccuggcgucuuagccggaca

SEQ ID NO: 4739 - RNA, 20 nt, Artificial Sequence
  Synthetic
cuggcgucuuagccggacac

SEQ ID NO: 4740 - RNA, 20 nt, Artificial Sequence
  Synthetic
uggcgucuuagccggacaca

SEQ ID NO: 4741 - RNA, 20 nt, Artificial Sequence
  Synthetic
ggcgucuuagccggacacac

SEQ ID NO: 4742 - RNA, 20 nt, Artificial Sequence
  Synthetic
gcgucuuagccggacacacc

SEQ ID NO: 4743 - RNA, 20 nt, Artificial Sequence
  Synthetic
cgucuuagccggacacaccu

SEQ ID NO: 4744 - RNA, 20 nt, Artificial Sequence
  Synthetic
gucuuagccggacacaccug

SEQ ID NO: 4745 - RNA, 20 nt, Artificial Sequence
  Synthetic
ucuuagccggacacaccugc

SEQ ID NO: 4746 - RNA, 20 nt, Artificial Sequence
  Synthetic
cuuagccggacacaccugcc

SEQ ID NO: 4747 - RNA, 20 nt, Artificial Sequence
  Synthetic
uuagccggacacaccugccc

SEQ ID NO: 4748 - RNA, 20 nt, Artificial Sequence
  Synthetic
uagccggacacaccugcccc

SEQ ID NO: 4749 - RNA, 20 nt, Artificial Sequence
  Synthetic
agccggacacaccugccccg

SEQ ID NO: 4750 - RNA, 20 nt, Artificial Sequence
  Synthetic
gccggacacaccugccccgc

SEQ ID NO: 4751 - RNA, 20 nt, Artificial Sequence
  Synthetic
ccggacacaccugccccgcg

SEQ ID NO: 4752 - RNA, 20 nt, Artificial Sequence
  Synthetic
cggacacaccugccccgcgc

SEQ ID NO: 4753 - RNA, 20 nt, Artificial Sequence
  Synthetic
ggacacaccugccccgcgcc

SEQ ID NO: 4754 - RNA, 20 nt, Artificial Sequence
  Synthetic
gacacaccugccccgcgccg

SEQ ID NO: 4755 - RNA, 20 nt, Artificial Sequence
  Synthetic
acacaccugccccgcgccgg

SEQ ID NO: 4756 - RNA, 20 nt, Artificial Sequence
  Synthetic
cacaccugccccgcgccggu

SEQ ID NO: 4757 - RNA, 20 nt, Artificial Sequence
  Synthetic
acaccugccccgcgccgguc

SEQ ID NO: 4758 - RNA, 20 nt, Artificial Sequence
  Synthetic
caccugccccgcgccggucc

SEQ ID NO: 4759 - RNA, 20 nt, Artificial Sequence
  Synthetic
accugccccgcgccgguccc

SEQ ID NO: 4760 - RNA, 20 nt, Artificial Sequence
  Synthetic
ccugccccgcgccggucccc

SEQ ID NO: 4761 - RNA, 20 nt, Artificial Sequence
  Synthetic
cugccccgcgccgguccccg

SEQ ID NO: 4762 - RNA, 20 nt, Artificial Sequence
  Synthetic
ugccccgcgccgguccccgc

SEQ ID NO: 4763 - RNA, 20 nt, Artificial Sequence
  Synthetic
gccccgcgccgguccccgcu

SEQ ID NO: 4764 - RNA, 20 nt, Artificial Sequence
  Synthetic
ccccgcgccgguccccgcua

SEQ ID NO: 4765 - RNA, 20 nt, Artificial Sequence
  Synthetic
cccgcgccgguccccgcuau

SEQ ID NO: 4766 - RNA, 20 nt, Artificial Sequence
  Synthetic
ccgcgccgguccccgcuauu

SEQ ID NO: 4767 - RNA, 20 nt, Artificial Sequence
  Synthetic
cgcgccgguccccgcuauua

SEQ ID NO: 4768 - RNA, 20 nt, Artificial Sequence
  Synthetic
gcgccgguccccgcuauuac

SEQ ID NO: 4769 - RNA, 20 nt, Artificial Sequence
  Synthetic
cgccgguccccgcuauuacu

SEQ ID NO: 4770 - RNA, 20 nt, Artificial Sequence
  Synthetic
gccgguccccgcuauuacug

SEQ ID NO: 4771 - RNA, 20 nt, Artificial Sequence
  Synthetic
ccgguccccgcuauuacugu

SEQ ID NO: 4772 - RNA, 20 nt, Artificial Sequence
  Synthetic
cgguccccgcuauuacuguc

SEQ ID NO: 4773 - RNA, 20 nt, Artificial Sequence
  Synthetic
gguccccgcuauuacugucu

SEQ ID NO: 4774 - RNA, 20 nt, Artificial Sequence
  Synthetic
guccccgcuauuacugucug

SEQ ID NO: 4775 - RNA, 20 nt, Artificial Sequence
  Synthetic
uccccgcuauuacugucugc

SEQ ID NO: 4776 - RNA, 20 nt, Artificial Sequence
  Synthetic
ccccgcuauuacugucugca

SEQ ID NO: 4777 - RNA, 20 nt, Artificial Sequence
  Synthetic
cccgcuauuacugucugcac

SEQ ID NO: 4778 - RNA, 20 nt, Artificial Sequence
  Synthetic
ccgcuauuacugucugcacc

SEQ ID NO: 4779 - RNA, 20 nt, Artificial Sequence
  Synthetic
cgcuauuacugucugcaccu

SEQ ID NO: 4780 - RNA, 20 nt, Artificial Sequence
  Synthetic
gcuauuacugucugcaccua

SEQ ID NO: 4781 - RNA, 20 nt, Artificial Sequence
  Synthetic
cuauuacugucugcaccuac

SEQ ID NO: 4782 - RNA, 20 nt, Artificial Sequence
  Synthetic
uauuacugucugcaccuacg

SEQ ID NO: 4783 - RNA, 20 nt, Artificial Sequence
  Synthetic
auuacugucugcaccuacga

SEQ ID NO: 4784 - RNA, 20 nt, Artificial Sequence
  Synthetic
uuacugucugcaccuacgaa

SEQ ID NO: 4785 - RNA, 20 nt, Artificial Sequence
  Synthetic
uacugucugcaccuacgaag

SEQ ID NO: 4786 - RNA, 20 nt, Artificial Sequence
  Synthetic
acugucugcaccuacgaagc

SEQ ID NO: 4787 - RNA, 20 nt, Artificial Sequence
  Synthetic
cugucugcaccuacgaagca

SEQ ID NO: 4788 - RNA, 20 nt, Artificial Sequence
  Synthetic
ugucugcaccuacgaagcau

SEQ ID NO: 4789 - RNA, 20 nt, Artificial Sequence
  Synthetic
gucugcaccuacgaagcaug

SEQ ID NO: 4790 - RNA, 20 nt, Artificial Sequence
  Synthetic
ucugcaccuacgaagcaugc

SEQ ID NO: 4791 - RNA, 20 nt, Artificial Sequence
  Synthetic
cugcaccuacgaagcaugcc

SEQ ID NO: 4792 - RNA, 20 nt, Artificial Sequence
  Synthetic
ugcaccuacgaagcaugcca

SEQ ID NO: 4793 - RNA, 20 nt, Artificial Sequence
  Synthetic
gcaccuacgaagcaugccag

SEQ ID NO: 4794 - RNA, 20 nt, Artificial Sequence
  Synthetic
caccuacgaagcaugccagc

SEQ ID NO: 4795 - RNA, 20 nt, Artificial Sequence
  Synthetic
accuacgaagcaugccagcu

SEQ ID NO: 4796 - RNA, 20 nt, Artificial Sequence
  Synthetic
ccuacgaagcaugccagcuu

SEQ ID NO: 4797 - RNA, 20 nt, Artificial Sequence
  Synthetic
cuacgaagcaugccagcuuc

SEQ ID NO: 4798 - RNA, 20 nt, Artificial Sequence
  Synthetic
uacgaagcaugccagcuucc

SEQ ID NO: 4799 - RNA, 20 nt, Artificial Sequence
  Synthetic
acgaagcaugccagcuuccu

SEQ ID NO: 4800 - RNA, 20 nt, Artificial Sequence
  Synthetic
cgaagcaugccagcuuccua

SEQ ID NO: 4801 - RNA, 20 nt, Artificial Sequence
  Synthetic
gaagcaugccagcuuccuag

SEQ ID NO: 4802 - RNA, 20 nt, Artificial Sequence
  Synthetic
aagcaugccagcuuccuagg

SEQ ID NO: 4803 - RNA, 20 nt, Artificial Sequence
  Synthetic
agcaugccagcuuccuagga

SEQ ID NO: 4804 - RNA, 20 nt, Artificial Sequence
  Synthetic
gcaugccagcuuccuaggau

SEQ ID NO: 4805 - RNA, 20 nt, Artificial Sequence
  Synthetic
caugccagcuuccuaggauu

SEQ ID NO: 4806 - RNA, 20 nt, Artificial Sequence
  Synthetic
augccagcuuccuaggauug

SEQ ID NO: 4807 - RNA, 20 nt, Artificial Sequence
  Synthetic
ugccagcuuccuaggauugg

SEQ ID NO: 4808 - RNA, 20 nt, Artificial Sequence
  Synthetic
gccagcuuccuaggauuggc

SEQ ID NO: 4809 - RNA, 20 nt, Artificial Sequence
  Synthetic
ccagcuuccuaggauuggcg

SEQ ID NO: 4810 - RNA, 20 nt, Artificial Sequence
  Synthetic
cagcuuccuaggauuggcgg

SEQ ID NO: 4811 - RNA, 20 nt, Artificial Sequence
  Synthetic
agcuuccuaggauuggcggg

SEQ ID NO: 4812 - RNA, 20 nt, Artificial Sequence
  Synthetic
gcuuccuaggauuggcgggg

SEQ ID NO: 4813 - RNA, 20 nt, Artificial Sequence
  Synthetic
cuuccuaggauuggcgggga

SEQ ID NO: 4814 - RNA, 20 nt, Artificial Sequence
  Synthetic
uuccuaggauuggcggggau

SEQ ID NO: 4815 - RNA, 20 nt, Artificial Sequence
  Synthetic
uccuaggauuggcggggauu

SEQ ID NO: 4816 - RNA, 20 nt, Artificial Sequence
  Synthetic
ccuaggauuggcggggauug

SEQ ID NO: 4817 - RNA, 20 nt, Artificial Sequence
  Synthetic
cuaggauuggcggggauuga

SEQ ID NO: 4818 - RNA, 20 nt, Artificial Sequence
  Synthetic
uaggauuggcggggauugau

SEQ ID NO: 4819 - RNA, 20 nt, Artificial Sequence
  Synthetic
aggauuggcggggauugauc

SEQ ID NO: 4820 - RNA, 20 nt, Artificial Sequence
  Synthetic
ggauuggcggggauugaucu

SEQ ID NO: 4821 - RNA, 20 nt, Artificial Sequence
  Synthetic
gauuggcggggauugaucua

SEQ ID NO: 4822 - RNA, 20 nt, Artificial Sequence
  Synthetic
auuggcggggauugaucuag

SEQ ID NO: 4823 - RNA, 20 nt, Artificial Sequence
  Synthetic
uuggcggggauugaucuagc

SEQ ID NO: 4824 - RNA, 20 nt, Artificial Sequence
  Synthetic
uggcggggauugaucuagcg

SEQ ID NO: 4825 - RNA, 20 nt, Artificial Sequence
  Synthetic
ggcggggauugaucuagcgg

SEQ ID NO: 4826 - RNA, 20 nt, Artificial Sequence
  Synthetic
gcggggauugaucuagcggg

SEQ ID NO: 4827 - RNA, 20 nt, Artificial Sequence
  Synthetic
cggggauugaucuagcgggc

SEQ ID NO: 4828 - RNA, 20 nt, Artificial Sequence
  Synthetic
ggggauugaucuagcgggcu

SEQ ID NO: 4829 - RNA, 20 nt, Artificial Sequence
  Synthetic
gggauugaucuagcgggcuc

SEQ ID NO: 4830 - RNA, 20 nt, Artificial Sequence
  Synthetic
ggauugaucuagcgggcucc

SEQ ID NO: 4831 - RNA, 20 nt, Artificial Sequence
  Synthetic
gauugaucuagcgggcuccu

SEQ ID NO: 4832 - RNA, 20 nt, Artificial Sequence
  Synthetic
auugaucuagcgggcuccuc

SEQ ID NO: 4833 - RNA, 20 nt, Artificial Sequence
  Synthetic
uugaucuagcgggcuccucu

SEQ ID NO: 4834 - RNA, 20 nt, Artificial Sequence
  Synthetic
ugaucuagcgggcuccucuu

SEQ ID NO: 4835 - RNA, 20 nt, Artificial Sequence
  Synthetic
gaucuagcgggcuccucuug

SEQ ID NO: 4836 - RNA, 20 nt, Artificial Sequence
  Synthetic
aucuagcgggcuccucuugg

SEQ ID NO: 4837 - RNA, 20 nt, Artificial Sequence
  Synthetic
ucuagcgggcuccucuuggg

SEQ ID NO: 4838 - RNA, 20 nt, Artificial Sequence
  Synthetic
cuagcgggcuccucuugggu

SEQ ID NO: 4839 - RNA, 20 nt, Artificial Sequence
  Synthetic
uagcgggcuccucuugggug

SEQ ID NO: 4840 - RNA, 20 nt, Artificial Sequence
  Synthetic
agcgggcuccucuugggugc

SEQ ID NO: 4841 - RNA, 20 nt, Artificial Sequence
  Synthetic
gcgggcuccucuugggugcg

SEQ ID NO: 4842 - RNA, 20 nt, Artificial Sequence
  Synthetic
cgggcuccucuugggugcga

SEQ ID NO: 4843 - RNA, 20 nt, Artificial Sequence
  Synthetic
gggcuccucuugggugcgaa

SEQ ID NO: 4844 - RNA, 20 nt, Artificial Sequence
  Synthetic
ggcuccucuugggugcgaau

SEQ ID NO: 4845 - RNA, 20 nt, Artificial Sequence
  Synthetic
gcuccucuugggugcgaauu

SEQ ID NO: 4846 - RNA, 20 nt, Artificial Sequence
  Synthetic
cuccucuugggugcgaauua

SEQ ID NO: 4847 - RNA, 20 nt, Artificial Sequence
  Synthetic
uccucuugggugcgaauuag

SEQ ID NO: 4848 - RNA, 20 nt, Artificial Sequence
  Synthetic
ccucuugggugcgaauuagg

SEQ ID NO: 4849 - RNA, 20 nt, Artificial Sequence
  Synthetic
cucuugggugcgaauuaggg

SEQ ID NO: 4850 - RNA, 20 nt, Artificial Sequence
  Synthetic
ucuugggugcgaauuagggg

SEQ ID NO: 4851 - RNA, 20 nt, Artificial Sequence
  Synthetic
cuugggugcgaauuagggga

SEQ ID NO: 4852 - RNA, 20 nt, Artificial Sequence
  Synthetic
uugggugcgaauuaggggaa

SEQ ID NO: 4853 - RNA, 20 nt, Artificial Sequence
  Synthetic
ugggugcgaauuaggggaag

SEQ ID NO: 4854 - RNA, 20 nt, Artificial Sequence
  Synthetic
gggugcgaauuaggggaaga

SEQ ID NO: 4855 - RNA, 20 nt, Artificial Sequence
  Synthetic
ggugcgaauuaggggaagaa

SEQ ID NO: 4856 - RNA, 20 nt, Artificial Sequence
  Synthetic
gugcgaauuaggggaagaaa

SEQ ID NO: 4857 - RNA, 20 nt, Artificial Sequence
  Synthetic
ugcgaauuaggggaagaaaa

SEQ ID NO: 4858 - RNA, 20 nt, Artificial Sequence
  Synthetic
gcgaauuaggggaagaaaag

SEQ ID NO: 4859 - RNA, 20 nt, Artificial Sequence
  Synthetic
cgaauuaggggaagaaaagu

SEQ ID NO: 4860 - RNA, 20 nt, Artificial Sequence
  Synthetic
gaauuaggggaagaaaaguc

SEQ ID NO: 4861 - RNA, 20 nt, Artificial Sequence
  Synthetic
aauuaggggaagaaaagucc

SEQ ID NO: 4862 - RNA, 20 nt, Artificial Sequence
  Synthetic
auuaggggaagaaaaguccg

SEQ ID NO: 4863 - RNA, 20 nt, Artificial Sequence
  Synthetic
uuaggggaagaaaaguccgg

SEQ ID NO: 4864 - RNA, 20 nt, Artificial Sequence
  Synthetic
uaggggaagaaaaguccggc

SEQ ID NO: 4865 - RNA, 20 nt, Artificial Sequence
  Synthetic
aggggaagaaaaguccggcc

SEQ ID NO: 4866 - RNA, 20 nt, Artificial Sequence
  Synthetic
ggggaagaaaaguccggccg

SEQ ID NO: 4867 - RNA, 20 nt, Artificial Sequence
  Synthetic
gggaagaaaaguccggccga

SEQ ID NO: 4868 - RNA, 21 nt, Artificial Sequence
  Synthetic
gaccagugaguuacucugaug

SEQ ID NO: 4869 - RNA, 21 nt, Artificial Sequence
  Synthetic
accagugaguuacucugaugu

SEQ ID NO: 4870 - RNA, 21 nt, Artificial Sequence
  Synthetic
ccagugaguuacucugauguu

SEQ ID NO: 4871 - RNA, 21 nt, Artificial Sequence
  Synthetic
cagugaguuacucugauguuu

SEQ ID NO: 4872 - RNA, 21 nt, Artificial Sequence
  Synthetic
agugaguuacucugauguuua

SEQ ID NO: 4873 - RNA, 21 nt, Artificial Sequence
  Synthetic
gugaguuacucugauguuuau

SEQ ID NO: 4874 - RNA, 21 nt, Artificial Sequence
  Synthetic
ugaguuacucugauguuuauu

SEQ ID NO: 4875 - RNA, 21 nt, Artificial Sequence
  Synthetic
gaguuacucugauguuuauuu

SEQ ID NO: 4876 - RNA, 21 nt, Artificial Sequence
  Synthetic
aguuacucugauguuuauuuu

SEQ ID NO: 4877 - RNA, 21 nt, Artificial Sequence
  Synthetic
guuacucugauguuuauuuua

SEQ ID NO: 4878 - RNA, 21 nt, Artificial Sequence
  Synthetic
uuacucugauguuuauuuuaa

SEQ ID NO: 4879 - RNA, 21 nt, Artificial Sequence
  Synthetic
uacucugauguuuauuuuaau

SEQ ID NO: 4880 - RNA, 21 nt, Artificial Sequence
  Synthetic
acucugauguuuauuuuaaug

SEQ ID NO: 4881 - RNA, 21 nt, Artificial Sequence
  Synthetic
cucugauguuuauuuuaaugc

SEQ ID NO: 4882 - RNA, 21 nt, Artificial Sequence
  Synthetic
ucugauguuuauuuuaaugca

SEQ ID NO: 4883 - RNA, 21 nt, Artificial Sequence
  Synthetic
cugauguuuauuuuaaugcau

SEQ ID NO: 4884 - RNA, 21 nt, Artificial Sequence
  Synthetic
ugauguuuauuuuaaugcauc

SEQ ID NO: 4885 - RNA, 21 nt, Artificial Sequence
  Synthetic
gauguuuauuuuaaugcaucu

SEQ ID NO: 4886 - RNA, 21 nt, Artificial Sequence
  Synthetic
auguuuauuuuaaugcaucuu

SEQ ID NO: 4887 - RNA, 21 nt, Artificial Sequence
  Synthetic
uguuuauuuuaaugcaucuua

SEQ ID NO: 4888 - RNA, 21 nt, Artificial Sequence
  Synthetic
guuuauuuuaaugcaucuuag

SEQ ID NO: 4889 - RNA, 21 nt, Artificial Sequence
  Synthetic
uuuauuuuaaugcaucuuagu

SEQ ID NO: 4890 - RNA, 21 nt, Artificial Sequence
  Synthetic
uuauuuuaaugcaucuuaguc

SEQ ID NO: 4891 - RNA, 21 nt, Artificial Sequence
  Synthetic
uauuuuaaugcaucuuagucc

SEQ ID NO: 4892 - RNA, 21 nt, Artificial Sequence
  Synthetic
auuuuaaugcaucuuagucca

SEQ ID NO: 4893 - RNA, 21 nt, Artificial Sequence
  Synthetic
uuuuaaugcaucuuaguccac

SEQ ID NO: 4894 - RNA, 21 nt, Artificial Sequence
  Synthetic
uuuaaugcaucuuaguccaca

SEQ ID NO: 4895 - RNA, 21 nt, Artificial Sequence
  Synthetic
uuaaugcaucuuaguccacac

SEQ ID NO: 4896 - RNA, 21 nt, Artificial Sequence
  Synthetic
uaaugcaucuuaguccacaca

SEQ ID NO: 4897 - RNA, 21 nt, Artificial Sequence
  Synthetic
aaugcaucuuaguccacacag

SEQ ID NO: 4898 - RNA, 21 nt, Artificial Sequence
  Synthetic
augcaucuuaguccacacagu

SEQ ID NO: 4899 - RNA, 21 nt, Artificial Sequence
  Synthetic
ugcaucuuaguccacacaguu

SEQ ID NO: 4900 - RNA, 21 nt, Artificial Sequence
  Synthetic
gcaucuuaguccacacaguug

SEQ ID NO: 4901 - RNA, 21 nt, Artificial Sequence
  Synthetic
caucuuaguccacacaguugg

SEQ ID NO: 4902 - RNA, 21 nt, Artificial Sequence
  Synthetic
aucuuaguccacacaguuggu

SEQ ID NO: 4903 - RNA, 21 nt, Artificial Sequence
  Synthetic
ucuuaguccacacaguuggua

SEQ ID NO: 4904 - RNA, 21 nt, Artificial Sequence
  Synthetic
cuuaguccacacaguugguau

SEQ ID NO: 4905 - RNA, 21 nt, Artificial Sequence
  Synthetic
uuaguccacacaguugguaua

SEQ ID NO: 4906 - RNA, 21 nt, Artificial Sequence
  Synthetic
uaguccacacaguugguauaa

SEQ ID NO: 4907 - RNA, 21 nt, Artificial Sequence
  Synthetic
aguccacacaguugguauaaa

SEQ ID NO: 4908 - RNA, 21 nt, Artificial Sequence
  Synthetic
guccacacaguugguauaaaa

SEQ ID NO: 4909 - RNA, 21 nt, Artificial Sequence
  Synthetic
uccacacaguugguauaaaau

SEQ ID NO: 4910 - RNA, 21 nt, Artificial Sequence
  Synthetic
ccacacaguugguauaaaauc

SEQ ID NO: 4911 - RNA, 21 nt, Artificial Sequence
  Synthetic
cacacaguugguauaaaauca

SEQ ID NO: 4912 - RNA, 21 nt, Artificial Sequence
  Synthetic
acacaguugguauaaaaucag

SEQ ID NO: 4913 - RNA, 21 nt, Artificial Sequence
  Synthetic
cacaguugguauaaaaucaga

SEQ ID NO: 4914 - RNA, 21 nt, Artificial Sequence
  Synthetic
acaguugguauaaaaucagaa

SEQ ID NO: 4915 - RNA, 21 nt, Artificial Sequence
  Synthetic
caguugguauaaaaucagaaa

SEQ ID NO: 4916 - RNA, 21 nt, Artificial Sequence
  Synthetic
aguugguauaaaaucagaaaa

SEQ ID NO: 4917 - RNA, 21 nt, Artificial Sequence
  Synthetic
guugguauaaaaucagaaaau

SEQ ID NO: 4918 - RNA, 21 nt, Artificial Sequence
  Synthetic
uugguauaaaaucagaaaaug

SEQ ID NO: 4919 - RNA, 21 nt, Artificial Sequence
  Synthetic
ugguauaaaaucagaaaaugc

SEQ ID NO: 4920 - RNA, 21 nt, Artificial Sequence
  Synthetic
gguauaaaaucagaaaaugca

SEQ ID NO: 4921 - RNA, 21 nt, Artificial Sequence
  Synthetic
guauaaaaucagaaaaugcaa

SEQ ID NO: 4922 - RNA, 21 nt, Artificial Sequence
  Synthetic
uauaaaaucagaaaaugcaaa

SEQ ID NO: 4923 - RNA, 21 nt, Artificial Sequence
  Synthetic
auaaaaucagaaaaugcaaag

SEQ ID NO: 4924 - RNA, 21 nt, Artificial Sequence
  Synthetic
uaaaaucagaaaaugcaaagc

SEQ ID NO: 4925 - RNA, 21 nt, Artificial Sequence
  Synthetic
aaaaucagaaaaugcaaagca

SEQ ID NO: 4926 - RNA, 21 nt, Artificial Sequence
  Synthetic
aaaucagaaaaugcaaagcaa

SEQ ID NO: 4927 - RNA, 21 nt, Artificial Sequence
  Synthetic
aaucagaaaaugcaaagcaaa

SEQ ID NO: 4928 - RNA, 21 nt, Artificial Sequence
  Synthetic
aucagaaaaugcaaagcaaaa

SEQ ID NO: 4929 - RNA, 21 nt, Artificial Sequence
  Synthetic
ucagaaaaugcaaagcaaaaa

SEQ ID NO: 4930 - RNA, 21 nt, Artificial Sequence
  Synthetic
cagaaaaugcaaagcaaaaac

SEQ ID NO: 4931 - RNA, 21 nt, Artificial Sequence
  Synthetic
agaaaaugcaaagcaaaaaca

SEQ ID NO: 4932 - RNA, 21 nt, Artificial Sequence
  Synthetic
gaaaaugcaaagcaaaaacaa

SEQ ID NO: 4933 - RNA, 21 nt, Artificial Sequence
  Synthetic
aaaaugcaaagcaaaaacaaa

SEQ ID NO: 4934 - RNA, 21 nt, Artificial Sequence
  Synthetic
aaaugcaaagcaaaaacaaaa

SEQ ID NO: 4935 - RNA, 21 nt, Artificial Sequence
  Synthetic
aaugcaaagcaaaaacaaaag

SEQ ID NO: 4936 - RNA, 21 nt, Artificial Sequence
  Synthetic
augcaaagcaaaaacaaaagg

SEQ ID NO: 4937 - RNA, 21 nt, Artificial Sequence
  Synthetic
ugcaaagcaaaaacaaaaggu

SEQ ID NO: 4938 - RNA, 21 nt, Artificial Sequence
  Synthetic
gcaaagcaaaaacaaaagguc

SEQ ID NO: 4939 - RNA, 21 nt, Artificial Sequence
  Synthetic
caaagcaaaaacaaaaggucu

SEQ ID NO: 4940 - RNA, 21 nt, Artificial Sequence
  Synthetic
aaagcaaaaacaaaaggucug

SEQ ID NO: 4941 - RNA, 21 nt, Artificial Sequence
  Synthetic
aagcaaaaacaaaaggucugg

SEQ ID NO: 4942 - RNA, 21 nt, Artificial Sequence
  Synthetic
agcaaaaacaaaaggucugga

SEQ ID NO: 4943 - RNA, 21 nt, Artificial Sequence
  Synthetic
gcaaaaacaaaaggucuggag

SEQ ID NO: 4944 - RNA, 21 nt, Artificial Sequence
  Synthetic
caaaaacaaaaggucuggagu

SEQ ID NO: 4945 - RNA, 21 nt, Artificial Sequence
  Synthetic
aaaaacaaaaggucuggaguc

SEQ ID NO: 4946 - RNA, 21 nt, Artificial Sequence
  Synthetic
aaaacaaaaggucuggagucu

SEQ ID NO: 4947 - RNA, 21 nt, Artificial Sequence
  Synthetic
aaacaaaaggucuggagucuu

SEQ ID NO: 4948 - RNA, 21 nt, Artificial Sequence
  Synthetic
aacaaaaggucuggagucuua

SEQ ID NO: 4949 - RNA, 21 nt, Artificial Sequence
  Synthetic
acaaaaggucuggagucuuag

SEQ ID NO: 4950 - RNA, 21 nt, Artificial Sequence
  Synthetic
caaaaggucuggagucuuagc

SEQ ID NO: 4951 - RNA, 21 nt, Artificial Sequence
  Synthetic
aaaaggucuggagucuuagca

SEQ ID NO: 4952 - RNA, 21 nt, Artificial Sequence
  Synthetic
aaaggucuggagucuuagcau

SEQ ID NO: 4953 - RNA, 21 nt, Artificial Sequence
  Synthetic
aaggucuggagucuuagcauc

SEQ ID NO: 4954 - RNA, 21 nt, Artificial Sequence
  Synthetic
aggucuggagucuuagcauca

SEQ ID NO: 4955 - RNA, 21 nt, Artificial Sequence
  Synthetic
ggucuggagucuuagcaucag

SEQ ID NO: 4956 - RNA, 21 nt, Artificial Sequence
  Synthetic
gucuggagucuuagcaucaga

SEQ ID NO: 4957 - RNA, 21 nt, Artificial Sequence
  Synthetic
ucuggagucuuagcaucagaa

SEQ ID NO: 4958 - RNA, 21 nt, Artificial Sequence
  Synthetic
cuggagucuuagcaucagaag

SEQ ID NO: 4959 - RNA, 21 nt, Artificial Sequence
  Synthetic
uggagucuuagcaucagaagg

SEQ ID NO: 4960 - RNA, 21 nt, Artificial Sequence
  Synthetic
ggagucuuagcaucagaaggg

SEQ ID NO: 4961 - RNA, 21 nt, Artificial Sequence
  Synthetic
gagucuuagcaucagaagggc

SEQ ID NO: 4962 - RNA, 21 nt, Artificial Sequence
  Synthetic
agucuuagcaucagaagggca

SEQ ID NO: 4963 - RNA, 21 nt, Artificial Sequence
  Synthetic
gucuuagcaucagaagggcac

SEQ ID NO: 4964 - RNA, 21 nt, Artificial Sequence
  Synthetic
ucuuagcaucagaagggcacc

SEQ ID NO: 4965 - RNA, 21 nt, Artificial Sequence
  Synthetic
cuuagcaucagaagggcacca

SEQ ID NO: 4966 - RNA, 21 nt, Artificial Sequence
  Synthetic
uuagcaucagaagggcaccau

SEQ ID NO: 4967 - RNA, 21 nt, Artificial Sequence
  Synthetic
uagcaucagaagggcaccaua

SEQ ID NO: 4968 - RNA, 21 nt, Artificial Sequence
  Synthetic
agcaucagaagggcaccauau

SEQ ID NO: 4969 - RNA, 21 nt, Artificial Sequence
  Synthetic
gcaucagaagggcaccauaua

SEQ ID NO: 4970 - RNA, 21 nt, Artificial Sequence
  Synthetic
caucagaagggcaccauauau

SEQ ID NO: 4971 - RNA, 21 nt, Artificial Sequence
  Synthetic
aucagaagggcaccauauaua

SEQ ID NO: 4972 - RNA, 21 nt, Artificial Sequence
  Synthetic
ucagaagggcaccauauauac

SEQ ID NO: 4973 - RNA, 21 nt, Artificial Sequence
  Synthetic
cagaagggcaccauauauaca

SEQ ID NO: 4974 - RNA, 21 nt, Artificial Sequence
  Synthetic
agaagggcaccauauauacau

SEQ ID NO: 4975 - RNA, 21 nt, Artificial Sequence
  Synthetic
gaagggcaccauauauacauc

SEQ ID NO: 4976 - RNA, 21 nt, Artificial Sequence
  Synthetic
aagggcaccauauauacaucu

SEQ ID NO: 4977 - RNA, 21 nt, Artificial Sequence
  Synthetic
agggcaccauauauacaucua

SEQ ID NO: 4978 - RNA, 21 nt, Artificial Sequence
  Synthetic
gggcaccauauauacaucuac

SEQ ID NO: 4979 - RNA, 21 nt, Artificial Sequence
  Synthetic
ggcaccauauauacaucuaca

SEQ ID NO: 4980 - RNA, 21 nt, Artificial Sequence
  Synthetic
gcaccauauauacaucuacag

SEQ ID NO: 4981 - RNA, 21 nt, Artificial Sequence
  Synthetic
caccauauauacaucuacagu

SEQ ID NO: 4982 - RNA, 21 nt, Artificial Sequence
  Synthetic
accauauauacaucuacaguu

SEQ ID NO: 4983 - RNA, 21 nt, Artificial Sequence
  Synthetic
ccauauauacaucuacaguug

SEQ ID NO: 4984 - RNA, 21 nt, Artificial Sequence
  Synthetic
cauauauacaucuacaguugg

SEQ ID NO: 4985 - RNA, 21 nt, Artificial Sequence
  Synthetic
auauauacaucuacaguuggu

SEQ ID NO: 4986 - RNA, 21 nt, Artificial Sequence
  Synthetic
uauauacaucuacaguuggug

SEQ ID NO: 4987 - RNA, 21 nt, Artificial Sequence
  Synthetic
auauacaucuacaguuggugg

SEQ ID NO: 4988 - RNA, 21 nt, Artificial Sequence
  Synthetic
uauacaucuacaguugguggc

SEQ ID NO: 4989 - RNA, 21 nt, Artificial Sequence
  Synthetic
auacaucuacaguugguggcc

SEQ ID NO: 4990 - RNA, 21 nt, Artificial Sequence
  Synthetic
uacaucuacaguugguggcca

SEQ ID NO: 4991 - RNA, 21 nt, Artificial Sequence
  Synthetic
acaucuacaguugguggccaa

SEQ ID NO: 4992 - RNA, 21 nt, Artificial Sequence
  Synthetic
caucuacaguugguggccaau

SEQ ID NO: 4993 - RNA, 21 nt, Artificial Sequence
  Synthetic
aucuacaguugguggccaaua

SEQ ID NO: 4994 - RNA, 21 nt, Artificial Sequence
  Synthetic
ucuacaguugguggccaauac

SEQ ID NO: 4995 - RNA, 21 nt, Artificial Sequence
  Synthetic
cuacaguugguggccaauaca

SEQ ID NO: 4996 - RNA, 21 nt, Artificial Sequence
  Synthetic
uacaguugguggccaauacaa

SEQ ID NO: 4997 - RNA, 21 nt, Artificial Sequence
  Synthetic
acaguugguggccaauacaag

SEQ ID NO: 4998 - RNA, 21 nt, Artificial Sequence
  Synthetic
caguugguggccaauacaagu

SEQ ID NO: 4999 - RNA, 21 nt, Artificial Sequence
  Synthetic
aguugguggccaauacaaguc

SEQ ID NO: 5000 - RNA, 21 nt, Artificial Sequence
  Synthetic
guugguggccaauacaaguca

SEQ ID NO: 5001 - RNA, 21 nt, Artificial Sequence
  Synthetic
uugguggccaauacaagucau

SEQ ID NO: 5002 - RNA, 21 nt, Artificial Sequence
  Synthetic
ugguggccaauacaagucauu

SEQ ID NO: 5003 - RNA, 21 nt, Artificial Sequence
  Synthetic
gguggccaauacaagucauug

SEQ ID NO: 5004 - RNA, 21 nt, Artificial Sequence
  Synthetic
guggccaauacaagucauugc

SEQ ID NO: 5005 - RNA, 21 nt, Artificial Sequence
  Synthetic
uggccaauacaagucauugcc

SEQ ID NO: 5006 - RNA, 21 nt, Artificial Sequence
  Synthetic
ggccaauacaagucauugcca

SEQ ID NO: 5007 - RNA, 21 nt, Artificial Sequence
  Synthetic
gccaauacaagucauugccag

SEQ ID NO: 5008 - RNA, 21 nt, Artificial Sequence
  Synthetic
ccaauacaagucauugccaga

SEQ ID NO: 5009 - RNA, 21 nt, Artificial Sequence
  Synthetic
caauacaagucauugccagac

SEQ ID NO: 5010 - RNA, 21 nt, Artificial Sequence
  Synthetic
aauacaagucauugccagaca

SEQ ID NO: 5011 - RNA, 21 nt, Artificial Sequence
  Synthetic
auacaagucauugccagacag

SEQ ID NO: 5012 - RNA, 21 nt, Artificial Sequence
  Synthetic
uacaagucauugccagacagu

SEQ ID NO: 5013 - RNA, 21 nt, Artificial Sequence
  Synthetic
acaagucauugccagacaguc

SEQ ID NO: 5014 - RNA, 21 nt, Artificial Sequence
  Synthetic
caagucauugccagacagucc

SEQ ID NO: 5015 - RNA, 21 nt, Artificial Sequence
  Synthetic
aagucauugccagacaguccu

SEQ ID NO: 5016 - RNA, 21 nt, Artificial Sequence
  Synthetic
agucauugccagacaguccuu

SEQ ID NO: 5017 - RNA, 21 nt, Artificial Sequence
  Synthetic
gucauugccagacaguccuug

SEQ ID NO: 5018 - RNA, 21 nt, Artificial Sequence
  Synthetic
ucauugccagacaguccuugg

SEQ ID NO: 5019 - RNA, 21 nt, Artificial Sequence
  Synthetic
cauugccagacaguccuugga

SEQ ID NO: 5020 - RNA, 21 nt, Artificial Sequence
  Synthetic
auugccagacaguccuuggag

SEQ ID NO: 5021 - RNA, 21 nt, Artificial Sequence
  Synthetic
uugccagacaguccuuggagg

SEQ ID NO: 5022 - RNA, 21 nt, Artificial Sequence
  Synthetic
ugccagacaguccuuggaggc

SEQ ID NO: 5023 - RNA, 21 nt, Artificial Sequence
  Synthetic
gccagacaguccuuggaggca

SEQ ID NO: 5024 - RNA, 21 nt, Artificial Sequence
  Synthetic
ccagacaguccuuggaggcac

SEQ ID NO: 5025 - RNA, 21 nt, Artificial Sequence
  Synthetic
cagacaguccuuggaggcaca

SEQ ID NO: 5026 - RNA, 21 nt, Artificial Sequence
  Synthetic
agacaguccuuggaggcacag

SEQ ID NO: 5027 - RNA, 21 nt, Artificial Sequence
  Synthetic
gacaguccuuggaggcacaga

SEQ ID NO: 5028 - RNA, 21 nt, Artificial Sequence
  Synthetic
acaguccuuggaggcacagaa

SEQ ID NO: 5029 - RNA, 21 nt, Artificial Sequence
  Synthetic
caguccuuggaggcacagaac

SEQ ID NO: 5030 - RNA, 21 nt, Artificial Sequence
  Synthetic
aguccuuggaggcacagaaca

SEQ ID NO: 5031 - RNA, 21 nt, Artificial Sequence
  Synthetic
guccuuggaggcacagaacag

SEQ ID NO: 5032 - RNA, 21 nt, Artificial Sequence
  Synthetic
uccuuggaggcacagaacagc

SEQ ID NO: 5033 - RNA, 21 nt, Artificial Sequence
  Synthetic
ccuuggaggcacagaacagcc

SEQ ID NO: 5034 - RNA, 21 nt, Artificial Sequence
  Synthetic
cuuggaggcacagaacagccu

SEQ ID NO: 5035 - RNA, 21 nt, Artificial Sequence
  Synthetic
uuggaggcacagaacagccua

SEQ ID NO: 5036 - RNA, 21 nt, Artificial Sequence
  Synthetic
uggaggcacagaacagccuag

SEQ ID NO: 5037 - RNA, 21 nt, Artificial Sequence
  Synthetic
ggaggcacagaacagccuaga

SEQ ID NO: 5038 - RNA, 21 nt, Artificial Sequence
  Synthetic
gaggcacagaacagccuagac

SEQ ID NO: 5039 - RNA, 21 nt, Artificial Sequence
  Synthetic
aggcacagaacagccuagacc

SEQ ID NO: 5040 - RNA, 21 nt, Artificial Sequence
  Synthetic
ggcacagaacagccuagaccc

SEQ ID NO: 5041 - RNA, 21 nt, Artificial Sequence
  Synthetic
gcacagaacagccuagaccca

SEQ ID NO: 5042 - RNA, 21 nt, Artificial Sequence
  Synthetic
cacagaacagccuagacccag

SEQ ID NO: 5043 - RNA, 21 nt, Artificial Sequence
  Synthetic
acagaacagccuagacccagc

SEQ ID NO: 5044 - RNA, 21 nt, Artificial Sequence
  Synthetic
cagaacagccuagacccagcc

SEQ ID NO: 5045 - RNA, 21 nt, Artificial Sequence
  Synthetic
agaacagccuagacccagcca

SEQ ID NO: 5046 - RNA, 21 nt, Artificial Sequence
  Synthetic
gaacagccuagacccagccaa

SEQ ID NO: 5047 - RNA, 21 nt, Artificial Sequence
  Synthetic
aacagccuagacccagccaag

SEQ ID NO: 5048 - RNA, 21 nt, Artificial Sequence
  Synthetic
acagccuagacccagccaagc

SEQ ID NO: 5049 - RNA, 21 nt, Artificial Sequence
  Synthetic
cagccuagacccagccaagcu

SEQ ID NO: 5050 - RNA, 21 nt, Artificial Sequence
  Synthetic
agccuagacccagccaagcuc

SEQ ID NO: 5051 - RNA, 21 nt, Artificial Sequence
  Synthetic
gccuagacccagccaagcucu

SEQ ID NO: 5052 - RNA, 21 nt, Artificial Sequence
  Synthetic
ccuagacccagccaagcucua

SEQ ID NO: 5053 - RNA, 21 nt, Artificial Sequence
  Synthetic
cuagacccagccaagcucuag

SEQ ID NO: 5054 - RNA, 21 nt, Artificial Sequence
  Synthetic
uagacccagccaagcucuagg

SEQ ID NO: 5055 - RNA, 21 nt, Artificial Sequence
  Synthetic
agacccagccaagcucuagga

SEQ ID NO: 5056 - RNA, 21 nt, Artificial Sequence
  Synthetic
gacccagccaagcucuaggaa

SEQ ID NO: 5057 - RNA, 21 nt, Artificial Sequence
  Synthetic
acccagccaagcucuaggaac

SEQ ID NO: 5058 - RNA, 21 nt, Artificial Sequence
  Synthetic
cccagccaagcucuaggaacu

SEQ ID NO: 5059 - RNA, 21 nt, Artificial Sequence
  Synthetic
ccagccaagcucuaggaacuc

SEQ ID NO: 5060 - RNA, 21 nt, Artificial Sequence
  Synthetic
cagccaagcucuaggaacuca

SEQ ID NO: 5061 - RNA, 21 nt, Artificial Sequence
  Synthetic
agccaagcucuaggaacucac

SEQ ID NO: 5062 - RNA, 21 nt, Artificial Sequence
  Synthetic
gccaagcucuaggaacucacg

SEQ ID NO: 5063 - RNA, 21 nt, Artificial Sequence
  Synthetic
ccaagcucuaggaacucacgg

SEQ ID NO: 5064 - RNA, 21 nt, Artificial Sequence
  Synthetic
caagcucuaggaacucacggu

SEQ ID NO: 5065 - RNA, 21 nt, Artificial Sequence
  Synthetic
aagcucuaggaacucacgguc

SEQ ID NO: 5066 - RNA, 21 nt, Artificial Sequence
  Synthetic
agcucuaggaacucacggucc

SEQ ID NO: 5067 - RNA, 21 nt, Artificial Sequence
  Synthetic
gcucuaggaacucacgguccc

SEQ ID NO: 5068 - RNA, 21 nt, Artificial Sequence
  Synthetic
cucuaggaacucacgguccca

SEQ ID NO: 5069 - RNA, 21 nt, Artificial Sequence
  Synthetic
ucuaggaacucacggucccaa

SEQ ID NO: 5070 - RNA, 21 nt, Artificial Sequence
  Synthetic
cuaggaacucacggucccaag

SEQ ID NO: 5071 - RNA, 21 nt, Artificial Sequence
  Synthetic
uaggaacucacggucccaagg

SEQ ID NO: 5072 - RNA, 21 nt, Artificial Sequence
  Synthetic
aggaacucacggucccaagga

SEQ ID NO: 5073 - RNA, 21 nt, Artificial Sequence
  Synthetic
ggaacucacggucccaaggag

SEQ ID NO: 5074 - RNA, 21 nt, Artificial Sequence
  Synthetic
gaacucacggucccaaggagu

SEQ ID NO: 5075 - RNA, 21 nt, Artificial Sequence
  Synthetic
aacucacggucccaaggaguc

SEQ ID NO: 5076 - RNA, 21 nt, Artificial Sequence
  Synthetic
acucacggucccaaggagucu

SEQ ID NO: 5077 - RNA, 21 nt, Artificial Sequence
  Synthetic
cucacggucccaaggagucua

SEQ ID NO: 5078 - RNA, 21 nt, Artificial Sequence
  Synthetic
ucacggucccaaggagucuag

SEQ ID NO: 5079 - RNA, 21 nt, Artificial Sequence
  Synthetic
cacggucccaaggagucuaga

SEQ ID NO: 5080 - RNA, 21 nt, Artificial Sequence
  Synthetic
acggucccaaggagucuagac

SEQ ID NO: 5081 - RNA, 21 nt, Artificial Sequence
  Synthetic
cggucccaaggagucuagacg

SEQ ID NO: 5082 - RNA, 21 nt, Artificial Sequence
  Synthetic
ggucccaaggagucuagacgc

SEQ ID NO: 5083 - RNA, 21 nt, Artificial Sequence
  Synthetic
gucccaaggagucuagacgcu

SEQ ID NO: 5084 - RNA, 21 nt, Artificial Sequence
  Synthetic
ucccaaggagucuagacgcuu

SEQ ID NO: 5085 - RNA, 21 nt, Artificial Sequence
  Synthetic
cccaaggagucuagacgcuug

SEQ ID NO: 5086 - RNA, 21 nt, Artificial Sequence
  Synthetic
ccaaggagucuagacgcuugu

SEQ ID NO: 5087 - RNA, 21 nt, Artificial Sequence
  Synthetic
caaggagucuagacgcuuguu

SEQ ID NO: 5088 - RNA, 21 nt, Artificial Sequence
  Synthetic
aaggagucuagacgcuuguuc

SEQ ID NO: 5089 - RNA, 21 nt, Artificial Sequence
  Synthetic
aggagucuagacgcuuguucu

SEQ ID NO: 5090 - RNA, 21 nt, Artificial Sequence
  Synthetic
ggagucuagacgcuuguucug

SEQ ID NO: 5091 - RNA, 21 nt, Artificial Sequence
  Synthetic
gagucuagacgcuuguucuga

SEQ ID NO: 5092 - RNA, 21 nt, Artificial Sequence
  Synthetic
agucuagacgcuuguucugau

SEQ ID NO: 5093 - RNA, 21 nt, Artificial Sequence
  Synthetic
gucuagacgcuuguucugaug

SEQ ID NO: 5094 - RNA, 21 nt, Artificial Sequence
  Synthetic
ucuagacgcuuguucugaugc

SEQ ID NO: 5095 - RNA, 21 nt, Artificial Sequence
  Synthetic
cuagacgcuuguucugaugcu

SEQ ID NO: 5096 - RNA, 21 nt, Artificial Sequence
  Synthetic
uagacgcuuguucugaugcuc

SEQ ID NO: 5097 - RNA, 21 nt, Artificial Sequence
  Synthetic
agacgcuuguucugaugcucc

SEQ ID NO: 5098 - RNA, 21 nt, Artificial Sequence
  Synthetic
gacgcuuguucugaugcuccg

SEQ ID NO: 5099 - RNA, 21 nt, Artificial Sequence
  Synthetic
acgcuuguucugaugcuccga

SEQ ID NO: 5100 - RNA, 21 nt, Artificial Sequence
  Synthetic
cgcuuguucugaugcuccgac

SEQ ID NO: 5101 - RNA, 21 nt, Artificial Sequence
  Synthetic
gcuuguucugaugcuccgacc

SEQ ID NO: 5102 - RNA, 21 nt, Artificial Sequence
  Synthetic
cuuguucugaugcuccgaccg

SEQ ID NO: 5103 - RNA, 21 nt, Artificial Sequence
  Synthetic
uuguucugaugcuccgaccgu

SEQ ID NO: 5104 - RNA, 21 nt, Artificial Sequence
  Synthetic
uguucugaugcuccgaccgua

SEQ ID NO: 5105 - RNA, 21 nt, Artificial Sequence
  Synthetic
guucugaugcuccgaccguaa

SEQ ID NO: 5106 - RNA, 21 nt, Artificial Sequence
  Synthetic
uucugaugcuccgaccguaag

SEQ ID NO: 5107 - RNA, 21 nt, Artificial Sequence
  Synthetic
ucugaugcuccgaccguaaga

SEQ ID NO: 5108 - RNA, 21 nt, Artificial Sequence
  Synthetic
cugaugcuccgaccguaagaa

SEQ ID NO: 5109 - RNA, 21 nt, Artificial Sequence
  Synthetic
ugaugcuccgaccguaagaaa

SEQ ID NO: 5110 - RNA, 21 nt, Artificial Sequence
  Synthetic
gaugcuccgaccguaagaaaa

SEQ ID NO: 5111 - RNA, 21 nt, Artificial Sequence
  Synthetic
augcuccgaccguaagaaaaa

SEQ ID NO: 5112 - RNA, 21 nt, Artificial Sequence
  Synthetic
ugcuccgaccguaagaaaaau

SEQ ID NO: 5113 - RNA, 21 nt, Artificial Sequence
  Synthetic
gcuccgaccguaagaaaaaug

SEQ ID NO: 5114 - RNA, 21 nt, Artificial Sequence
  Synthetic
cuccgaccguaagaaaaaugu

SEQ ID NO: 5115 - RNA, 21 nt, Artificial Sequence
  Synthetic
uccgaccguaagaaaaaugug

SEQ ID NO: 5116 - RNA, 21 nt, Artificial Sequence
  Synthetic
ccgaccguaagaaaaaugugg

SEQ ID NO: 5117 - RNA, 21 nt, Artificial Sequence
  Synthetic
cgaccguaagaaaaauguggg

SEQ ID NO: 5118 - RNA, 21 nt, Artificial Sequence
  Synthetic
gaccguaagaaaaauguggga

SEQ ID NO: 5119 - RNA, 21 nt, Artificial Sequence
  Synthetic
accguaagaaaaaugugggag

SEQ ID NO: 5120 - RNA, 21 nt, Artificial Sequence
  Synthetic
ccguaagaaaaaugugggagu

SEQ ID NO: 5121 - RNA, 21 nt, Artificial Sequence
  Synthetic
cguaagaaaaaugugggagug

SEQ ID NO: 5122 - RNA, 21 nt, Artificial Sequence
  Synthetic
guaagaaaaaugugggaguga

SEQ ID NO: 5123 - RNA, 21 nt, Artificial Sequence
  Synthetic
uaagaaaaaugugggagugau

SEQ ID NO: 5124 - RNA, 21 nt, Artificial Sequence
  Synthetic
aagaaaaaugugggagugaug

SEQ ID NO: 5125 - RNA, 21 nt, Artificial Sequence
  Synthetic
agaaaaaugugggagugauga

SEQ ID NO: 5126 - RNA, 21 nt, Artificial Sequence
  Synthetic
gaaaaaugugggagugaugaa

SEQ ID NO: 5127 - RNA, 21 nt, Artificial Sequence
  Synthetic
aaaaaugugggagugaugaag

SEQ ID NO: 5128 - RNA, 21 nt, Artificial Sequence
  Synthetic
aaaaugugggagugaugaagg

SEQ ID NO: 5129 - RNA, 21 nt, Artificial Sequence
  Synthetic
aaaugugggagugaugaaggc

SEQ ID NO: 5130 - RNA, 21 nt, Artificial Sequence
  Synthetic
aaugugggagugaugaaggcu

SEQ ID NO: 5131 - RNA, 21 nt, Artificial Sequence
  Synthetic
augugggagugaugaaggcuu

SEQ ID NO: 5132 - RNA, 21 nt, Artificial Sequence
  Synthetic
ugugggagugaugaaggcuuu

SEQ ID NO: 5133 - RNA, 21 nt, Artificial Sequence
  Synthetic
gugggagugaugaaggcuuua

SEQ ID NO: 5134 - RNA, 21 nt, Artificial Sequence
  Synthetic
ugggagugaugaaggcuuuau

SEQ ID NO: 5135 - RNA, 21 nt, Artificial Sequence
  Synthetic
gggagugaugaaggcuuuaug

SEQ ID NO: 5136 - RNA, 21 nt, Artificial Sequence
  Synthetic
ggagugaugaaggcuuuauga

SEQ ID NO: 5137 - RNA, 21 nt, Artificial Sequence
  Synthetic
gagugaugaaggcuuuaugau

SEQ ID NO: 5138 - RNA, 21 nt, Artificial Sequence
  Synthetic
agugaugaaggcuuuaugauu

SEQ ID NO: 5139 - RNA, 21 nt, Artificial Sequence
  Synthetic
gugaugaaggcuuuaugauuu

SEQ ID NO: 5140 - RNA, 21 nt, Artificial Sequence
  Synthetic
ugaugaaggcuuuaugauuua

SEQ ID NO: 5141 - RNA, 21 nt, Artificial Sequence
  Synthetic
gaugaaggcuuuaugauuuac

SEQ ID NO: 5142 - RNA, 21 nt, Artificial Sequence
  Synthetic
augaaggcuuuaugauuuacu

SEQ ID NO: 5143 - RNA, 21 nt, Artificial Sequence
  Synthetic
ugaaggcuuuaugauuuacuc

SEQ ID NO: 5144 - RNA, 21 nt, Artificial Sequence
  Synthetic
gaaggcuuuaugauuuacuca

SEQ ID NO: 5145 - RNA, 21 nt, Artificial Sequence
  Synthetic
aaggcuuuaugauuuacucau

SEQ ID NO: 5146 - RNA, 21 nt, Artificial Sequence
  Synthetic
aggcuuuaugauuuacucauu

SEQ ID NO: 5147 - RNA, 21 nt, Artificial Sequence
  Synthetic
ggcuuuaugauuuacucauua

SEQ ID NO: 5148 - RNA, 21 nt, Artificial Sequence
  Synthetic
gcuuuaugauuuacucauuau

SEQ ID NO: 5149 - RNA, 21 nt, Artificial Sequence
  Synthetic
cuuuaugauuuacucauuaua

SEQ ID NO: 5150 - RNA, 21 nt, Artificial Sequence
  Synthetic
uuuaugauuuacucauuauag

SEQ ID NO: 5151 - RNA, 21 nt, Artificial Sequence
  Synthetic
uuaugauuuacucauuauagu

SEQ ID NO: 5152 - RNA, 21 nt, Artificial Sequence
  Synthetic
uaugauuuacucauuauagua

SEQ ID NO: 5153 - RNA, 21 nt, Artificial Sequence
  Synthetic
augauuuacucauuauaguaa

SEQ ID NO: 5154 - RNA, 21 nt, Artificial Sequence
  Synthetic
ugauuuacucauuauaguaau

SEQ ID NO: 5155 - RNA, 21 nt, Artificial Sequence
  Synthetic
gauuuacucauuauaguaaua

SEQ ID NO: 5156 - RNA, 21 nt, Artificial Sequence
  Synthetic
auuuacucauuauaguaauaa

SEQ ID NO: 5157 - RNA, 21 nt, Artificial Sequence
  Synthetic
uuuacucauuauaguaauaau

SEQ ID NO: 5158 - RNA, 21 nt, Artificial Sequence
  Synthetic
uuacucauuauaguaauaaua

SEQ ID NO: 5159 - RNA, 21 nt, Artificial Sequence
  Synthetic
uacucauuauaguaauaauag

SEQ ID NO: 5160 - RNA, 21 nt, Artificial Sequence
  Synthetic
acucauuauaguaauaauagc

SEQ ID NO: 5161 - RNA, 21 nt, Artificial Sequence
  Synthetic
cucauuauaguaauaauagca

SEQ ID NO: 5162 - RNA, 21 nt, Artificial Sequence
  Synthetic
ucauuauaguaauaauagcag

SEQ ID NO: 5163 - RNA, 21 nt, Artificial Sequence
  Synthetic
cauuauaguaauaauagcagc

SEQ ID NO: 5164 - RNA, 21 nt, Artificial Sequence
  Synthetic
auuauaguaauaauagcagcc

SEQ ID NO: 5165 - RNA, 21 nt, Artificial Sequence
  Synthetic
uuauaguaauaauagcagccu

SEQ ID NO: 5166 - RNA, 21 nt, Artificial Sequence
  Synthetic
uauaguaauaauagcagccua

SEQ ID NO: 5167 - RNA, 21 nt, Artificial Sequence
  Synthetic
auaguaauaauagcagccuag

SEQ ID NO: 5168 - RNA, 21 nt, Artificial Sequence
  Synthetic
uaguaauaauagcagccuagc

SEQ ID NO: 5169 - RNA, 21 nt, Artificial Sequence
  Synthetic
aguaauaauagcagccuagcu

SEQ ID NO: 5170 - RNA, 21 nt, Artificial Sequence
  Synthetic
guaauaauagcagccuagcua

SEQ ID NO: 5171 - RNA, 21 nt, Artificial Sequence
  Synthetic
uaauaauagcagccuagcuag

SEQ ID NO: 5172 - RNA, 21 nt, Artificial Sequence
  Synthetic
aauaauagcagccuagcuagg

SEQ ID NO: 5173 - RNA, 21 nt, Artificial Sequence
  Synthetic
auaauagcagccuagcuaggu

SEQ ID NO: 5174 - RNA, 21 nt, Artificial Sequence
  Synthetic
uaauagcagccuagcuaggua

SEQ ID NO: 5175 - RNA, 21 nt, Artificial Sequence
  Synthetic
aauagcagccuagcuagguac

SEQ ID NO: 5176 - RNA, 21 nt, Artificial Sequence
  Synthetic
auagcagccuagcuagguaca

SEQ ID NO: 5177 - RNA, 21 nt, Artificial Sequence
  Synthetic
uagcagccuagcuagguacaa

SEQ ID NO: 5178 - RNA, 21 nt, Artificial Sequence
  Synthetic
agcagccuagcuagguacaaa

SEQ ID NO: 5179 - RNA, 21 nt, Artificial Sequence
  Synthetic
gcagccuagcuagguacaaaa

SEQ ID NO: 5180 - RNA, 21 nt, Artificial Sequence
  Synthetic
cagccuagcuagguacaaaag

SEQ ID NO: 5181 - RNA, 21 nt, Artificial Sequence
  Synthetic
agccuagcuagguacaaaagc

SEQ ID NO: 5182 - RNA, 21 nt, Artificial Sequence
  Synthetic
gccuagcuagguacaaaagca

SEQ ID NO: 5183 - RNA, 21 nt, Artificial Sequence
  Synthetic
ccuagcuagguacaaaagcag

SEQ ID NO: 5184 - RNA, 21 nt, Artificial Sequence
  Synthetic
cuagcuagguacaaaagcagu

SEQ ID NO: 5185 - RNA, 21 nt, Artificial Sequence
  Synthetic
uagcuagguacaaaagcaguu

SEQ ID NO: 5186 - RNA, 21 nt, Artificial Sequence
  Synthetic
agcuagguacaaaagcaguua

SEQ ID NO: 5187 - RNA, 21 nt, Artificial Sequence
  Synthetic
gcuagguacaaaagcaguuau

SEQ ID NO: 5188 - RNA, 21 nt, Artificial Sequence
  Synthetic
cuagguacaaaagcaguuaua

SEQ ID NO: 5189 - RNA, 21 nt, Artificial Sequence
  Synthetic
uagguacaaaagcaguuauaa

SEQ ID NO: 5190 - RNA, 21 nt, Artificial Sequence
  Synthetic
agguacaaaagcaguuauaaa

SEQ ID NO: 5191 - RNA, 21 nt, Artificial Sequence
  Synthetic
gguacaaaagcaguuauaaac

SEQ ID NO: 5192 - RNA, 21 nt, Artificial Sequence
  Synthetic
guacaaaagcaguuauaaacc

SEQ ID NO: 5193 - RNA, 21 nt, Artificial Sequence
  Synthetic
uacaaaagcaguuauaaacca

SEQ ID NO: 5194 - RNA, 21 nt, Artificial Sequence
  Synthetic
acaaaagcaguuauaaaccau

SEQ ID NO: 5195 - RNA, 21 nt, Artificial Sequence
  Synthetic
caaaagcaguuauaaaccauu

SEQ ID NO: 5196 - RNA, 21 nt, Artificial Sequence
  Synthetic
aaaagcaguuauaaaccauuu

SEQ ID NO: 5197 - RNA, 21 nt, Artificial Sequence
  Synthetic
aaagcaguuauaaaccauuua

SEQ ID NO: 5198 - RNA, 21 nt, Artificial Sequence
  Synthetic
aagcaguuauaaaccauuuau

SEQ ID NO: 5199 - RNA, 21 nt, Artificial Sequence
  Synthetic
agcaguuauaaaccauuuaua

SEQ ID NO: 5200 - RNA, 21 nt, Artificial Sequence
  Synthetic
gcaguuauaaaccauuuauau

SEQ ID NO: 5201 - RNA, 21 nt, Artificial Sequence
  Synthetic
caguuauaaaccauuuauauu

SEQ ID NO: 5202 - RNA, 21 nt, Artificial Sequence
  Synthetic
aguuauaaaccauuuauauua

SEQ ID NO: 5203 - RNA, 21 nt, Artificial Sequence
  Synthetic
guuauaaaccauuuauauuac

SEQ ID NO: 5204 - RNA, 21 nt, Artificial Sequence
  Synthetic
uuauaaaccauuuauauuaca

SEQ ID NO: 5205 - RNA, 21 nt, Artificial Sequence
  Synthetic
uauaaaccauuuauauuacac

SEQ ID NO: 5206 - RNA, 21 nt, Artificial Sequence
  Synthetic
auaaaccauuuauauuacaca

SEQ ID NO: 5207 - RNA, 21 nt, Artificial Sequence
  Synthetic
uaaaccauuuauauuacacag

SEQ ID NO: 5208 - RNA, 21 nt, Artificial Sequence
  Synthetic
aaaccauuuauauuacacaga

SEQ ID NO: 5209 - RNA, 21 nt, Artificial Sequence
  Synthetic
aaccauuuauauuacacagaa

SEQ ID NO: 5210 - RNA, 21 nt, Artificial Sequence
  Synthetic
accauuuauauuacacagaau

SEQ ID NO: 5211 - RNA, 21 nt, Artificial Sequence
  Synthetic
ccauuuauauuacacagaauu

SEQ ID NO: 5212 - RNA, 21 nt, Artificial Sequence
  Synthetic
cauuuauauuacacagaauua

SEQ ID NO: 5213 - RNA, 21 nt, Artificial Sequence
  Synthetic
auuuauauuacacagaauuau

SEQ ID NO: 5214 - RNA, 21 nt, Artificial Sequence
  Synthetic
uuuauauuacacagaauuauu

SEQ ID NO: 5215 - RNA, 21 nt, Artificial Sequence
  Synthetic
uuauauuacacagaauuauuc

SEQ ID NO: 5216 - RNA, 21 nt, Artificial Sequence
  Synthetic
uauauuacacagaauuauuca

SEQ ID NO: 5217 - RNA, 21 nt, Artificial Sequence
  Synthetic
auauuacacagaauuauucag

SEQ ID NO: 5218 - RNA, 21 nt, Artificial Sequence
  Synthetic
uauuacacagaauuauucagg

SEQ ID NO: 5219 - RNA, 21 nt, Artificial Sequence
  Synthetic
auuacacagaauuauucaggu

SEQ ID NO: 5220 - RNA, 21 nt, Artificial Sequence
  Synthetic
uuacacagaauuauucagguc

SEQ ID NO: 5221 - RNA, 21 nt, Artificial Sequence
  Synthetic
uacacagaauuauucaggucu

SEQ ID NO: 5222 - RNA, 21 nt, Artificial Sequence
  Synthetic
acacagaauuauucaggucuc

SEQ ID NO: 5223 - RNA, 21 nt, Artificial Sequence
  Synthetic
cacagaauuauucaggucucc

SEQ ID NO: 5224 - RNA, 21 nt, Artificial Sequence
  Synthetic
acagaauuauucaggucucca

SEQ ID NO: 5225 - RNA, 21 nt, Artificial Sequence
  Synthetic
cagaauuauucaggucuccau

SEQ ID NO: 5226 - RNA, 21 nt, Artificial Sequence
  Synthetic
agaauuauucaggucuccauu

SEQ ID NO: 5227 - RNA, 21 nt, Artificial Sequence
  Synthetic
gaauuauucaggucuccauuc

SEQ ID NO: 5228 - RNA, 21 nt, Artificial Sequence
  Synthetic
aauuauucaggucuccauucu

SEQ ID NO: 5229 - RNA, 21 nt, Artificial Sequence
  Synthetic
auuauucaggucuccauucua

SEQ ID NO: 5230 - RNA, 21 nt, Artificial Sequence
  Synthetic
uuauucaggucuccauucuau

SEQ ID NO: 5231 - RNA, 21 nt, Artificial Sequence
  Synthetic
uauucaggucuccauucuauc

SEQ ID NO: 5232 - RNA, 21 nt, Artificial Sequence
  Synthetic
auucaggucuccauucuaucu

SEQ ID NO: 5233 - RNA, 21 nt, Artificial Sequence
  Synthetic
uucaggucuccauucuaucuu

SEQ ID NO: 5234 - RNA, 21 nt, Artificial Sequence
  Synthetic
ucaggucuccauucuaucuua

SEQ ID NO: 5235 - RNA, 21 nt, Artificial Sequence
  Synthetic
caggucuccauucuaucuuau

SEQ ID NO: 5236 - RNA, 21 nt, Artificial Sequence
  Synthetic
aggucuccauucuaucuuaug

SEQ ID NO: 5237 - RNA, 21 nt, Artificial Sequence
  Synthetic
ggucuccauucuaucuuaugu

SEQ ID NO: 5238 - RNA, 21 nt, Artificial Sequence
  Synthetic
gucuccauucuaucuuauguu

SEQ ID NO: 5239 - RNA, 21 nt, Artificial Sequence
  Synthetic
ucuccauucuaucuuauguug

SEQ ID NO: 5240 - RNA, 21 nt, Artificial Sequence
  Synthetic
cuccauucuaucuuauguugu

SEQ ID NO: 5241 - RNA, 21 nt, Artificial Sequence
  Synthetic
uccauucuaucuuauguugua

SEQ ID NO: 5242 - RNA, 21 nt, Artificial Sequence
  Synthetic
ccauucuaucuuauguuguaa

SEQ ID NO: 5243 - RNA, 21 nt, Artificial Sequence
  Synthetic
cauucuaucuuauguuguaaa

SEQ ID NO: 5244 - RNA, 21 nt, Artificial Sequence
  Synthetic
auucuaucuuauguuguaaaa

SEQ ID NO: 5245 - RNA, 21 nt, Artificial Sequence
  Synthetic
uucuaucuuauguuguaaaau

SEQ ID NO: 5246 - RNA, 21 nt, Artificial Sequence
  Synthetic
ucuaucuuauguuguaaaauu

SEQ ID NO: 5247 - RNA, 21 nt, Artificial Sequence
  Synthetic
cuaucuuauguuguaaaauug

SEQ ID NO: 5248 - RNA, 21 nt, Artificial Sequence
  Synthetic
uaucuuauguuguaaaauugu

SEQ ID NO: 5249 - RNA, 21 nt, Artificial Sequence
  Synthetic
aucuuauguuguaaaauuguu

SEQ ID NO: 5250 - RNA, 21 nt, Artificial Sequence
  Synthetic
ucuuauguuguaaaauuguua

SEQ ID NO: 5251 - RNA, 21 nt, Artificial Sequence
  Synthetic
cuuauguuguaaaauuguuaa

SEQ ID NO: 5252 - RNA, 21 nt, Artificial Sequence
  Synthetic
uuauguuguaaaauuguuaau

SEQ ID NO: 5253 - RNA, 21 nt, Artificial Sequence
  Synthetic
uauguuguaaaauuguuaauu

SEQ ID NO: 5254 - RNA, 21 nt, Artificial Sequence
  Synthetic
auguuguaaaauuguuaauug

SEQ ID NO: 5255 - RNA, 21 nt, Artificial Sequence
  Synthetic
uguuguaaaauuguuaauugg

SEQ ID NO: 5256 - RNA, 21 nt, Artificial Sequence
  Synthetic
guuguaaaauuguuaauugga

SEQ ID NO: 5257 - RNA, 21 nt, Artificial Sequence
  Synthetic
uuguaaaauuguuaauuggau

SEQ ID NO: 5258 - RNA, 21 nt, Artificial Sequence
  Synthetic
uguaaaauuguuaauuggauu

SEQ ID NO: 5259 - RNA, 21 nt, Artificial Sequence
  Synthetic
guaaaauuguuaauuggauuu

SEQ ID NO: 5260 - RNA, 21 nt, Artificial Sequence
  Synthetic
uaaaauuguuaauuggauuuc

SEQ ID NO: 5261 - RNA, 21 nt, Artificial Sequence
  Synthetic
aaaauuguuaauuggauuucc

SEQ ID NO: 5262 - RNA, 21 nt, Artificial Sequence
  Synthetic
aaauuguuaauuggauuucca

SEQ ID NO: 5263 - RNA, 21 nt, Artificial Sequence
  Synthetic
aauuguuaauuggauuuccag

SEQ ID NO: 5264 - RNA, 21 nt, Artificial Sequence
  Synthetic
auuguuaauuggauuuccagu

SEQ ID NO: 5265 - RNA, 21 nt, Artificial Sequence
  Synthetic
uuguuaauuggauuuccagug

SEQ ID NO: 5266 - RNA, 21 nt, Artificial Sequence
  Synthetic
uguuaauuggauuuccaguga

SEQ ID NO: 5267 - RNA, 21 nt, Artificial Sequence
  Synthetic
guuaauuggauuuccagugag

SEQ ID NO: 5268 - RNA, 21 nt, Artificial Sequence
  Synthetic
uuaauuggauuuccagugagu

SEQ ID NO: 5269 - RNA, 21 nt, Artificial Sequence
  Synthetic
uaauuggauuuccagugaguu

SEQ ID NO: 5270 - RNA, 21 nt, Artificial Sequence
  Synthetic
aauuggauuuccagugaguug

SEQ ID NO: 5271 - RNA, 21 nt, Artificial Sequence
  Synthetic
auuggauuuccagugaguugu

SEQ ID NO: 5272 - RNA, 21 nt, Artificial Sequence
  Synthetic
uuggauuuccagugaguuguu

SEQ ID NO: 5273 - RNA, 21 nt, Artificial Sequence
  Synthetic
uggauuuccagugaguuguuu

SEQ ID NO: 5274 - RNA, 21 nt, Artificial Sequence
  Synthetic
ggauuuccagugaguuguuua

SEQ ID NO: 5275 - RNA, 21 nt, Artificial Sequence
  Synthetic
gauuuccagugaguuguuuag

SEQ ID NO: 5276 - RNA, 21 nt, Artificial Sequence
  Synthetic
auuuccagugaguuguuuaga

SEQ ID NO: 5277 - RNA, 21 nt, Artificial Sequence
  Synthetic
uuuccagugaguuguuuagau

SEQ ID NO: 5278 - RNA, 21 nt, Artificial Sequence
  Synthetic
uuccagugaguuguuuagaug

SEQ ID NO: 5279 - RNA, 21 nt, Artificial Sequence
  Synthetic
uccagugaguuguuuagauga

SEQ ID NO: 5280 - RNA, 21 nt, Artificial Sequence
  Synthetic
ccagugaguuguuuagaugau

SEQ ID NO: 5281 - RNA, 21 nt, Artificial Sequence
  Synthetic
cagugaguuguuuagaugauu

SEQ ID NO: 5282 - RNA, 21 nt, Artificial Sequence
  Synthetic
agugaguuguuuagaugauua

SEQ ID NO: 5283 - RNA, 21 nt, Artificial Sequence
  Synthetic
gugaguuguuuagaugauuag

SEQ ID NO: 5284 - RNA, 21 nt, Artificial Sequence
  Synthetic
ugaguuguuuagaugauuagu

SEQ ID NO: 5285 - RNA, 21 nt, Artificial Sequence
  Synthetic
gaguuguuuagaugauuagug

SEQ ID NO: 5286 - RNA, 21 nt, Artificial Sequence
  Synthetic
aguuguuuagaugauuaguga

SEQ ID NO: 5287 - RNA, 21 nt, Artificial Sequence
  Synthetic
guuguuuagaugauuagugau

SEQ ID NO: 5288 - RNA, 21 nt, Artificial Sequence
  Synthetic
uuguuuagaugauuagugaua

SEQ ID NO: 5289 - RNA, 21 nt, Artificial Sequence
  Synthetic
uguuuagaugauuagugauaa

SEQ ID NO: 5290 - RNA, 21 nt, Artificial Sequence
  Synthetic
guuuagaugauuagugauaau

SEQ ID NO: 5291 - RNA, 21 nt, Artificial Sequence
  Synthetic
uuuagaugauuagugauaaua

SEQ ID NO: 5292 - RNA, 21 nt, Artificial Sequence
  Synthetic
uuagaugauuagugauaauaa

SEQ ID NO: 5293 - RNA, 21 nt, Artificial Sequence
  Synthetic
uagaugauuagugauaauaag

SEQ ID NO: 5294 - RNA, 21 nt, Artificial Sequence
  Synthetic
agaugauuagugauaauaagg

SEQ ID NO: 5295 - RNA, 21 nt, Artificial Sequence
  Synthetic
gaugauuagugauaauaagga

SEQ ID NO: 5296 - RNA, 21 nt, Artificial Sequence
  Synthetic
augauuagugauaauaaggaa

SEQ ID NO: 5297 - RNA, 21 nt, Artificial Sequence
  Synthetic
ugauuagugauaauaaggaau

SEQ ID NO: 5298 - RNA, 21 nt, Artificial Sequence
  Synthetic
gauuagugauaauaaggaaug

SEQ ID NO: 5299 - RNA, 21 nt, Artificial Sequence
  Synthetic
auuagugauaauaaggaaugg

SEQ ID NO: 5300 - RNA, 21 nt, Artificial Sequence
  Synthetic
uuagugauaauaaggaauggu

SEQ ID NO: 5301 - RNA, 21 nt, Artificial Sequence
  Synthetic
uagugauaauaaggaauggua

SEQ ID NO: 5302 - RNA, 21 nt, Artificial Sequence
  Synthetic
agugauaauaaggaaugguaa

SEQ ID NO: 5303 - RNA, 21 nt, Artificial Sequence
  Synthetic
gugauaauaaggaaugguaaa

SEQ ID NO: 5304 - RNA, 21 nt, Artificial Sequence
  Synthetic
ugauaauaaggaaugguaaau

SEQ ID NO: 5305 - RNA, 21 nt, Artificial Sequence
  Synthetic
gauaauaaggaaugguaaauc

SEQ ID NO: 5306 - RNA, 21 nt, Artificial Sequence
  Synthetic
auaauaaggaaugguaaaucc

SEQ ID NO: 5307 - RNA, 21 nt, Artificial Sequence
  Synthetic
uaauaaggaaugguaaaucca

SEQ ID NO: 5308 - RNA, 21 nt, Artificial Sequence
  Synthetic
aauaaggaaugguaaauccau

SEQ ID NO: 5309 - RNA, 21 nt, Artificial Sequence
  Synthetic
auaaggaaugguaaauccaua

SEQ ID NO: 5310 - RNA, 21 nt, Artificial Sequence
  Synthetic
uaaggaaugguaaauccauag

SEQ ID NO: 5311 - RNA, 21 nt, Artificial Sequence
  Synthetic
aaggaaugguaaauccauagc

SEQ ID NO: 5312 - RNA, 21 nt, Artificial Sequence
  Synthetic
aggaaugguaaauccauagca

SEQ ID NO: 5313 - RNA, 21 nt, Artificial Sequence
  Synthetic
ggaaugguaaauccauagcac

SEQ ID NO: 5314 - RNA, 21 nt, Artificial Sequence
  Synthetic
gaaugguaaauccauagcacc

SEQ ID NO: 5315 - RNA, 21 nt, Artificial Sequence
  Synthetic
aaugguaaauccauagcacca

SEQ ID NO: 5316 - RNA, 21 nt, Artificial Sequence
  Synthetic
augguaaauccauagcaccau

SEQ ID NO: 5317 - RNA, 21 nt, Artificial Sequence
  Synthetic
ugguaaauccauagcaccauu

SEQ ID NO: 5318 - RNA, 21 nt, Artificial Sequence
  Synthetic
gguaaauccauagcaccauuu

SEQ ID NO: 5319 - RNA, 21 nt, Artificial Sequence
  Synthetic
guaaauccauagcaccauuuc

SEQ ID NO: 5320 - RNA, 21 nt, Artificial Sequence
  Synthetic
uaaauccauagcaccauuuca

SEQ ID NO: 5321 - RNA, 21 nt, Artificial Sequence
  Synthetic
aaauccauagcaccauuucaa

SEQ ID NO: 5322 - RNA, 21 nt, Artificial Sequence
  Synthetic
aauccauagcaccauuucaaa

SEQ ID NO: 5323 - RNA, 21 nt, Artificial Sequence
  Synthetic
auccauagcaccauuucaaag

SEQ ID NO: 5324 - RNA, 21 nt, Artificial Sequence
  Synthetic
uccauagcaccauuucaaaga

SEQ ID NO: 5325 - RNA, 21 nt, Artificial Sequence
  Synthetic
ccauagcaccauuucaaagac

SEQ ID NO: 5326 - RNA, 21 nt, Artificial Sequence
  Synthetic
cauagcaccauuucaaagacu

SEQ ID NO: 5327 - RNA, 21 nt, Artificial Sequence
  Synthetic
auagcaccauuucaaagacuu

SEQ ID NO: 5328 - RNA, 21 nt, Artificial Sequence
  Synthetic
uagcaccauuucaaagacuug

SEQ ID NO: 5329 - RNA, 21 nt, Artificial Sequence
  Synthetic
agcaccauuucaaagacuugu

SEQ ID NO: 5330 - RNA, 21 nt, Artificial Sequence
  Synthetic
gcaccauuucaaagacuuguu

SEQ ID NO: 5331 - RNA, 21 nt, Artificial Sequence
  Synthetic
caccauuucaaagacuuguug

SEQ ID NO: 5332 - RNA, 21 nt, Artificial Sequence
  Synthetic
accauuucaaagacuuguugu

SEQ ID NO: 5333 - RNA, 21 nt, Artificial Sequence
  Synthetic
ccauuucaaagacuuguuguc

SEQ ID NO: 5334 - RNA, 21 nt, Artificial Sequence
  Synthetic
cauuucaaagacuuguuguca

SEQ ID NO: 5335 - RNA, 21 nt, Artificial Sequence
  Synthetic
auuucaaagacuuguugucac

SEQ ID NO: 5336 - RNA, 21 nt, Artificial Sequence
  Synthetic
uuucaaagacuuguugucacu

SEQ ID NO: 5337 - RNA, 21 nt, Artificial Sequence
  Synthetic
uucaaagacuuguugucacug

SEQ ID NO: 5338 - RNA, 21 nt, Artificial Sequence
  Synthetic
ucaaagacuuguugucacuga

SEQ ID NO: 5339 - RNA, 21 nt, Artificial Sequence
  Synthetic
caaagacuuguugucacugau

SEQ ID NO: 5340 - RNA, 21 nt, Artificial Sequence
  Synthetic
aaagacuuguugucacugauu

SEQ ID NO: 5341 - RNA, 21 nt, Artificial Sequence
  Synthetic
aagacuuguugucacugauuu

SEQ ID NO: 5342 - RNA, 21 nt, Artificial Sequence
  Synthetic
agacuuguugucacugauuuc

SEQ ID NO: 5343 - RNA, 21 nt, Artificial Sequence
  Synthetic
gacuuguugucacugauuucu

SEQ ID NO: 5344 - RNA, 21 nt, Artificial Sequence
  Synthetic
acuuguugucacugauuucuc

SEQ ID NO: 5345 - RNA, 21 nt, Artificial Sequence
  Synthetic
cuuguugucacugauuucuca

SEQ ID NO: 5346 - RNA, 21 nt, Artificial Sequence
  Synthetic
uuguugucacugauuucucau

SEQ ID NO: 5347 - RNA, 21 nt, Artificial Sequence
  Synthetic
uguugucacugauuucucauu

SEQ ID NO: 5348 - RNA, 21 nt, Artificial Sequence
  Synthetic
guugucacugauuucucauuu

SEQ ID NO: 5349 - RNA, 21 nt, Artificial Sequence
  Synthetic
uugucacugauuucucauuua

SEQ ID NO: 5350 - RNA, 21 nt, Artificial Sequence
  Synthetic
ugucacugauuucucauuuag

SEQ ID NO: 5351 - RNA, 21 nt, Artificial Sequence
  Synthetic
gucacugauuucucauuuaga

SEQ ID NO: 5352 - RNA, 21 nt, Artificial Sequence
  Synthetic
ucacugauuucucauuuagau

SEQ ID NO: 5353 - RNA, 21 nt, Artificial Sequence
  Synthetic
cacugauuucucauuuagaug

SEQ ID NO: 5354 - RNA, 21 nt, Artificial Sequence
  Synthetic
acugauuucucauuuagaugu

SEQ ID NO: 5355 - RNA, 21 nt, Artificial Sequence
  Synthetic
cugauuucucauuuagaugug

SEQ ID NO: 5356 - RNA, 21 nt, Artificial Sequence
  Synthetic
ugauuucucauuuagaugugu

SEQ ID NO: 5357 - RNA, 21 nt, Artificial Sequence
  Synthetic
gauuucucauuuagaugugug

SEQ ID NO: 5358 - RNA, 21 nt, Artificial Sequence
  Synthetic
auuucucauuuagauguguga

SEQ ID NO: 5359 - RNA, 21 nt, Artificial Sequence
  Synthetic
uuucucauuuagaugugugac

SEQ ID NO: 5360 - RNA, 21 nt, Artificial Sequence
  Synthetic
uucucauuuagaugugugacg

SEQ ID NO: 5361 - RNA, 21 nt, Artificial Sequence
  Synthetic
ucucauuuagaugugugacga

SEQ ID NO: 5362 - RNA, 21 nt, Artificial Sequence
  Synthetic
cucauuuagaugugugacgaa

SEQ ID NO: 5363 - RNA, 21 nt, Artificial Sequence
  Synthetic
ucauuuagaugugugacgaag

SEQ ID NO: 5364 - RNA, 21 nt, Artificial Sequence
  Synthetic
cauuuagaugugugacgaaga

SEQ ID NO: 5365 - RNA, 21 nt, Artificial Sequence
  Synthetic
auuuagaugugugacgaagau

SEQ ID NO: 5366 - RNA, 21 nt, Artificial Sequence
  Synthetic
uuuagaugugugacgaagaua

SEQ ID NO: 5367 - RNA, 21 nt, Artificial Sequence
  Synthetic
uuagaugugugacgaagauac

SEQ ID NO: 5368 - RNA, 21 nt, Artificial Sequence
  Synthetic
uagaugugugacgaagauacu

SEQ ID NO: 5369 - RNA, 21 nt, Artificial Sequence
  Synthetic
agaugugugacgaagauacuc

SEQ ID NO: 5370 - RNA, 21 nt, Artificial Sequence
  Synthetic
gaugugugacgaagauacucc

SEQ ID NO: 5371 - RNA, 21 nt, Artificial Sequence
  Synthetic
augugugacgaagauacucca

SEQ ID NO: 5372 - RNA, 21 nt, Artificial Sequence
  Synthetic
ugugugacgaagauacuccac

SEQ ID NO: 5373 - RNA, 21 nt, Artificial Sequence
  Synthetic
gugugacgaagauacuccacc

SEQ ID NO: 5374 - RNA, 21 nt, Artificial Sequence
  Synthetic
ugugacgaagauacuccaccu

SEQ ID NO: 5375 - RNA, 21 nt, Artificial Sequence
  Synthetic
gugacgaagauacuccaccug

SEQ ID NO: 5376 - RNA, 21 nt, Artificial Sequence
  Synthetic
ugacgaagauacuccaccugu

SEQ ID NO: 5377 - RNA, 21 nt, Artificial Sequence
  Synthetic
gacgaagauacuccaccugua

SEQ ID NO: 5378 - RNA, 21 nt, Artificial Sequence
  Synthetic
acgaagauacuccaccuguaa

SEQ ID NO: 5379 - RNA, 21 nt, Artificial Sequence
  Synthetic
cgaagauacuccaccuguaag

SEQ ID NO: 5380 - RNA, 21 nt, Artificial Sequence
  Synthetic
gaagauacuccaccuguaagg

SEQ ID NO: 5381 - RNA, 21 nt, Artificial Sequence
  Synthetic
aagauacuccaccuguaaggg

SEQ ID NO: 5382 - RNA, 21 nt, Artificial Sequence
  Synthetic
agauacuccaccuguaagggc

SEQ ID NO: 5383 - RNA, 21 nt, Artificial Sequence
  Synthetic
gauacuccaccuguaagggca

SEQ ID NO: 5384 - RNA, 21 nt, Artificial Sequence
  Synthetic
auacuccaccuguaagggcaa

SEQ ID NO: 5385 - RNA, 21 nt, Artificial Sequence
  Synthetic
uacuccaccuguaagggcaag

SEQ ID NO: 5386 - RNA, 21 nt, Artificial Sequence
  Synthetic
acuccaccuguaagggcaagu

SEQ ID NO: 5387 - RNA, 21 nt, Artificial Sequence
  Synthetic
cuccaccuguaagggcaagua

SEQ ID NO: 5388 - RNA, 21 nt, Artificial Sequence
  Synthetic
uccaccuguaagggcaaguau

SEQ ID NO: 5389 - RNA, 21 nt, Artificial Sequence
  Synthetic
ccaccuguaagggcaaguaug

SEQ ID NO: 5390 - RNA, 21 nt, Artificial Sequence
  Synthetic
caccuguaagggcaaguaugc

SEQ ID NO: 5391 - RNA, 21 nt, Artificial Sequence
  Synthetic
accuguaagggcaaguaugcc

SEQ ID NO: 5392 - RNA, 21 nt, Artificial Sequence
  Synthetic
ccuguaagggcaaguaugcca

SEQ ID NO: 5393 - RNA, 21 nt, Artificial Sequence
  Synthetic
cuguaagggcaaguaugccaa

SEQ ID NO: 5394 - RNA, 21 nt, Artificial Sequence
  Synthetic
uguaagggcaaguaugccaau

SEQ ID NO: 5395 - RNA, 21 nt, Artificial Sequence
  Synthetic
guaagggcaaguaugccaaug

SEQ ID NO: 5396 - RNA, 21 nt, Artificial Sequence
  Synthetic
uaagggcaaguaugccaaugc

SEQ ID NO: 5397 - RNA, 21 nt, Artificial Sequence
  Synthetic
aagggcaaguaugccaaugcc

SEQ ID NO: 5398 - RNA, 21 nt, Artificial Sequence
  Synthetic
agggcaaguaugccaaugcca

SEQ ID NO: 5399 - RNA, 21 nt, Artificial Sequence
  Synthetic
gggcaaguaugccaaugccac

SEQ ID NO: 5400 - RNA, 21 nt, Artificial Sequence
  Synthetic
ggcaaguaugccaaugccaca

SEQ ID NO: 5401 - RNA, 21 nt, Artificial Sequence
  Synthetic
gcaaguaugccaaugccacaa

SEQ ID NO: 5402 - RNA, 21 nt, Artificial Sequence
  Synthetic
caaguaugccaaugccacaag

SEQ ID NO: 5403 - RNA, 21 nt, Artificial Sequence
  Synthetic
aaguaugccaaugccacaagc

SEQ ID NO: 5404 - RNA, 21 nt, Artificial Sequence
  Synthetic
aguaugccaaugccacaagcc

SEQ ID NO: 5405 - RNA, 21 nt, Artificial Sequence
  Synthetic
guaugccaaugccacaagccg

SEQ ID NO: 5406 - RNA, 21 nt, Artificial Sequence
  Synthetic
uaugccaaugccacaagccgu

SEQ ID NO: 5407 - RNA, 21 nt, Artificial Sequence
  Synthetic
augccaaugccacaagccgug

SEQ ID NO: 5408 - RNA, 21 nt, Artificial Sequence
  Synthetic
ugccaaugccacaagccgugu

SEQ ID NO: 5409 - RNA, 21 nt, Artificial Sequence
  Synthetic
gccaaugccacaagccguguu

SEQ ID NO: 5410 - RNA, 21 nt, Artificial Sequence
  Synthetic
ccaaugccacaagccguguuu

SEQ ID NO: 5411 - RNA, 21 nt, Artificial Sequence
  Synthetic
caaugccacaagccguguuuu

SEQ ID NO: 5412 - RNA, 21 nt, Artificial Sequence
  Synthetic
aaugccacaagccguguuuuu

SEQ ID NO: 5413 - RNA, 21 nt, Artificial Sequence
  Synthetic
augccacaagccguguuuuug

SEQ ID NO: 5414 - RNA, 21 nt, Artificial Sequence
  Synthetic
ugccacaagccguguuuuugc

SEQ ID NO: 5415 - RNA, 21 nt, Artificial Sequence
  Synthetic
gccacaagccguguuuuugca

SEQ ID NO: 5416 - RNA, 21 nt, Artificial Sequence
  Synthetic
ccacaagccguguuuuugcaa

SEQ ID NO: 5417 - RNA, 21 nt, Artificial Sequence
  Synthetic
cacaagccguguuuuugcaag

SEQ ID NO: 5418 - RNA, 21 nt, Artificial Sequence
  Synthetic
acaagccguguuuuugcaagg

SEQ ID NO: 5419 - RNA, 21 nt, Artificial Sequence
  Synthetic
caagccguguuuuugcaaggg

SEQ ID NO: 5420 - RNA, 21 nt, Artificial Sequence
  Synthetic
aagccguguuuuugcaagggc

SEQ ID NO: 5421 - RNA, 21 nt, Artificial Sequence
  Synthetic
agccguguuuuugcaagggcu

SEQ ID NO: 5422 - RNA, 21 nt, Artificial Sequence
  Synthetic
gccguguuuuugcaagggcuc

SEQ ID NO: 5423 - RNA, 21 nt, Artificial Sequence
  Synthetic
ccguguuuuugcaagggcucc

SEQ ID NO: 5424 - RNA, 21 nt, Artificial Sequence
  Synthetic
cguguuuuugcaagggcucca

SEQ ID NO: 5425 - RNA, 21 nt, Artificial Sequence
  Synthetic
guguuuuugcaagggcuccag

SEQ ID NO: 5426 - RNA, 21 nt, Artificial Sequence
  Synthetic
uguuuuugcaagggcuccagu

SEQ ID NO: 5427 - RNA, 21 nt, Artificial Sequence
  Synthetic
guuuuugcaagggcuccaguu

SEQ ID NO: 5428 - RNA, 21 nt, Artificial Sequence
  Synthetic
uuuuugcaagggcuccaguuu

SEQ ID NO: 5429 - RNA, 21 nt, Artificial Sequence
  Synthetic
uuuugcaagggcuccaguuug

SEQ ID NO: 5430 - RNA, 21 nt, Artificial Sequence
  Synthetic
uuugcaagggcuccaguuugg

SEQ ID NO: 5431 - RNA, 21 nt, Artificial Sequence
  Synthetic
uugcaagggcuccaguuuggg

SEQ ID NO: 5432 - RNA, 21 nt, Artificial Sequence
  Synthetic
ugcaagggcuccaguuugggc

SEQ ID NO: 5433 - RNA, 21 nt, Artificial Sequence
  Synthetic
gcaagggcuccaguuugggca

SEQ ID NO: 5434 - RNA, 21 nt, Artificial Sequence
  Synthetic
caagggcuccaguuugggcau

SEQ ID NO: 5435 - RNA, 21 nt, Artificial Sequence
  Synthetic
aagggcuccaguuugggcauu

SEQ ID NO: 5436 - RNA, 21 nt, Artificial Sequence
  Synthetic
agggcuccaguuugggcauuu

SEQ ID NO: 5437 - RNA, 21 nt, Artificial Sequence
  Synthetic
gggcuccaguuugggcauuuu

SEQ ID NO: 5438 - RNA, 21 nt, Artificial Sequence
  Synthetic
ggcuccaguuugggcauuuug

SEQ ID NO: 5439 - RNA, 21 nt, Artificial Sequence
  Synthetic
gcuccaguuugggcauuuugu

SEQ ID NO: 5440 - RNA, 21 nt, Artificial Sequence
  Synthetic
cuccaguuugggcauuuuguc

SEQ ID NO: 5441 - RNA, 21 nt, Artificial Sequence
  Synthetic
uccaguuugggcauuuugucc

SEQ ID NO: 5442 - RNA, 21 nt, Artificial Sequence
  Synthetic
ccaguuugggcauuuuguccg

SEQ ID NO: 5443 - RNA, 21 nt, Artificial Sequence
  Synthetic
caguuugggcauuuuguccgu

SEQ ID NO: 5444 - RNA, 21 nt, Artificial Sequence
  Synthetic
aguuugggcauuuuguccgug

SEQ ID NO: 5445 - RNA, 21 nt, Artificial Sequence
  Synthetic
guuugggcauuuuguccgugu

SEQ ID NO: 5446 - RNA, 21 nt, Artificial Sequence
  Synthetic
uuugggcauuuuguccgugug

SEQ ID NO: 5447 - RNA, 21 nt, Artificial Sequence
  Synthetic
uugggcauuuuguccgugugc

SEQ ID NO: 5448 - RNA, 21 nt, Artificial Sequence
  Synthetic
ugggcauuuuguccgugugcg

SEQ ID NO: 5449 - RNA, 21 nt, Artificial Sequence
  Synthetic
gggcauuuuguccgugugcgc

SEQ ID NO: 5450 - RNA, 21 nt, Artificial Sequence
  Synthetic
ggcauuuuguccgugugcgcg

SEQ ID NO: 5451 - RNA, 21 nt, Artificial Sequence
  Synthetic
gcauuuuguccgugugcgcgu

SEQ ID NO: 5452 - RNA, 21 nt, Artificial Sequence
  Synthetic
cauuuuguccgugugcgcgua

SEQ ID NO: 5453 - RNA, 21 nt, Artificial Sequence
  Synthetic
auuuuguccgugugcgcguaa

SEQ ID NO: 5454 - RNA, 21 nt, Artificial Sequence
  Synthetic
uuuuguccgugugcgcguaaa

SEQ ID NO: 5455 - RNA, 21 nt, Artificial Sequence
  Synthetic
uuuguccgugugcgcguaaag

SEQ ID NO: 5456 - RNA, 21 nt, Artificial Sequence
  Synthetic
uuguccgugugcgcguaaagc

SEQ ID NO: 5457 - RNA, 21 nt, Artificial Sequence
  Synthetic
uguccgugugcgcguaaagcu

SEQ ID NO: 5458 - RNA, 21 nt, Artificial Sequence
  Synthetic
guccgugugcgcguaaagcuu

SEQ ID NO: 5459 - RNA, 21 nt, Artificial Sequence
  Synthetic
uccgugugcgcguaaagcuuc

SEQ ID NO: 5460 - RNA, 21 nt, Artificial Sequence
  Synthetic
ccgugugcgcguaaagcuuca

SEQ ID NO: 5461 - RNA, 21 nt, Artificial Sequence
  Synthetic
cgugugcgcguaaagcuucac

SEQ ID NO: 5462 - RNA, 21 nt, Artificial Sequence
  Synthetic
gugugcgcguaaagcuucaca

SEQ ID NO: 5463 - RNA, 21 nt, Artificial Sequence
  Synthetic
ugugcgcguaaagcuucacac

SEQ ID NO: 5464 - RNA, 21 nt, Artificial Sequence
  Synthetic
gugcgcguaaagcuucacaca

SEQ ID NO: 5465 - RNA, 21 nt, Artificial Sequence
  Synthetic
ugcgcguaaagcuucacacag

SEQ ID NO: 5466 - RNA, 21 nt, Artificial Sequence
  Synthetic
gcgcguaaagcuucacacaga

SEQ ID NO: 5467 - RNA, 21 nt, Artificial Sequence
  Synthetic
cgcguaaagcuucacacagag

SEQ ID NO: 5468 - RNA, 21 nt, Artificial Sequence
  Synthetic
gcguaaagcuucacacagagg

SEQ ID NO: 5469 - RNA, 21 nt, Artificial Sequence
  Synthetic
cguaaagcuucacacagaggu

SEQ ID NO: 5470 - RNA, 21 nt, Artificial Sequence
  Synthetic
guaaagcuucacacagagguu

SEQ ID NO: 5471 - RNA, 21 nt, Artificial Sequence
  Synthetic
uaaagcuucacacagagguuc

SEQ ID NO: 5472 - RNA, 21 nt, Artificial Sequence
  Synthetic
aaagcuucacacagagguucg

SEQ ID NO: 5473 - RNA, 21 nt, Artificial Sequence
  Synthetic
aagcuucacacagagguucgg

SEQ ID NO: 5474 - RNA, 21 nt, Artificial Sequence
  Synthetic
agcuucacacagagguucggg

SEQ ID NO: 5475 - RNA, 21 nt, Artificial Sequence
  Synthetic
gcuucacacagagguucgggc

SEQ ID NO: 5476 - RNA, 21 nt, Artificial Sequence
  Synthetic
cuucacacagagguucgggca

SEQ ID NO: 5477 - RNA, 21 nt, Artificial Sequence
  Synthetic
uucacacagagguucgggcag

SEQ ID NO: 5478 - RNA, 21 nt, Artificial Sequence
  Synthetic
ucacacagagguucgggcagc

SEQ ID NO: 5479 - RNA, 21 nt, Artificial Sequence
  Synthetic
cacacagagguucgggcagcg

SEQ ID NO: 5480 - RNA, 21 nt, Artificial Sequence
  Synthetic
acacagagguucgggcagcgg

SEQ ID NO: 5481 - RNA, 21 nt, Artificial Sequence
  Synthetic
cacagagguucgggcagcggc

SEQ ID NO: 5482 - RNA, 21 nt, Artificial Sequence
  Synthetic
acagagguucgggcagcggcu

SEQ ID NO: 5483 - RNA, 21 nt, Artificial Sequence
  Synthetic
cagagguucgggcagcggcug

SEQ ID NO: 5484 - RNA, 21 nt, Artificial Sequence
  Synthetic
agagguucgggcagcggcugu

SEQ ID NO: 5485 - RNA, 21 nt, Artificial Sequence
  Synthetic
gagguucgggcagcggcuguu

SEQ ID NO: 5486 - RNA, 21 nt, Artificial Sequence
  Synthetic
agguucgggcagcggcuguuu

SEQ ID NO: 5487 - RNA, 21 nt, Artificial Sequence
  Synthetic
gguucgggcagcggcuguuuc

SEQ ID NO: 5488 - RNA, 21 nt, Artificial Sequence
  Synthetic
guucgggcagcggcuguuucu

SEQ ID NO: 5489 - RNA, 21 nt, Artificial Sequence
  Synthetic
uucgggcagcggcuguuucug

SEQ ID NO: 5490 - RNA, 21 nt, Artificial Sequence
  Synthetic
ucgggcagcggcuguuucugu

SEQ ID NO: 5491 - RNA, 21 nt, Artificial Sequence
  Synthetic
cgggcagcggcuguuucuguu

SEQ ID NO: 5492 - RNA, 21 nt, Artificial Sequence
  Synthetic
gggcagcggcuguuucuguug

SEQ ID NO: 5493 - RNA, 21 nt, Artificial Sequence
  Synthetic
ggcagcggcuguuucuguugg

SEQ ID NO: 5494 - RNA, 21 nt, Artificial Sequence
  Synthetic
gcagcggcuguuucuguugga

SEQ ID NO: 5495 - RNA, 21 nt, Artificial Sequence
  Synthetic
cagcggcuguuucuguuggau

SEQ ID NO: 5496 - RNA, 21 nt, Artificial Sequence
  Synthetic
agcggcuguuucuguuggaug

SEQ ID NO: 5497 - RNA, 21 nt, Artificial Sequence
  Synthetic
gcggcuguuucuguuggaugc

SEQ ID NO: 5498 - RNA, 21 nt, Artificial Sequence
  Synthetic
cggcuguuucuguuggaugca

SEQ ID NO: 5499 - RNA, 21 nt, Artificial Sequence
  Synthetic
ggcuguuucuguuggaugcac

SEQ ID NO: 5500 - RNA, 21 nt, Artificial Sequence
  Synthetic
gcuguuucuguuggaugcacu

SEQ ID NO: 5501 - RNA, 21 nt, Artificial Sequence
  Synthetic
cuguuucuguuggaugcacug

SEQ ID NO: 5502 - RNA, 21 nt, Artificial Sequence
  Synthetic
uguuucuguuggaugcacugg

SEQ ID NO: 5503 - RNA, 21 nt, Artificial Sequence
  Synthetic
guuucuguuggaugcacuggg

SEQ ID NO: 5504 - RNA, 21 nt, Artificial Sequence
  Synthetic
uuucuguuggaugcacugggu

SEQ ID NO: 5505 - RNA, 21 nt, Artificial Sequence
  Synthetic
uucuguuggaugcacuggguc

SEQ ID NO: 5506 - RNA, 21 nt, Artificial Sequence
  Synthetic
ucuguuggaugcacuggguca

SEQ ID NO: 5507 - RNA, 21 nt, Artificial Sequence
  Synthetic
cuguuggaugcacugggucac

SEQ ID NO: 5508 - RNA, 21 nt, Artificial Sequence
  Synthetic
uguuggaugcacugggucacc

SEQ ID NO: 5509 - RNA, 21 nt, Artificial Sequence
  Synthetic
guuggaugcacugggucaccc

SEQ ID NO: 5510 - RNA, 21 nt, Artificial Sequence
  Synthetic
uuggaugcacugggucaccca

SEQ ID NO: 5511 - RNA, 21 nt, Artificial Sequence
  Synthetic
uggaugcacugggucacccac

SEQ ID NO: 5512 - RNA, 21 nt, Artificial Sequence
  Synthetic
ggaugcacugggucacccacc

SEQ ID NO: 5513 - RNA, 21 nt, Artificial Sequence
  Synthetic
gaugcacugggucacccacca

SEQ ID NO: 5514 - RNA, 21 nt, Artificial Sequence
  Synthetic
augcacugggucacccaccag

SEQ ID NO: 5515 - RNA, 21 nt, Artificial Sequence
  Synthetic
ugcacugggucacccaccaga

SEQ ID NO: 5516 - RNA, 21 nt, Artificial Sequence
  Synthetic
gcacugggucacccaccagaa

SEQ ID NO: 5517 - RNA, 21 nt, Artificial Sequence
  Synthetic
cacugggucacccaccagaaa

SEQ ID NO: 5518 - RNA, 21 nt, Artificial Sequence
  Synthetic
acugggucacccaccagaaaa

SEQ ID NO: 5519 - RNA, 21 nt, Artificial Sequence
  Synthetic
cugggucacccaccagaaaag

SEQ ID NO: 5520 - RNA, 21 nt, Artificial Sequence
  Synthetic
ugggucacccaccagaaaagg

SEQ ID NO: 5521 - RNA, 21 nt, Artificial Sequence
  Synthetic
gggucacccaccagaaaaggg

SEQ ID NO: 5522 - RNA, 21 nt, Artificial Sequence
  Synthetic
ggucacccaccagaaaagggc

SEQ ID NO: 5523 - RNA, 21 nt, Artificial Sequence
  Synthetic
gucacccaccagaaaagggcu

SEQ ID NO: 5524 - RNA, 21 nt, Artificial Sequence
  Synthetic
ucacccaccagaaaagggcuu

SEQ ID NO: 5525 - RNA, 21 nt, Artificial Sequence
  Synthetic
cacccaccagaaaagggcuuu

SEQ ID NO: 5526 - RNA, 21 nt, Artificial Sequence
  Synthetic
acccaccagaaaagggcuuuu

SEQ ID NO: 5527 - RNA, 21 nt, Artificial Sequence
  Synthetic
cccaccagaaaagggcuuuug

SEQ ID NO: 5528 - RNA, 21 nt, Artificial Sequence
  Synthetic
ccaccagaaaagggcuuuugg

SEQ ID NO: 5529 - RNA, 21 nt, Artificial Sequence
  Synthetic
caccagaaaagggcuuuugga

SEQ ID NO: 5530 - RNA, 21 nt, Artificial Sequence
  Synthetic
accagaaaagggcuuuuggac

SEQ ID NO: 5531 - RNA, 21 nt, Artificial Sequence
  Synthetic
ccagaaaagggcuuuuggaca

SEQ ID NO: 5532 - RNA, 21 nt, Artificial Sequence
  Synthetic
cagaaaagggcuuuuggacau

SEQ ID NO: 5533 - RNA, 21 nt, Artificial Sequence
  Synthetic
agaaaagggcuuuuggacauu

SEQ ID NO: 5534 - RNA, 21 nt, Artificial Sequence
  Synthetic
gaaaagggcuuuuggacauuu

SEQ ID NO: 5535 - RNA, 21 nt, Artificial Sequence
  Synthetic
aaaagggcuuuuggacauuug

SEQ ID NO: 5536 - RNA, 21 nt, Artificial Sequence
  Synthetic
aaagggcuuuuggacauuugg

SEQ ID NO: 5537 - RNA, 21 nt, Artificial Sequence
  Synthetic
aagggcuuuuggacauuuggg

SEQ ID NO: 5538 - RNA, 21 nt, Artificial Sequence
  Synthetic
agggcuuuuggacauuugggg

SEQ ID NO: 5539 - RNA, 21 nt, Artificial Sequence
  Synthetic
gggcuuuuggacauuuggggu

SEQ ID NO: 5540 - RNA, 21 nt, Artificial Sequence
  Synthetic
ggcuuuuggacauuugggguu

SEQ ID NO: 5541 - RNA, 21 nt, Artificial Sequence
  Synthetic
gcuuuuggacauuugggguuu

SEQ ID NO: 5542 - RNA, 21 nt, Artificial Sequence
  Synthetic
cuuuuggacauuugggguuuc

SEQ ID NO: 5543 - RNA, 21 nt, Artificial Sequence
  Synthetic
uuuuggacauuugggguuucu

SEQ ID NO: 5544 - RNA, 21 nt, Artificial Sequence
  Synthetic
uuuggacauuugggguuucua

SEQ ID NO: 5545 - RNA, 21 nt, Artificial Sequence
  Synthetic
uuggacauuugggguuucuac

SEQ ID NO: 5546 - RNA, 21 nt, Artificial Sequence
  Synthetic
uggacauuugggguuucuacc

SEQ ID NO: 5547 - RNA, 21 nt, Artificial Sequence
  Synthetic
ggacauuugggguuucuaccc

SEQ ID NO: 5548 - RNA, 21 nt, Artificial Sequence
  Synthetic
gacauuugggguuucuaccca

SEQ ID NO: 5549 - RNA, 21 nt, Artificial Sequence
  Synthetic
acauuugggguuucuacccac

SEQ ID NO: 5550 - RNA, 21 nt, Artificial Sequence
  Synthetic
cauuugggguuucuacccaca

SEQ ID NO: 5551 - RNA, 21 nt, Artificial Sequence
  Synthetic
auuugggguuucuacccacac

SEQ ID NO: 5552 - RNA, 21 nt, Artificial Sequence
  Synthetic
uuugggguuucuacccacacu

SEQ ID NO: 5553 - RNA, 21 nt, Artificial Sequence
  Synthetic
uugggguuucuacccacacuu

SEQ ID NO: 5554 - RNA, 21 nt, Artificial Sequence
  Synthetic
ugggguuucuacccacacuuu

SEQ ID NO: 5555 - RNA, 21 nt, Artificial Sequence
  Synthetic
gggguuucuacccacacuuug

SEQ ID NO: 5556 - RNA, 21 nt, Artificial Sequence
  Synthetic
ggguuucuacccacacuuugg

SEQ ID NO: 5557 - RNA, 21 nt, Artificial Sequence
  Synthetic
gguuucuacccacacuuuggu

SEQ ID NO: 5558 - RNA, 21 nt, Artificial Sequence
  Synthetic
guuucuacccacacuuugguu

SEQ ID NO: 5559 - RNA, 21 nt, Artificial Sequence
  Synthetic
uuucuacccacacuuugguuu

SEQ ID NO: 5560 - RNA, 21 nt, Artificial Sequence
  Synthetic
uucuacccacacuuugguuuu

SEQ ID NO: 5561 - RNA, 21 nt, Artificial Sequence
  Synthetic
ucuacccacacuuugguuuuc

SEQ ID NO: 5562 - RNA, 21 nt, Artificial Sequence
  Synthetic
cuacccacacuuugguuuucu

SEQ ID NO: 5563 - RNA, 21 nt, Artificial Sequence
  Synthetic
uacccacacuuugguuuucua

SEQ ID NO: 5564 - RNA, 21 nt, Artificial Sequence
  Synthetic
acccacacuuugguuuucuaa

SEQ ID NO: 5565 - RNA, 21 nt, Artificial Sequence
  Synthetic
cccacacuuugguuuucuaaa

SEQ ID NO: 5566 - RNA, 21 nt, Artificial Sequence
  Synthetic
ccacacuuugguuuucuaaau

SEQ ID NO: 5567 - RNA, 21 nt, Artificial Sequence
  Synthetic
cacacuuugguuuucuaaaug

SEQ ID NO: 5568 - RNA, 21 nt, Artificial Sequence
  Synthetic
acacuuugguuuucuaaauga

SEQ ID NO: 5569 - RNA, 21 nt, Artificial Sequence
  Synthetic
cacuuugguuuucuaaaugag

SEQ ID NO: 5570 - RNA, 21 nt, Artificial Sequence
  Synthetic
acuuugguuuucuaaaugagg

SEQ ID NO: 5571 - RNA, 21 nt, Artificial Sequence
  Synthetic
cuuugguuuucuaaaugaggu

SEQ ID NO: 5572 - RNA, 21 nt, Artificial Sequence
  Synthetic
uuugguuuucuaaaugaggug

SEQ ID NO: 5573 - RNA, 21 nt, Artificial Sequence
  Synthetic
uugguuuucuaaaugaggugg

SEQ ID NO: 5574 - RNA, 21 nt, Artificial Sequence
  Synthetic
ugguuuucuaaaugaggugga

SEQ ID NO: 5575 - RNA, 21 nt, Artificial Sequence
  Synthetic
gguuuucuaaaugagguggac

SEQ ID NO: 5576 - RNA, 21 nt, Artificial Sequence
  Synthetic
guuuucuaaaugagguggacu

SEQ ID NO: 5577 - RNA, 21 nt, Artificial Sequence
  Synthetic
uuuucuaaaugagguggacug

SEQ ID NO: 5578 - RNA, 21 nt, Artificial Sequence
  Synthetic
uuucuaaaugagguggacugg

SEQ ID NO: 5579 - RNA, 21 nt, Artificial Sequence
  Synthetic
uucuaaaugagguggacuggg

SEQ ID NO: 5580 - RNA, 21 nt, Artificial Sequence
  Synthetic
ucuaaaugagguggacuggga

SEQ ID NO: 5581 - RNA, 21 nt, Artificial Sequence
  Synthetic
cuaaaugagguggacugggag

SEQ ID NO: 5582 - RNA, 21 nt, Artificial Sequence
  Synthetic
uaaaugagguggacugggagg

SEQ ID NO: 5583 - RNA, 21 nt, Artificial Sequence
  Synthetic
aaaugagguggacugggaggg

SEQ ID NO: 5584 - RNA, 21 nt, Artificial Sequence
  Synthetic
aaugagguggacugggaggga

SEQ ID NO: 5585 - RNA, 21 nt, Artificial Sequence
  Synthetic
augagguggacugggagggag

SEQ ID NO: 5586 - RNA, 21 nt, Artificial Sequence
  Synthetic
ugagguggacugggagggagg

SEQ ID NO: 5587 - RNA, 21 nt, Artificial Sequence
  Synthetic
gagguggacugggagggaggu

SEQ ID NO: 5588 - RNA, 21 nt, Artificial Sequence
  Synthetic
agguggacugggagggaggua

SEQ ID NO: 5589 - RNA, 21 nt, Artificial Sequence
  Synthetic
gguggacugggagggagguau

SEQ ID NO: 5590 - RNA, 21 nt, Artificial Sequence
  Synthetic
guggacugggagggagguauc

SEQ ID NO: 5591 - RNA, 21 nt, Artificial Sequence
  Synthetic
uggacugggagggagguaucu

SEQ ID NO: 5592 - RNA, 21 nt, Artificial Sequence
  Synthetic
ggacugggagggagguaucuu

SEQ ID NO: 5593 - RNA, 21 nt, Artificial Sequence
  Synthetic
gacugggagggagguaucuuc

SEQ ID NO: 5594 - RNA, 21 nt, Artificial Sequence
  Synthetic
acugggagggagguaucuucu

SEQ ID NO: 5595 - RNA, 21 nt, Artificial Sequence
  Synthetic
cugggagggagguaucuucuu

SEQ ID NO: 5596 - RNA, 21 nt, Artificial Sequence
  Synthetic
ugggagggagguaucuucuuu

SEQ ID NO: 5597 - RNA, 21 nt, Artificial Sequence
  Synthetic
gggagggagguaucuucuuuc

SEQ ID NO: 5598 - RNA, 21 nt, Artificial Sequence
  Synthetic
ggagggagguaucuucuuuca

SEQ ID NO: 5599 - RNA, 21 nt, Artificial Sequence
  Synthetic
gagggagguaucuucuuucag

SEQ ID NO: 5600 - RNA, 21 nt, Artificial Sequence
  Synthetic
agggagguaucuucuuucaga

SEQ ID NO: 5601 - RNA, 21 nt, Artificial Sequence
  Synthetic
gggagguaucuucuuucagau

SEQ ID NO: 5602 - RNA, 21 nt, Artificial Sequence
  Synthetic
ggagguaucuucuuucagaug

SEQ ID NO: 5603 - RNA, 21 nt, Artificial Sequence
  Synthetic
gagguaucuucuuucagauga

SEQ ID NO: 5604 - RNA, 21 nt, Artificial Sequence
  Synthetic
agguaucuucuuucagaugaa

SEQ ID NO: 5605 - RNA, 21 nt, Artificial Sequence
  Synthetic
gguaucuucuuucagaugaaa

SEQ ID NO: 5606 - RNA, 21 nt, Artificial Sequence
  Synthetic
guaucuucuuucagaugaaag

SEQ ID NO: 5607 - RNA, 21 nt, Artificial Sequence
  Synthetic
uaucuucuuucagaugaaagg

SEQ ID NO: 5608 - RNA, 21 nt, Artificial Sequence
  Synthetic
aucuucuuucagaugaaaggg

SEQ ID NO: 5609 - RNA, 21 nt, Artificial Sequence
  Synthetic
ucuucuuucagaugaaaggga

SEQ ID NO: 5610 - RNA, 21 nt, Artificial Sequence
  Synthetic
cuucuuucagaugaaagggaa

SEQ ID NO: 5611 - RNA, 21 nt, Artificial Sequence
  Synthetic
uucuuucagaugaaagggaag

SEQ ID NO: 5612 - RNA, 21 nt, Artificial Sequence
  Synthetic
ucuuucagaugaaagggaagg

SEQ ID NO: 5613 - RNA, 21 nt, Artificial Sequence
  Synthetic
cuuucagaugaaagggaaggg

SEQ ID NO: 5614 - RNA, 21 nt, Artificial Sequence
  Synthetic
uuucagaugaaagggaagggg

SEQ ID NO: 5615 - RNA, 21 nt, Artificial Sequence
  Synthetic
uucagaugaaagggaaggggc

SEQ ID NO: 5616 - RNA, 21 nt, Artificial Sequence
  Synthetic
ucagaugaaagggaaggggcg

SEQ ID NO: 5617 - RNA, 21 nt, Artificial Sequence
  Synthetic
cagaugaaagggaaggggcga

SEQ ID NO: 5618 - RNA, 21 nt, Artificial Sequence
  Synthetic
agaugaaagggaaggggcgag

SEQ ID NO: 5619 - RNA, 21 nt, Artificial Sequence
  Synthetic
gaugaaagggaaggggcgaga

SEQ ID NO: 5620 - RNA, 21 nt, Artificial Sequence
  Synthetic
augaaagggaaggggcgagau

SEQ ID NO: 5621 - RNA, 21 nt, Artificial Sequence
  Synthetic
ugaaagggaaggggcgagaug

SEQ ID NO: 5622 - RNA, 21 nt, Artificial Sequence
  Synthetic
gaaagggaaggggcgagaugg

SEQ ID NO: 5623 - RNA, 21 nt, Artificial Sequence
  Synthetic
aaagggaaggggcgagaugga

SEQ ID NO: 5624 - RNA, 21 nt, Artificial Sequence
  Synthetic
aagggaaggggcgagauggag

SEQ ID NO: 5625 - RNA, 21 nt, Artificial Sequence
  Synthetic
agggaaggggcgagauggagu

SEQ ID NO: 5626 - RNA, 21 nt, Artificial Sequence
  Synthetic
gggaaggggcgagauggaguu

SEQ ID NO: 5627 - RNA, 21 nt, Artificial Sequence
  Synthetic
ggaaggggcgagauggaguua

SEQ ID NO: 5628 - RNA, 21 nt, Artificial Sequence
  Synthetic
gaaggggcgagauggaguuau

SEQ ID NO: 5629 - RNA, 21 nt, Artificial Sequence
  Synthetic
aaggggcgagauggaguuauc

SEQ ID NO: 5630 - RNA, 21 nt, Artificial Sequence
  Synthetic
aggggcgagauggaguuaucu

SEQ ID NO: 5631 - RNA, 21 nt, Artificial Sequence
  Synthetic
ggggcgagauggaguuaucuu

SEQ ID NO: 5632 - RNA, 21 nt, Artificial Sequence
  Synthetic
gggcgagauggaguuaucuua

SEQ ID NO: 5633 - RNA, 21 nt, Artificial Sequence
  Synthetic
ggcgagauggaguuaucuuau

SEQ ID NO: 5634 - RNA, 21 nt, Artificial Sequence
  Synthetic
gcgagauggaguuaucuuauu

SEQ ID NO: 5635 - RNA, 21 nt, Artificial Sequence
  Synthetic
cgagauggaguuaucuuauuu

SEQ ID NO: 5636 - RNA, 21 nt, Artificial Sequence
  Synthetic
gagauggaguuaucuuauuuc

SEQ ID NO: 5637 - RNA, 21 nt, Artificial Sequence
  Synthetic
agauggaguuaucuuauuucu

SEQ ID NO: 5638 - RNA, 21 nt, Artificial Sequence
  Synthetic
gauggaguuaucuuauuucug

SEQ ID NO: 5639 - RNA, 21 nt, Artificial Sequence
  Synthetic
auggaguuaucuuauuucugg

SEQ ID NO: 5640 - RNA, 21 nt, Artificial Sequence
  Synthetic
uggaguuaucuuauuucuggg

SEQ ID NO: 5641 - RNA, 21 nt, Artificial Sequence
  Synthetic
ggaguuaucuuauuucugggu

SEQ ID NO: 5642 - RNA, 21 nt, Artificial Sequence
  Synthetic
gaguuaucuuauuucugggua

SEQ ID NO: 5643 - RNA, 21 nt, Artificial Sequence
  Synthetic
aguuaucuuauuucuggguaa

SEQ ID NO: 5644 - RNA, 21 nt, Artificial Sequence
  Synthetic
guuaucuuauuucuggguaaa

SEQ ID NO: 5645 - RNA, 21 nt, Artificial Sequence
  Synthetic
uuaucuuauuucuggguaaaa

SEQ ID NO: 5646 - RNA, 21 nt, Artificial Sequence
  Synthetic
uaucuuauuucuggguaaaac

SEQ ID NO: 5647 - RNA, 21 nt, Artificial Sequence
  Synthetic
aucuuauuucuggguaaaaca

SEQ ID NO: 5648 - RNA, 21 nt, Artificial Sequence
  Synthetic
ucuuauuucuggguaaaacaa

SEQ ID NO: 5649 - RNA, 21 nt, Artificial Sequence
  Synthetic
cuuauuucuggguaaaacaaa

SEQ ID NO: 5650 - RNA, 21 nt, Artificial Sequence
  Synthetic
uuauuucuggguaaaacaaaa

SEQ ID NO: 5651 - RNA, 21 nt, Artificial Sequence
  Synthetic
uauuucuggguaaaacaaaac

SEQ ID NO: 5652 - RNA, 21 nt, Artificial Sequence
  Synthetic
auuucuggguaaaacaaaaca

SEQ ID NO: 5653 - RNA, 21 nt, Artificial Sequence
  Synthetic
uuucuggguaaaacaaaacaa

SEQ ID NO: 5654 - RNA, 21 nt, Artificial Sequence
  Synthetic
uucuggguaaaacaaaacaaa

SEQ ID NO: 5655 - RNA, 21 nt, Artificial Sequence
  Synthetic
ucuggguaaaacaaaacaaac

SEQ ID NO: 5656 - RNA, 21 nt, Artificial Sequence
  Synthetic
cuggguaaaacaaaacaaaca

SEQ ID NO: 5657 - RNA, 21 nt, Artificial Sequence
  Synthetic
uggguaaaacaaaacaaacaa

SEQ ID NO: 5658 - RNA, 21 nt, Artificial Sequence
  Synthetic
ggguaaaacaaaacaaacaaa

SEQ ID NO: 5659 - RNA, 21 nt, Artificial Sequence
  Synthetic
gguaaaacaaaacaaacaaac

SEQ ID NO: 5660 - RNA, 21 nt, Artificial Sequence
  Synthetic
guaaaacaaaacaaacaaaca

SEQ ID NO: 5661 - RNA, 21 nt, Artificial Sequence
  Synthetic
uaaaacaaaacaaacaaacaa

SEQ ID NO: 5662 - RNA, 21 nt, Artificial Sequence
  Synthetic
aaaacaaaacaaacaaacaaa

SEQ ID NO: 5663 - RNA, 21 nt, Artificial Sequence
  Synthetic
aaacaaaacaaacaaacaaaa

SEQ ID NO: 5664 - RNA, 21 nt, Artificial Sequence
  Synthetic
aacaaaacaaacaaacaaaaa

SEQ ID NO: 5665 - RNA, 21 nt, Artificial Sequence
  Synthetic
acaaaacaaacaaacaaaaaa

SEQ ID NO: 5666 - RNA, 21 nt, Artificial Sequence
  Synthetic
caaaacaaacaaacaaaaaac

SEQ ID NO: 5667 - RNA, 21 nt, Artificial Sequence
  Synthetic
aaaacaaacaaacaaaaaaca

SEQ ID NO: 5668 - RNA, 21 nt, Artificial Sequence
  Synthetic
aaacaaacaaacaaaaaacaa

SEQ ID NO: 5669 - RNA, 21 nt, Artificial Sequence
  Synthetic
aacaaacaaacaaaaaacaaa

SEQ ID NO: 5670 - RNA, 21 nt, Artificial Sequence
  Synthetic
acaaacaaacaaaaaacaaaa

SEQ ID NO: 5671 - RNA, 21 nt, Artificial Sequence
  Synthetic
caaacaaacaaaaaacaaaac

SEQ ID NO: 5672 - RNA, 21 nt, Artificial Sequence
  Synthetic
aaacaaacaaaaaacaaaaca

SEQ ID NO: 5673 - RNA, 21 nt, Artificial Sequence
  Synthetic
aacaaacaaaaaacaaaacaa

SEQ ID NO: 5674 - RNA, 21 nt, Artificial Sequence
  Synthetic
acaaacaaaaaacaaaacaaa

SEQ ID NO: 5675 - RNA, 21 nt, Artificial Sequence
  Synthetic
caaacaaaaaacaaaacaaaa

SEQ ID NO: 5676 - RNA, 21 nt, Artificial Sequence
  Synthetic
aaacaaaaaacaaaacaaaaa

SEQ ID NO: 5677 - RNA, 21 nt, Artificial Sequence
  Synthetic
aacaaaaaacaaaacaaaaau

SEQ ID NO: 5678 - RNA, 21 nt, Artificial Sequence
  Synthetic
acaaaaaacaaaacaaaaaua

SEQ ID NO: 5679 - RNA, 21 nt, Artificial Sequence
  Synthetic
caaaaaacaaaacaaaaauac

SEQ ID NO: 5680 - RNA, 21 nt, Artificial Sequence
  Synthetic
aaaaaacaaaacaaaaauacu

SEQ ID NO: 5681 - RNA, 21 nt, Artificial Sequence
  Synthetic
aaaaacaaaacaaaaauacug

SEQ ID NO: 5682 - RNA, 21 nt, Artificial Sequence
  Synthetic
aaaacaaaacaaaaauacuga

SEQ ID NO: 5683 - RNA, 21 nt, Artificial Sequence
  Synthetic
aaacaaaacaaaaauacugag

SEQ ID NO: 5684 - RNA, 21 nt, Artificial Sequence
  Synthetic
aacaaaacaaaaauacugagc

SEQ ID NO: 5685 - RNA, 21 nt, Artificial Sequence
  Synthetic
acaaaacaaaaauacugagcu

SEQ ID NO: 5686 - RNA, 21 nt, Artificial Sequence
  Synthetic
caaaacaaaaauacugagcug

SEQ ID NO: 5687 - RNA, 21 nt, Artificial Sequence
  Synthetic
aaaacaaaaauacugagcugg

SEQ ID NO: 5688 - RNA, 21 nt, Artificial Sequence
  Synthetic
aaacaaaaauacugagcugga

SEQ ID NO: 5689 - RNA, 21 nt, Artificial Sequence
  Synthetic
aacaaaaauacugagcuggau

SEQ ID NO: 5690 - RNA, 21 nt, Artificial Sequence
  Synthetic
acaaaaauacugagcuggauu

SEQ ID NO: 5691 - RNA, 21 nt, Artificial Sequence
  Synthetic
caaaaauacugagcuggauua

SEQ ID NO: 5692 - RNA, 21 nt, Artificial Sequence
  Synthetic
aaaaauacugagcuggauuau

SEQ ID NO: 5693 - RNA, 21 nt, Artificial Sequence
  Synthetic
aaaauacugagcuggauuaua

SEQ ID NO: 5694 - RNA, 21 nt, Artificial Sequence
  Synthetic
aaauacugagcuggauuauac

SEQ ID NO: 5695 - RNA, 21 nt, Artificial Sequence
  Synthetic
aauacugagcuggauuauacu

SEQ ID NO: 5696 - RNA, 21 nt, Artificial Sequence
  Synthetic
auacugagcuggauuauacug

SEQ ID NO: 5697 - RNA, 21 nt, Artificial Sequence
  Synthetic
uacugagcuggauuauacugu

SEQ ID NO: 5698 - RNA, 21 nt, Artificial Sequence
  Synthetic
acugagcuggauuauacuguu

SEQ ID NO: 5699 - RNA, 21 nt, Artificial Sequence
  Synthetic
cugagcuggauuauacuguua

SEQ ID NO: 5700 - RNA, 21 nt, Artificial Sequence
  Synthetic
ugagcuggauuauacuguuag

SEQ ID NO: 5701 - RNA, 21 nt, Artificial Sequence
  Synthetic
gagcuggauuauacuguuagg

SEQ ID NO: 5702 - RNA, 21 nt, Artificial Sequence
  Synthetic
agcuggauuauacuguuagga

SEQ ID NO: 5703 - RNA, 21 nt, Artificial Sequence
  Synthetic
gcuggauuauacuguuaggau

SEQ ID NO: 5704 - RNA, 21 nt, Artificial Sequence
  Synthetic
cuggauuauacuguuaggaug

SEQ ID NO: 5705 - RNA, 21 nt, Artificial Sequence
  Synthetic
uggauuauacuguuaggaugu

SEQ ID NO: 5706 - RNA, 21 nt, Artificial Sequence
  Synthetic
ggauuauacuguuaggaugua

SEQ ID NO: 5707 - RNA, 21 nt, Artificial Sequence
  Synthetic
gauuauacuguuaggauguaa

SEQ ID NO: 5708 - RNA, 21 nt, Artificial Sequence
  Synthetic
auuauacuguuaggauguaaa

SEQ ID NO: 5709 - RNA, 21 nt, Artificial Sequence
  Synthetic
uuauacuguuaggauguaaag

SEQ ID NO: 5710 - RNA, 21 nt, Artificial Sequence
  Synthetic
uauacuguuaggauguaaagu

SEQ ID NO: 5711 - RNA, 21 nt, Artificial Sequence
  Synthetic
auacuguuaggauguaaaguu

SEQ ID NO: 5712 - RNA, 21 nt, Artificial Sequence
  Synthetic
uacuguuaggauguaaaguuc

SEQ ID NO: 5713 - RNA, 21 nt, Artificial Sequence
  Synthetic
acuguuaggauguaaaguucc

SEQ ID NO: 5714 - RNA, 21 nt, Artificial Sequence
  Synthetic
cuguuaggauguaaaguuccu

SEQ ID NO: 5715 - RNA, 21 nt, Artificial Sequence
  Synthetic
uguuaggauguaaaguuccuu

SEQ ID NO: 5716 - RNA, 21 nt, Artificial Sequence
  Synthetic
guuaggauguaaaguuccuua

SEQ ID NO: 5717 - RNA, 21 nt, Artificial Sequence
  Synthetic
uuaggauguaaaguuccuuag

SEQ ID NO: 5718 - RNA, 21 nt, Artificial Sequence
  Synthetic
uaggauguaaaguuccuuagc

SEQ ID NO: 5719 - RNA, 21 nt, Artificial Sequence
  Synthetic
aggauguaaaguuccuuagcu

SEQ ID NO: 5720 - RNA, 21 nt, Artificial Sequence
  Synthetic
ggauguaaaguuccuuagcua

SEQ ID NO: 5721 - RNA, 21 nt, Artificial Sequence
  Synthetic
gauguaaaguuccuuagcuac

SEQ ID NO: 5722 - RNA, 21 nt, Artificial Sequence
  Synthetic
auguaaaguuccuuagcuacu

SEQ ID NO: 5723 - RNA, 21 nt, Artificial Sequence
  Synthetic
uguaaaguuccuuagcuacuu

SEQ ID NO: 5724 - RNA, 21 nt, Artificial Sequence
  Synthetic
guaaaguuccuuagcuacuuc

SEQ ID NO: 5725 - RNA, 21 nt, Artificial Sequence
  Synthetic
uaaaguuccuuagcuacuucu

SEQ ID NO: 5726 - RNA, 21 nt, Artificial Sequence
  Synthetic
aaaguuccuuagcuacuucuu

SEQ ID NO: 5727 - RNA, 21 nt, Artificial Sequence
  Synthetic
aaguuccuuagcuacuucuuu

SEQ ID NO: 5728 - RNA, 21 nt, Artificial Sequence
  Synthetic
aguuccuuagcuacuucuuua

SEQ ID NO: 5729 - RNA, 21 nt, Artificial Sequence
  Synthetic
guuccuuagcuacuucuuuaa

SEQ ID NO: 5730 - RNA, 21 nt, Artificial Sequence
  Synthetic
uuccuuagcuacuucuuuaag

SEQ ID NO: 5731 - RNA, 21 nt, Artificial Sequence
  Synthetic
uccuuagcuacuucuuuaagg

SEQ ID NO: 5732 - RNA, 21 nt, Artificial Sequence
  Synthetic
ccuuagcuacuucuuuaaggc

SEQ ID NO: 5733 - RNA, 21 nt, Artificial Sequence
  Synthetic
cuuagcuacuucuuuaaggcu

SEQ ID NO: 5734 - RNA, 21 nt, Artificial Sequence
  Synthetic
uuagcuacuucuuuaaggcuc

SEQ ID NO: 5735 - RNA, 21 nt, Artificial Sequence
  Synthetic
uagcuacuucuuuaaggcuca

SEQ ID NO: 5736 - RNA, 21 nt, Artificial Sequence
  Synthetic
agcuacuucuuuaaggcucaa

SEQ ID NO: 5737 - RNA, 21 nt, Artificial Sequence
  Synthetic
gcuacuucuuuaaggcucaac

SEQ ID NO: 5738 - RNA, 21 nt, Artificial Sequence
  Synthetic
cuacuucuuuaaggcucaaca

SEQ ID NO: 5739 - RNA, 21 nt, Artificial Sequence
  Synthetic
uacuucuuuaaggcucaacac

SEQ ID NO: 5740 - RNA, 21 nt, Artificial Sequence
  Synthetic
acuucuuuaaggcucaacacg

SEQ ID NO: 5741 - RNA, 21 nt, Artificial Sequence
  Synthetic
cuucuuuaaggcucaacacga

SEQ ID NO: 5742 - RNA, 21 nt, Artificial Sequence
  Synthetic
uucuuuaaggcucaacacgag

SEQ ID NO: 5743 - RNA, 21 nt, Artificial Sequence
  Synthetic
ucuuuaaggcucaacacgagg

SEQ ID NO: 5744 - RNA, 21 nt, Artificial Sequence
  Synthetic
cuuuaaggcucaacacgaggc

SEQ ID NO: 5745 - RNA, 21 nt, Artificial Sequence
  Synthetic
uuuaaggcucaacacgaggcu

SEQ ID NO: 5746 - RNA, 21 nt, Artificial Sequence
  Synthetic
uuaaggcucaacacgaggcug

SEQ ID NO: 5747 - RNA, 21 nt, Artificial Sequence
  Synthetic
uaaggcucaacacgaggcuga

SEQ ID NO: 5748 - RNA, 21 nt, Artificial Sequence
  Synthetic
aaggcucaacacgaggcugau

SEQ ID NO: 5749 - RNA, 21 nt, Artificial Sequence
  Synthetic
aggcucaacacgaggcugaug

SEQ ID NO: 5750 - RNA, 21 nt, Artificial Sequence
  Synthetic
ggcucaacacgaggcugaugg

SEQ ID NO: 5751 - RNA, 21 nt, Artificial Sequence
  Synthetic
gcucaacacgaggcugauggu

SEQ ID NO: 5752 - RNA, 21 nt, Artificial Sequence
  Synthetic
cucaacacgaggcugaugguc

SEQ ID NO: 5753 - RNA, 21 nt, Artificial Sequence
  Synthetic
ucaacacgaggcugaugguca

SEQ ID NO: 5754 - RNA, 21 nt, Artificial Sequence
  Synthetic
caacacgaggcugauggucaa

SEQ ID NO: 5755 - RNA, 21 nt, Artificial Sequence
  Synthetic
aacacgaggcugauggucaac

SEQ ID NO: 5756 - RNA, 21 nt, Artificial Sequence
  Synthetic
acacgaggcugauggucaaca

SEQ ID NO: 5757 - RNA, 21 nt, Artificial Sequence
  Synthetic
cacgaggcugauggucaacau

SEQ ID NO: 5758 - RNA, 21 nt, Artificial Sequence
  Synthetic
acgaggcugauggucaacaua

SEQ ID NO: 5759 - RNA, 21 nt, Artificial Sequence
  Synthetic
cgaggcugauggucaacauaa

SEQ ID NO: 5760 - RNA, 21 nt, Artificial Sequence
  Synthetic
gaggcugauggucaacauaaa

SEQ ID NO: 5761 - RNA, 21 nt, Artificial Sequence
  Synthetic
aggcugauggucaacauaaaa

SEQ ID NO: 5762 - RNA, 21 nt, Artificial Sequence
  Synthetic
ggcugauggucaacauaaaaa

SEQ ID NO: 5763 - RNA, 21 nt, Artificial Sequence
  Synthetic
gcugauggucaacauaaaaag

SEQ ID NO: 5764 - RNA, 21 nt, Artificial Sequence
  Synthetic
cugauggucaacauaaaaagc

SEQ ID NO: 5765 - RNA, 21 nt, Artificial Sequence
  Synthetic
ugauggucaacauaaaaagca

SEQ ID NO: 5766 - RNA, 21 nt, Artificial Sequence
  Synthetic
gauggucaacauaaaaagcaa

SEQ ID NO: 5767 - RNA, 21 nt, Artificial Sequence
  Synthetic
auggucaacauaaaaagcaaa

SEQ ID NO: 5768 - RNA, 21 nt, Artificial Sequence
  Synthetic
uggucaacauaaaaagcaaac

SEQ ID NO: 5769 - RNA, 21 nt, Artificial Sequence
  Synthetic
ggucaacauaaaaagcaaaca

SEQ ID NO: 5770 - RNA, 21 nt, Artificial Sequence
  Synthetic
gucaacauaaaaagcaaacaa

SEQ ID NO: 5771 - RNA, 21 nt, Artificial Sequence
  Synthetic
ucaacauaaaaagcaaacaau

SEQ ID NO: 5772 - RNA, 21 nt, Artificial Sequence
  Synthetic
caacauaaaaagcaaacaaua

SEQ ID NO: 5773 - RNA, 21 nt, Artificial Sequence
  Synthetic
aacauaaaaagcaaacaauac

SEQ ID NO: 5774 - RNA, 21 nt, Artificial Sequence
  Synthetic
acauaaaaagcaaacaauacu

SEQ ID NO: 5775 - RNA, 21 nt, Artificial Sequence
  Synthetic
cauaaaaagcaaacaauacua

SEQ ID NO: 5776 - RNA, 21 nt, Artificial Sequence
  Synthetic
auaaaaagcaaacaauacuau

SEQ ID NO: 5777 - RNA, 21 nt, Artificial Sequence
  Synthetic
uaaaaagcaaacaauacuaug

SEQ ID NO: 5778 - RNA, 21 nt, Artificial Sequence
  Synthetic
aaaaagcaaacaauacuaugu

SEQ ID NO: 5779 - RNA, 21 nt, Artificial Sequence
  Synthetic
aaaagcaaacaauacuaugua

SEQ ID NO: 5780 - RNA, 21 nt, Artificial Sequence
  Synthetic
aaagcaaacaauacuauguac

SEQ ID NO: 5781 - RNA, 21 nt, Artificial Sequence
  Synthetic
aagcaaacaauacuauguaca

SEQ ID NO: 5782 - RNA, 21 nt, Artificial Sequence
  Synthetic
agcaaacaauacuauguacau

SEQ ID NO: 5783 - RNA, 21 nt, Artificial Sequence
  Synthetic
gcaaacaauacuauguacaua

SEQ ID NO: 5784 - RNA, 21 nt, Artificial Sequence
  Synthetic
caaacaauacuauguacauau

SEQ ID NO: 5785 - RNA, 21 nt, Artificial Sequence
  Synthetic
aaacaauacuauguacauaua

SEQ ID NO: 5786 - RNA, 21 nt, Artificial Sequence
  Synthetic
aacaauacuauguacauauau

SEQ ID NO: 5787 - RNA, 21 nt, Artificial Sequence
  Synthetic
acaauacuauguacauauaug

SEQ ID NO: 5788 - RNA, 21 nt, Artificial Sequence
  Synthetic
caauacuauguacauauaugu

SEQ ID NO: 5789 - RNA, 21 nt, Artificial Sequence
  Synthetic
aauacuauguacauauaugua

SEQ ID NO: 5790 - RNA, 21 nt, Artificial Sequence
  Synthetic
auacuauguacauauauguaa

SEQ ID NO: 5791 - RNA, 21 nt, Artificial Sequence
  Synthetic
uacuauguacauauauguaaa

SEQ ID NO: 5792 - RNA, 21 nt, Artificial Sequence
  Synthetic
acuauguacauauauguaaaa

SEQ ID NO: 5793 - RNA, 21 nt, Artificial Sequence
  Synthetic
cuauguacauauauguaaaaa

SEQ ID NO: 5794 - RNA, 21 nt, Artificial Sequence
  Synthetic
uauguacauauauguaaaaag

SEQ ID NO: 5795 - RNA, 21 nt, Artificial Sequence
  Synthetic
auguacauauauguaaaaagu

SEQ ID NO: 5796 - RNA, 21 nt, Artificial Sequence
  Synthetic
uguacauauauguaaaaagug

SEQ ID NO: 5797 - RNA, 21 nt, Artificial Sequence
  Synthetic
guacauauauguaaaaagugu

SEQ ID NO: 5798 - RNA, 21 nt, Artificial Sequence
  Synthetic
uacauauauguaaaaaguguu

SEQ ID NO: 5799 - RNA, 21 nt, Artificial Sequence
  Synthetic
acauauauguaaaaaguguua

SEQ ID NO: 5800 - RNA, 21 nt, Artificial Sequence
  Synthetic
cauauauguaaaaaguguuau

SEQ ID NO: 5801 - RNA, 21 nt, Artificial Sequence
  Synthetic
auauauguaaaaaguguuaua

SEQ ID NO: 5802 - RNA, 21 nt, Artificial Sequence
  Synthetic
uauauguaaaaaguguuauaa

SEQ ID NO: 5803 - RNA, 21 nt, Artificial Sequence
  Synthetic
auauguaaaaaguguuauaaa

SEQ ID NO: 5804 - RNA, 21 nt, Artificial Sequence
  Synthetic
uauguaaaaaguguuauaaau

SEQ ID NO: 5805 - RNA, 21 nt, Artificial Sequence
  Synthetic
auguaaaaaguguuauaaaua

SEQ ID NO: 5806 - RNA, 21 nt, Artificial Sequence
  Synthetic
uguaaaaaguguuauaaauag

SEQ ID NO: 5807 - RNA, 21 nt, Artificial Sequence
  Synthetic
guaaaaaguguuauaaauagg

SEQ ID NO: 5808 - RNA, 21 nt, Artificial Sequence
  Synthetic
uaaaaaguguuauaaauaggu

SEQ ID NO: 5809 - RNA, 21 nt, Artificial Sequence
  Synthetic
aaaaaguguuauaaauagguu

SEQ ID NO: 5810 - RNA, 21 nt, Artificial Sequence
  Synthetic
aaaaguguuauaaauagguuu

SEQ ID NO: 5811 - RNA, 21 nt, Artificial Sequence
  Synthetic
aaaguguuauaaauagguuuu

SEQ ID NO: 5812 - RNA, 21 nt, Artificial Sequence
  Synthetic
aaguguuauaaauagguuuua

SEQ ID NO: 5813 - RNA, 21 nt, Artificial Sequence
  Synthetic
aguguuauaaauagguuuuau

SEQ ID NO: 5814 - RNA, 21 nt, Artificial Sequence
  Synthetic
guguuauaaauagguuuuaua

SEQ ID NO: 5815 - RNA, 21 nt, Artificial Sequence
  Synthetic
uguuauaaauagguuuuauaa

SEQ ID NO: 5816 - RNA, 21 nt, Artificial Sequence
  Synthetic
guuauaaauagguuuuauaaa

SEQ ID NO: 5817 - RNA, 21 nt, Artificial Sequence
  Synthetic
uuauaaauagguuuuauaaac

SEQ ID NO: 5818 - RNA, 21 nt, Artificial Sequence
  Synthetic
uauaaauagguuuuauaaacc

SEQ ID NO: 5819 - RNA, 21 nt, Artificial Sequence
  Synthetic
auaaauagguuuuauaaaccg

SEQ ID NO: 5820 - RNA, 21 nt, Artificial Sequence
  Synthetic
uaaauagguuuuauaaaccgg

SEQ ID NO: 5821 - RNA, 21 nt, Artificial Sequence
  Synthetic
aaauagguuuuauaaaccgga

SEQ ID NO: 5822 - RNA, 21 nt, Artificial Sequence
  Synthetic
aauagguuuuauaaaccggag

SEQ ID NO: 5823 - RNA, 21 nt, Artificial Sequence
  Synthetic
auagguuuuauaaaccggaga

SEQ ID NO: 5824 - RNA, 21 nt, Artificial Sequence
  Synthetic
uagguuuuauaaaccggagau

SEQ ID NO: 5825 - RNA, 21 nt, Artificial Sequence
  Synthetic
agguuuuauaaaccggagaua

SEQ ID NO: 5826 - RNA, 21 nt, Artificial Sequence
  Synthetic
gguuuuauaaaccggagauau

SEQ ID NO: 5827 - RNA, 21 nt, Artificial Sequence
  Synthetic
guuuuauaaaccggagauauu

SEQ ID NO: 5828 - RNA, 21 nt, Artificial Sequence
  Synthetic
uuuuauaaaccggagauauua

SEQ ID NO: 5829 - RNA, 21 nt, Artificial Sequence
  Synthetic
uuuauaaaccggagauauuau

SEQ ID NO: 5830 - RNA, 21 nt, Artificial Sequence
  Synthetic
uuauaaaccggagauauuaua

SEQ ID NO: 5831 - RNA, 21 nt, Artificial Sequence
  Synthetic
uauaaaccggagauauuauau

SEQ ID NO: 5832 - RNA, 21 nt, Artificial Sequence
  Synthetic
auaaaccggagauauuauaua

SEQ ID NO: 5833 - RNA, 21 nt, Artificial Sequence
  Synthetic
uaaaccggagauauuauauac

SEQ ID NO: 5834 - RNA, 21 nt, Artificial Sequence
  Synthetic
aaaccggagauauuauauaca

SEQ ID NO: 5835 - RNA, 21 nt, Artificial Sequence
  Synthetic
aaccggagauauuauauacau

SEQ ID NO: 5836 - RNA, 21 nt, Artificial Sequence
  Synthetic
accggagauauuauauacauc

SEQ ID NO: 5837 - RNA, 21 nt, Artificial Sequence
  Synthetic
ccggagauauuauauacaucu

SEQ ID NO: 5838 - RNA, 21 nt, Artificial Sequence
  Synthetic
cggagauauuauauacaucuu

SEQ ID NO: 5839 - RNA, 21 nt, Artificial Sequence
  Synthetic
ggagauauuauauacaucuuc

SEQ ID NO: 5840 - RNA, 21 nt, Artificial Sequence
  Synthetic
gagauauuauauacaucuuca

SEQ ID NO: 5841 - RNA, 21 nt, Artificial Sequence
  Synthetic
agauauuauauacaucuucaa

SEQ ID NO: 5842 - RNA, 21 nt, Artificial Sequence
  Synthetic
gauauuauauacaucuucaau

SEQ ID NO: 5843 - RNA, 21 nt, Artificial Sequence
  Synthetic
auauuauauacaucuucaauc

SEQ ID NO: 5844 - RNA, 21 nt, Artificial Sequence
  Synthetic
uauuauauacaucuucaauca

SEQ ID NO: 5845 - RNA, 21 nt, Artificial Sequence
  Synthetic
auuauauacaucuucaaucaa

SEQ ID NO: 5846 - RNA, 21 nt, Artificial Sequence
  Synthetic
uuauauacaucuucaaucaac

SEQ ID NO: 5847 - RNA, 21 nt, Artificial Sequence
  Synthetic
uauauacaucuucaaucaaca

SEQ ID NO: 5848 - RNA, 21 nt, Artificial Sequence
  Synthetic
auauacaucuucaaucaacag

SEQ ID NO: 5849 - RNA, 21 nt, Artificial Sequence
  Synthetic
uauacaucuucaaucaacagc

SEQ ID NO: 5850 - RNA, 21 nt, Artificial Sequence
  Synthetic
auacaucuucaaucaacagca

SEQ ID NO: 5851 - RNA, 21 nt, Artificial Sequence
  Synthetic
uacaucuucaaucaacagcaa

SEQ ID NO: 5852 - RNA, 21 nt, Artificial Sequence
  Synthetic
acaucuucaaucaacagcaac

SEQ ID NO: 5853 - RNA, 21 nt, Artificial Sequence
  Synthetic
caucuucaaucaacagcaacc

SEQ ID NO: 5854 - RNA, 21 nt, Artificial Sequence
  Synthetic
aucuucaaucaacagcaaccc

SEQ ID NO: 5855 - RNA, 21 nt, Artificial Sequence
  Synthetic
ucuucaaucaacagcaacccc

SEQ ID NO: 5856 - RNA, 21 nt, Artificial Sequence
  Synthetic
cuucaaucaacagcaaccccc

SEQ ID NO: 5857 - RNA, 21 nt, Artificial Sequence
  Synthetic
uucaaucaacagcaaccccca

SEQ ID NO: 5858 - RNA, 21 nt, Artificial Sequence
  Synthetic
ucaaucaacagcaacccccac

SEQ ID NO: 5859 - RNA, 21 nt, Artificial Sequence
  Synthetic
caaucaacagcaacccccacc

SEQ ID NO: 5860 - RNA, 21 nt, Artificial Sequence
  Synthetic
aaucaacagcaacccccaccu

SEQ ID NO: 5861 - RNA, 21 nt, Artificial Sequence
  Synthetic
aucaacagcaacccccaccuc

SEQ ID NO: 5862 - RNA, 21 nt, Artificial Sequence
  Synthetic
ucaacagcaacccccaccucc

SEQ ID NO: 5863 - RNA, 21 nt, Artificial Sequence
  Synthetic
caacagcaacccccaccucca

SEQ ID NO: 5864 - RNA, 21 nt, Artificial Sequence
  Synthetic
aacagcaacccccaccuccac

SEQ ID NO: 5865 - RNA, 21 nt, Artificial Sequence
  Synthetic
acagcaacccccaccuccacu

SEQ ID NO: 5866 - RNA, 21 nt, Artificial Sequence
  Synthetic
cagcaacccccaccuccacug

SEQ ID NO: 5867 - RNA, 21 nt, Artificial Sequence
  Synthetic
agcaacccccaccuccacugc

SEQ ID NO: 5868 - RNA, 21 nt, Artificial Sequence
  Synthetic
gcaacccccaccuccacugcu

SEQ ID NO: 5869 - RNA, 21 nt, Artificial Sequence
  Synthetic
caacccccaccuccacugcuu

SEQ ID NO: 5870 - RNA, 21 nt, Artificial Sequence
  Synthetic
aacccccaccuccacugcuuu

SEQ ID NO: 5871 - RNA, 21 nt, Artificial Sequence
  Synthetic
acccccaccuccacugcuuuc

SEQ ID NO: 5872 - RNA, 21 nt, Artificial Sequence
  Synthetic
cccccaccuccacugcuuucu

SEQ ID NO: 5873 - RNA, 21 nt, Artificial Sequence
  Synthetic
ccccaccuccacugcuuucug

SEQ ID NO: 5874 - RNA, 21 nt, Artificial Sequence
  Synthetic
cccaccuccacugcuuucugu

SEQ ID NO: 5875 - RNA, 21 nt, Artificial Sequence
  Synthetic
ccaccuccacugcuuucuguu

SEQ ID NO: 5876 - RNA, 21 nt, Artificial Sequence
  Synthetic
caccuccacugcuuucuguuu

SEQ ID NO: 5877 - RNA, 21 nt, Artificial Sequence
  Synthetic
accuccacugcuuucuguuug

SEQ ID NO: 5878 - RNA, 21 nt, Artificial Sequence
  Synthetic
ccuccacugcuuucuguuugg

SEQ ID NO: 5879 - RNA, 21 nt, Artificial Sequence
  Synthetic
cuccacugcuuucuguuuggu

SEQ ID NO: 5880 - RNA, 21 nt, Artificial Sequence
  Synthetic
uccacugcuuucuguuugguu

SEQ ID NO: 5881 - RNA, 21 nt, Artificial Sequence
  Synthetic
ccacugcuuucuguuugguuu

SEQ ID NO: 5882 - RNA, 21 nt, Artificial Sequence
  Synthetic
cacugcuuucuguuugguuug

SEQ ID NO: 5883 - RNA, 21 nt, Artificial Sequence
  Synthetic
acugcuuucuguuugguuugg

SEQ ID NO: 5884 - RNA, 21 nt, Artificial Sequence
  Synthetic
cugcuuucuguuugguuuggu

SEQ ID NO: 5885 - RNA, 21 nt, Artificial Sequence
  Synthetic
ugcuuucuguuugguuugguu

SEQ ID NO: 5886 - RNA, 21 nt, Artificial Sequence
  Synthetic
gcuuucuguuugguuugguuu

SEQ ID NO: 5887 - RNA, 21 nt, Artificial Sequence
  Synthetic
cuuucuguuugguuugguuug

SEQ ID NO: 5888 - RNA, 21 nt, Artificial Sequence
  Synthetic
uuucuguuugguuugguuuga

SEQ ID NO: 5889 - RNA, 21 nt, Artificial Sequence
  Synthetic
uucuguuugguuugguuugag

SEQ ID NO: 5890 - RNA, 21 nt, Artificial Sequence
  Synthetic
ucuguuugguuugguuugagu

SEQ ID NO: 5891 - RNA, 21 nt, Artificial Sequence
  Synthetic
cuguuugguuugguuugaguu

SEQ ID NO: 5892 - RNA, 21 nt, Artificial Sequence
  Synthetic
uguuugguuugguuugaguuu

SEQ ID NO: 5893 - RNA, 21 nt, Artificial Sequence
  Synthetic
guuugguuugguuugaguuug

SEQ ID NO: 5894 - RNA, 21 nt, Artificial Sequence
  Synthetic
uuugguuugguuugaguuugg

SEQ ID NO: 5895 - RNA, 21 nt, Artificial Sequence
  Synthetic
uugguuugguuugaguuuggg

SEQ ID NO: 5896 - RNA, 21 nt, Artificial Sequence
  Synthetic
ugguuugguuugaguuuggga

SEQ ID NO: 5897 - RNA, 21 nt, Artificial Sequence
  Synthetic
gguuugguuugaguuugggau

SEQ ID NO: 5898 - RNA, 21 nt, Artificial Sequence
  Synthetic
guuugguuugaguuugggauu

SEQ ID NO: 5899 - RNA, 21 nt, Artificial Sequence
  Synthetic
uuugguuugaguuugggauuu

SEQ ID NO: 5900 - RNA, 21 nt, Artificial Sequence
  Synthetic
uugguuugaguuugggauuuu

SEQ ID NO: 5901 - RNA, 21 nt, Artificial Sequence
  Synthetic
ugguuugaguuugggauuuug

SEQ ID NO: 5902 - RNA, 21 nt, Artificial Sequence
  Synthetic
gguuugaguuugggauuuugg

SEQ ID NO: 5903 - RNA, 21 nt, Artificial Sequence
  Synthetic
guuugaguuugggauuuuggg

SEQ ID NO: 5904 - RNA, 21 nt, Artificial Sequence
  Synthetic
uuugaguuugggauuuugggc

SEQ ID NO: 5905 - RNA, 21 nt, Artificial Sequence
  Synthetic
uugaguuugggauuuugggcu

SEQ ID NO: 5906 - RNA, 21 nt, Artificial Sequence
  Synthetic
ugaguuugggauuuugggcua

SEQ ID NO: 5907 - RNA, 21 nt, Artificial Sequence
  Synthetic
gaguuugggauuuugggcuag

SEQ ID NO: 5908 - RNA, 21 nt, Artificial Sequence
  Synthetic
aguuugggauuuugggcuagc

SEQ ID NO: 5909 - RNA, 21 nt, Artificial Sequence
  Synthetic
guuugggauuuugggcuagcu

SEQ ID NO: 5910 - RNA, 21 nt, Artificial Sequence
  Synthetic
uuugggauuuugggcuagcuc

SEQ ID NO: 5911 - RNA, 21 nt, Artificial Sequence
  Synthetic
uugggauuuugggcuagcucu

SEQ ID NO: 5912 - RNA, 21 nt, Artificial Sequence
  Synthetic
ugggauuuugggcuagcucuu

SEQ ID NO: 5913 - RNA, 21 nt, Artificial Sequence
  Synthetic
gggauuuugggcuagcucuuu

SEQ ID NO: 5914 - RNA, 21 nt, Artificial Sequence
  Synthetic
ggauuuugggcuagcucuuuu

SEQ ID NO: 5915 - RNA, 21 nt, Artificial Sequence
  Synthetic
gauuuugggcuagcucuuuuu

SEQ ID NO: 5916 - RNA, 21 nt, Artificial Sequence
  Synthetic
auuuugggcuagcucuuuuuu

SEQ ID NO: 5917 - RNA, 21 nt, Artificial Sequence
  Synthetic
uuuugggcuagcucuuuuuuc

SEQ ID NO: 5918 - RNA, 21 nt, Artificial Sequence
  Synthetic
uuugggcuagcucuuuuuucu

SEQ ID NO: 5919 - RNA, 21 nt, Artificial Sequence
  Synthetic
uugggcuagcucuuuuuucuu

SEQ ID NO: 5920 - RNA, 21 nt, Artificial Sequence
  Synthetic
ugggcuagcucuuuuuucuuu

SEQ ID NO: 5921 - RNA, 21 nt, Artificial Sequence
  Synthetic
gggcuagcucuuuuuucuuug

SEQ ID NO: 5922 - RNA, 21 nt, Artificial Sequence
  Synthetic
ggcuagcucuuuuuucuuugu

SEQ ID NO: 5923 - RNA, 21 nt, Artificial Sequence
  Synthetic
gcuagcucuuuuuucuuuguc

SEQ ID NO: 5924 - RNA, 21 nt, Artificial Sequence
  Synthetic
cuagcucuuuuuucuuugucu

SEQ ID NO: 5925 - RNA, 21 nt, Artificial Sequence
  Synthetic
uagcucuuuuuucuuugucug

SEQ ID NO: 5926 - RNA, 21 nt, Artificial Sequence
  Synthetic
agcucuuuuuucuuugucugc

SEQ ID NO: 5927 - RNA, 21 nt, Artificial Sequence
  Synthetic
gcucuuuuuucuuugucugcu

SEQ ID NO: 5928 - RNA, 21 nt, Artificial Sequence
  Synthetic
cucuuuuuucuuugucugcuu

SEQ ID NO: 5929 - RNA, 21 nt, Artificial Sequence
  Synthetic
ucuuuuuucuuugucugcuuu

SEQ ID NO: 5930 - RNA, 21 nt, Artificial Sequence
  Synthetic
cuuuuuucuuugucugcuuuc

SEQ ID NO: 5931 - RNA, 21 nt, Artificial Sequence
  Synthetic
uuuuuucuuugucugcuuucu

SEQ ID NO: 5932 - RNA, 21 nt, Artificial Sequence
  Synthetic
uuuuucuuugucugcuuucug

SEQ ID NO: 5933 - RNA, 21 nt, Artificial Sequence
  Synthetic
uuuucuuugucugcuuucugu

SEQ ID NO: 5934 - RNA, 21 nt, Artificial Sequence
  Synthetic
uuucuuugucugcuuucuguu

SEQ ID NO: 5935 - RNA, 21 nt, Artificial Sequence
  Synthetic
uucuuugucugcuuucuguuu

SEQ ID NO: 5936 - RNA, 21 nt, Artificial Sequence
  Synthetic
ucuuugucugcuuucuguuuu

SEQ ID NO: 5937 - RNA, 21 nt, Artificial Sequence
  Synthetic
cuuugucugcuuucuguuuuc

SEQ ID NO: 5938 - RNA, 21 nt, Artificial Sequence
  Synthetic
uuugucugcuuucuguuuucc

SEQ ID NO: 5939 - RNA, 21 nt, Artificial Sequence
  Synthetic
uugucugcuuucuguuuuccc

SEQ ID NO: 5940 - RNA, 21 nt, Artificial Sequence
  Synthetic
ugucugcuuucuguuuucccu

SEQ ID NO: 5941 - RNA, 21 nt, Artificial Sequence
  Synthetic
gucugcuuucuguuuucccuu

SEQ ID NO: 5942 - RNA, 21 nt, Artificial Sequence
  Synthetic
ucugcuuucuguuuucccuuc

SEQ ID NO: 5943 - RNA, 21 nt, Artificial Sequence
  Synthetic
cugcuuucuguuuucccuucc

SEQ ID NO: 5944 - RNA, 21 nt, Artificial Sequence
  Synthetic
ugcuuucuguuuucccuuccu

SEQ ID NO: 5945 - RNA, 21 nt, Artificial Sequence
  Synthetic
gcuuucuguuuucccuuccuc

SEQ ID NO: 5946 - RNA, 21 nt, Artificial Sequence
  Synthetic
cuuucuguuuucccuuccucc

SEQ ID NO: 5947 - RNA, 21 nt, Artificial Sequence
  Synthetic
uuucuguuuucccuuccuccc

SEQ ID NO: 5948 - RNA, 21 nt, Artificial Sequence
  Synthetic
uucuguuuucccuuccucccu

SEQ ID NO: 5949 - RNA, 21 nt, Artificial Sequence
  Synthetic
ucuguuuucccuuccucccuu

SEQ ID NO: 5950 - RNA, 21 nt, Artificial Sequence
  Synthetic
cuguuuucccuuccucccuuc

SEQ ID NO: 5951 - RNA, 21 nt, Artificial Sequence
  Synthetic
uguuuucccuuccucccuucc

SEQ ID NO: 5952 - RNA, 21 nt, Artificial Sequence
  Synthetic
guuuucccuuccucccuuccc

SEQ ID NO: 5953 - RNA, 21 nt, Artificial Sequence
  Synthetic
uuuucccuuccucccuucccu

SEQ ID NO: 5954 - RNA, 21 nt, Artificial Sequence
  Synthetic
uuucccuuccucccuucccua

SEQ ID NO: 5955 - RNA, 21 nt, Artificial Sequence
  Synthetic
uucccuuccucccuucccuau

SEQ ID NO: 5956 - RNA, 21 nt, Artificial Sequence
  Synthetic
ucccuuccucccuucccuaug

SEQ ID NO: 5957 - RNA, 21 nt, Artificial Sequence
  Synthetic
cccuuccucccuucccuaugu

SEQ ID NO: 5958 - RNA, 21 nt, Artificial Sequence
  Synthetic
ccuuccucccuucccuaugua

SEQ ID NO: 5959 - RNA, 21 nt, Artificial Sequence
  Synthetic
cuuccucccuucccuauguac

SEQ ID NO: 5960 - RNA, 21 nt, Artificial Sequence
  Synthetic
uuccucccuucccuauguacg

SEQ ID NO: 5961 - RNA, 21 nt, Artificial Sequence
  Synthetic
uccucccuucccuauguacgc

SEQ ID NO: 5962 - RNA, 21 nt, Artificial Sequence
  Synthetic
ccucccuucccuauguacgcu

SEQ ID NO: 5963 - RNA, 21 nt, Artificial Sequence
  Synthetic
cucccuucccuauguacgcuc

SEQ ID NO: 5964 - RNA, 21 nt, Artificial Sequence
  Synthetic
ucccuucccuauguacgcuca

SEQ ID NO: 5965 - RNA, 21 nt, Artificial Sequence
  Synthetic
cccuucccuauguacgcucag

SEQ ID NO: 5966 - RNA, 21 nt, Artificial Sequence
  Synthetic
ccuucccuauguacgcucaga

SEQ ID NO: 5967 - RNA, 21 nt, Artificial Sequence
  Synthetic
cuucccuauguacgcucagag

SEQ ID NO: 5968 - RNA, 21 nt, Artificial Sequence
  Synthetic
uucccuauguacgcucagagc

SEQ ID NO: 5969 - RNA, 21 nt, Artificial Sequence
  Synthetic
ucccuauguacgcucagagcc

SEQ ID NO: 5970 - RNA, 21 nt, Artificial Sequence
  Synthetic
cccuauguacgcucagagccu

SEQ ID NO: 5971 - RNA, 21 nt, Artificial Sequence
  Synthetic
ccuauguacgcucagagccuc

SEQ ID NO: 5972 - RNA, 21 nt, Artificial Sequence
  Synthetic
cuauguacgcucagagccuca

SEQ ID NO: 5973 - RNA, 21 nt, Artificial Sequence
  Synthetic
uauguacgcucagagccucag

SEQ ID NO: 5974 - RNA, 21 nt, Artificial Sequence
  Synthetic
auguacgcucagagccucaga

SEQ ID NO: 5975 - RNA, 21 nt, Artificial Sequence
  Synthetic
uguacgcucagagccucagac

SEQ ID NO: 5976 - RNA, 21 nt, Artificial Sequence
  Synthetic
guacgcucagagccucagaca

SEQ ID NO: 5977 - RNA, 21 nt, Artificial Sequence
  Synthetic
uacgcucagagccucagacag

SEQ ID NO: 5978 - RNA, 21 nt, Artificial Sequence
  Synthetic
acgcucagagccucagacaga

SEQ ID NO: 5979 - RNA, 21 nt, Artificial Sequence
  Synthetic
cgcucagagccucagacagac

SEQ ID NO: 5980 - RNA, 21 nt, Artificial Sequence
  Synthetic
gcucagagccucagacagacc

SEQ ID NO: 5981 - RNA, 21 nt, Artificial Sequence
  Synthetic
cucagagccucagacagaccg

SEQ ID NO: 5982 - RNA, 21 nt, Artificial Sequence
  Synthetic
ucagagccucagacagaccgu

SEQ ID NO: 5983 - RNA, 21 nt, Artificial Sequence
  Synthetic
cagagccucagacagaccguc

SEQ ID NO: 5984 - RNA, 21 nt, Artificial Sequence
  Synthetic
agagccucagacagaccgucu

SEQ ID NO: 5985 - RNA, 21 nt, Artificial Sequence
  Synthetic
gagccucagacagaccgucug

SEQ ID NO: 5986 - RNA, 21 nt, Artificial Sequence
  Synthetic
agccucagacagaccgucugg

SEQ ID NO: 5987 - RNA, 21 nt, Artificial Sequence
  Synthetic
gccucagacagaccgucuggg

SEQ ID NO: 5988 - RNA, 21 nt, Artificial Sequence
  Synthetic
ccucagacagaccgucugggc

SEQ ID NO: 5989 - RNA, 21 nt, Artificial Sequence
  Synthetic
cucagacagaccgucugggcg

SEQ ID NO: 5990 - RNA, 21 nt, Artificial Sequence
  Synthetic
ucagacagaccgucugggcgc

SEQ ID NO: 5991 - RNA, 21 nt, Artificial Sequence
  Synthetic
cagacagaccgucugggcgcc

SEQ ID NO: 5992 - RNA, 21 nt, Artificial Sequence
  Synthetic
agacagaccgucugggcgccu

SEQ ID NO: 5993 - RNA, 21 nt, Artificial Sequence
  Synthetic
gacagaccgucugggcgccuc

SEQ ID NO: 5994 - RNA, 21 nt, Artificial Sequence
  Synthetic
acagaccgucugggcgccuca

SEQ ID NO: 5995 - RNA, 21 nt, Artificial Sequence
  Synthetic
cagaccgucugggcgccucau

SEQ ID NO: 5996 - RNA, 21 nt, Artificial Sequence
  Synthetic
agaccgucugggcgccucauu

SEQ ID NO: 5997 - RNA, 21 nt, Artificial Sequence
  Synthetic
gaccgucugggcgccucauuc

SEQ ID NO: 5998 - RNA, 21 nt, Artificial Sequence
  Synthetic
accgucugggcgccucauucg

SEQ ID NO: 5999 - RNA, 21 nt, Artificial Sequence
  Synthetic
ccgucugggcgccucauucgc

SEQ ID NO: 6000 - RNA, 21 nt, Artificial Sequence
  Synthetic
cgucugggcgccucauucgcg

SEQ ID NO: 6001 - RNA, 21 nt, Artificial Sequence
  Synthetic
gucugggcgccucauucgcgu

SEQ ID NO: 6002 - RNA, 21 nt, Artificial Sequence
  Synthetic
ucugggcgccucauucgcguu

SEQ ID NO: 6003 - RNA, 21 nt, Artificial Sequence
  Synthetic
cugggcgccucauucgcguuu

SEQ ID NO: 6004 - RNA, 21 nt, Artificial Sequence
  Synthetic
ugggcgccucauucgcguuuc

SEQ ID NO: 6005 - RNA, 21 nt, Artificial Sequence
  Synthetic
gggcgccucauucgcguuucc

SEQ ID NO: 6006 - RNA, 21 nt, Artificial Sequence
  Synthetic
ggcgccucauucgcguuuccg

SEQ ID NO: 6007 - RNA, 21 nt, Artificial Sequence
  Synthetic
gcgccucauucgcguuuccgc

SEQ ID NO: 6008 - RNA, 21 nt, Artificial Sequence
  Synthetic
cgccucauucgcguuuccgca

SEQ ID NO: 6009 - RNA, 21 nt, Artificial Sequence
  Synthetic
gccucauucgcguuuccgcaa

SEQ ID NO: 6010 - RNA, 21 nt, Artificial Sequence
  Synthetic
ccucauucgcguuuccgcaag

SEQ ID NO: 6011 - RNA, 21 nt, Artificial Sequence
  Synthetic
cucauucgcguuuccgcaaga

SEQ ID NO: 6012 - RNA, 21 nt, Artificial Sequence
  Synthetic
ucauucgcguuuccgcaagau

SEQ ID NO: 6013 - RNA, 21 nt, Artificial Sequence
  Synthetic
cauucgcguuuccgcaagauc

SEQ ID NO: 6014 - RNA, 21 nt, Artificial Sequence
  Synthetic
auucgcguuuccgcaagauca

SEQ ID NO: 6015 - RNA, 21 nt, Artificial Sequence
  Synthetic
uucgcguuuccgcaagaucac

SEQ ID NO: 6016 - RNA, 21 nt, Artificial Sequence
  Synthetic
ucgcguuuccgcaagaucaca

SEQ ID NO: 6017 - RNA, 21 nt, Artificial Sequence
  Synthetic
cgcguuuccgcaagaucacau

SEQ ID NO: 6018 - RNA, 21 nt, Artificial Sequence
  Synthetic
gcguuuccgcaagaucacaua

SEQ ID NO: 6019 - RNA, 21 nt, Artificial Sequence
  Synthetic
cguuuccgcaagaucacauag

SEQ ID NO: 6020 - RNA, 21 nt, Artificial Sequence
  Synthetic
guuuccgcaagaucacauaga

SEQ ID NO: 6021 - RNA, 21 nt, Artificial Sequence
  Synthetic
uuuccgcaagaucacauagau

SEQ ID NO: 6022 - RNA, 21 nt, Artificial Sequence
  Synthetic
uuccgcaagaucacauagaug

SEQ ID NO: 6023 - RNA, 21 nt, Artificial Sequence
  Synthetic
uccgcaagaucacauagauga

SEQ ID NO: 6024 - RNA, 21 nt, Artificial Sequence
  Synthetic
ccgcaagaucacauagaugac

SEQ ID NO: 6025 - RNA, 21 nt, Artificial Sequence
  Synthetic
cgcaagaucacauagaugaca

SEQ ID NO: 6026 - RNA, 21 nt, Artificial Sequence
  Synthetic
gcaagaucacauagaugacac

SEQ ID NO: 6027 - RNA, 21 nt, Artificial Sequence
  Synthetic
caagaucacauagaugacacc

SEQ ID NO: 6028 - RNA, 21 nt, Artificial Sequence
  Synthetic
aagaucacauagaugacaccg

SEQ ID NO: 6029 - RNA, 21 nt, Artificial Sequence
  Synthetic
agaucacauagaugacaccgc

SEQ ID NO: 6030 - RNA, 21 nt, Artificial Sequence
  Synthetic
gaucacauagaugacaccgcu

SEQ ID NO: 6031 - RNA, 21 nt, Artificial Sequence
  Synthetic
aucacauagaugacaccgcug

SEQ ID NO: 6032 - RNA, 21 nt, Artificial Sequence
  Synthetic
ucacauagaugacaccgcuga

SEQ ID NO: 6033 - RNA, 21 nt, Artificial Sequence
  Synthetic
cacauagaugacaccgcugag

SEQ ID NO: 6034 - RNA, 21 nt, Artificial Sequence
  Synthetic
acauagaugacaccgcugaga

SEQ ID NO: 6035 - RNA, 21 nt, Artificial Sequence
  Synthetic
cauagaugacaccgcugagaa

SEQ ID NO: 6036 - RNA, 21 nt, Artificial Sequence
  Synthetic
auagaugacaccgcugagaag

SEQ ID NO: 6037 - RNA, 21 nt, Artificial Sequence
  Synthetic
uagaugacaccgcugagaagg

SEQ ID NO: 6038 - RNA, 21 nt, Artificial Sequence
  Synthetic
agaugacaccgcugagaaggg

SEQ ID NO: 6039 - RNA, 21 nt, Artificial Sequence
  Synthetic
gaugacaccgcugagaagggc

SEQ ID NO: 6040 - RNA, 21 nt, Artificial Sequence
  Synthetic
augacaccgcugagaagggcc

SEQ ID NO: 6041 - RNA, 21 nt, Artificial Sequence
  Synthetic
ugacaccgcugagaagggcca

SEQ ID NO: 6042 - RNA, 21 nt, Artificial Sequence
  Synthetic
gacaccgcugagaagggccag

SEQ ID NO: 6043 - RNA, 21 nt, Artificial Sequence
  Synthetic
acaccgcugagaagggccagg

SEQ ID NO: 6044 - RNA, 21 nt, Artificial Sequence
  Synthetic
caccgcugagaagggccaggg

SEQ ID NO: 6045 - RNA, 21 nt, Artificial Sequence
  Synthetic
accgcugagaagggccagggg

SEQ ID NO: 6046 - RNA, 21 nt, Artificial Sequence
  Synthetic
ccgcugagaagggccaggggg

SEQ ID NO: 6047 - RNA, 21 nt, Artificial Sequence
  Synthetic
cgcugagaagggccaggggga

SEQ ID NO: 6048 - RNA, 21 nt, Artificial Sequence
  Synthetic
gcugagaagggccagggggaa

SEQ ID NO: 6049 - RNA, 21 nt, Artificial Sequence
  Synthetic
cugagaagggccagggggaag

SEQ ID NO: 6050 - RNA, 21 nt, Artificial Sequence
  Synthetic
ugagaagggccagggggaagg

SEQ ID NO: 6051 - RNA, 21 nt, Artificial Sequence
  Synthetic
gagaagggccagggggaaggc

SEQ ID NO: 6052 - RNA, 21 nt, Artificial Sequence
  Synthetic
agaagggccagggggaaggcc

SEQ ID NO: 6053 - RNA, 21 nt, Artificial Sequence
  Synthetic
gaagggccagggggaaggcca

SEQ ID NO: 6054 - RNA, 21 nt, Artificial Sequence
  Synthetic
aagggccagggggaaggccac

SEQ ID NO: 6055 - RNA, 21 nt, Artificial Sequence
  Synthetic
agggccagggggaaggccacc

SEQ ID NO: 6056 - RNA, 21 nt, Artificial Sequence
  Synthetic
gggccagggggaaggccaccc

SEQ ID NO: 6057 - RNA, 21 nt, Artificial Sequence
  Synthetic
ggccagggggaaggccaccca

SEQ ID NO: 6058 - RNA, 21 nt, Artificial Sequence
  Synthetic
gccagggggaaggccacccag

SEQ ID NO: 6059 - RNA, 21 nt, Artificial Sequence
  Synthetic
ccagggggaaggccacccagg

SEQ ID NO: 6060 - RNA, 21 nt, Artificial Sequence
  Synthetic
cagggggaaggccacccaggc

SEQ ID NO: 6061 - RNA, 21 nt, Artificial Sequence
  Synthetic
agggggaaggccacccaggcc

SEQ ID NO: 6062 - RNA, 21 nt, Artificial Sequence
  Synthetic
gggggaaggccacccaggcca

SEQ ID NO: 6063 - RNA, 21 nt, Artificial Sequence
  Synthetic
ggggaaggccacccaggccag

SEQ ID NO: 6064 - RNA, 21 nt, Artificial Sequence
  Synthetic
gggaaggccacccaggccagg

SEQ ID NO: 6065 - RNA, 21 nt, Artificial Sequence
  Synthetic
ggaaggccacccaggccagga

SEQ ID NO: 6066 - RNA, 21 nt, Artificial Sequence
  Synthetic
gaaggccacccaggccaggau

SEQ ID NO: 6067 - RNA, 21 nt, Artificial Sequence
  Synthetic
aaggccacccaggccaggaug

SEQ ID NO: 6068 - RNA, 21 nt, Artificial Sequence
  Synthetic
aggccacccaggccaggaugu

SEQ ID NO: 6069 - RNA, 21 nt, Artificial Sequence
  Synthetic
ggccacccaggccaggaugua

SEQ ID NO: 6070 - RNA, 21 nt, Artificial Sequence
  Synthetic
gccacccaggccaggauguag

SEQ ID NO: 6071 - RNA, 21 nt, Artificial Sequence
  Synthetic
ccacccaggccaggauguagg

SEQ ID NO: 6072 - RNA, 21 nt, Artificial Sequence
  Synthetic
cacccaggccaggauguaggc

SEQ ID NO: 6073 - RNA, 21 nt, Artificial Sequence
  Synthetic
acccaggccaggauguaggcg

SEQ ID NO: 6074 - RNA, 21 nt, Artificial Sequence
  Synthetic
cccaggccaggauguaggcga

SEQ ID NO: 6075 - RNA, 21 nt, Artificial Sequence
  Synthetic
ccaggccaggauguaggcgaa

SEQ ID NO: 6076 - RNA, 21 nt, Artificial Sequence
  Synthetic
caggccaggauguaggcgaaa

SEQ ID NO: 6077 - RNA, 21 nt, Artificial Sequence
  Synthetic
aggccaggauguaggcgaaac

SEQ ID NO: 6078 - RNA, 21 nt, Artificial Sequence
  Synthetic
ggccaggauguaggcgaaacc

SEQ ID NO: 6079 - RNA, 21 nt, Artificial Sequence
  Synthetic
gccaggauguaggcgaaaccg

SEQ ID NO: 6080 - RNA, 21 nt, Artificial Sequence
  Synthetic
ccaggauguaggcgaaaccgu

SEQ ID NO: 6081 - RNA, 21 nt, Artificial Sequence
  Synthetic
caggauguaggcgaaaccgua

SEQ ID NO: 6082 - RNA, 21 nt, Artificial Sequence
  Synthetic
aggauguaggcgaaaccguag

SEQ ID NO: 6083 - RNA, 21 nt, Artificial Sequence
  Synthetic
ggauguaggcgaaaccguagg

SEQ ID NO: 6084 - RNA, 21 nt, Artificial Sequence
  Synthetic
gauguaggcgaaaccguagga

SEQ ID NO: 6085 - RNA, 21 nt, Artificial Sequence
  Synthetic
auguaggcgaaaccguaggag

SEQ ID NO: 6086 - RNA, 21 nt, Artificial Sequence
  Synthetic
uguaggcgaaaccguaggagu

SEQ ID NO: 6087 - RNA, 21 nt, Artificial Sequence
  Synthetic
guaggcgaaaccguaggagua

SEQ ID NO: 6088 - RNA, 21 nt, Artificial Sequence
  Synthetic
uaggcgaaaccguaggaguaa

SEQ ID NO: 6089 - RNA, 21 nt, Artificial Sequence
  Synthetic
aggcgaaaccguaggaguaau

SEQ ID NO: 6090 - RNA, 21 nt, Artificial Sequence
  Synthetic
ggcgaaaccguaggaguaauc

SEQ ID NO: 6091 - RNA, 21 nt, Artificial Sequence
  Synthetic
gcgaaaccguaggaguaaucc

SEQ ID NO: 6092 - RNA, 21 nt, Artificial Sequence
  Synthetic
cgaaaccguaggaguaauccg

SEQ ID NO: 6093 - RNA, 21 nt, Artificial Sequence
  Synthetic
gaaaccguaggaguaauccga

SEQ ID NO: 6094 - RNA, 21 nt, Artificial Sequence
  Synthetic
aaaccguaggaguaauccgag

SEQ ID NO: 6095 - RNA, 21 nt, Artificial Sequence
  Synthetic
aaccguaggaguaauccgagu

SEQ ID NO: 6096 - RNA, 21 nt, Artificial Sequence
  Synthetic
accguaggaguaauccgaguu

SEQ ID NO: 6097 - RNA, 21 nt, Artificial Sequence
  Synthetic
ccguaggaguaauccgaguug

SEQ ID NO: 6098 - RNA, 21 nt, Artificial Sequence
  Synthetic
cguaggaguaauccgaguuga

SEQ ID NO: 6099 - RNA, 21 nt, Artificial Sequence
  Synthetic
guaggaguaauccgaguugag

SEQ ID NO: 6100 - RNA, 21 nt, Artificial Sequence
  Synthetic
uaggaguaauccgaguugaga

SEQ ID NO: 6101 - RNA, 21 nt, Artificial Sequence
  Synthetic
aggaguaauccgaguugagau

SEQ ID NO: 6102 - RNA, 21 nt, Artificial Sequence
  Synthetic
ggaguaauccgaguugagaug

SEQ ID NO: 6103 - RNA, 21 nt, Artificial Sequence
  Synthetic
gaguaauccgaguugagaugc

SEQ ID NO: 6104 - RNA, 21 nt, Artificial Sequence
  Synthetic
aguaauccgaguugagaugcc

SEQ ID NO: 6105 - RNA, 21 nt, Artificial Sequence
  Synthetic
guaauccgaguugagaugcca

SEQ ID NO: 6106 - RNA, 21 nt, Artificial Sequence
  Synthetic
uaauccgaguugagaugccac

SEQ ID NO: 6107 - RNA, 21 nt, Artificial Sequence
  Synthetic
aauccgaguugagaugccacu

SEQ ID NO: 6108 - RNA, 21 nt, Artificial Sequence
  Synthetic
auccgaguugagaugccacuc

SEQ ID NO: 6109 - RNA, 21 nt, Artificial Sequence
  Synthetic
uccgaguugagaugccacucc

SEQ ID NO: 6110 - RNA, 21 nt, Artificial Sequence
  Synthetic
ccgaguugagaugccacuccg

SEQ ID NO: 6111 - RNA, 21 nt, Artificial Sequence
  Synthetic
cgaguugagaugccacuccgg

SEQ ID NO: 6112 - RNA, 21 nt, Artificial Sequence
  Synthetic
gaguugagaugccacuccggg

SEQ ID NO: 6113 - RNA, 21 nt, Artificial Sequence
  Synthetic
aguugagaugccacuccgggu

SEQ ID NO: 6114 - RNA, 21 nt, Artificial Sequence
  Synthetic
guugagaugccacuccgggug

SEQ ID NO: 6115 - RNA, 21 nt, Artificial Sequence
  Synthetic
uugagaugccacuccgggugc

SEQ ID NO: 6116 - RNA, 21 nt, Artificial Sequence
  Synthetic
ugagaugccacuccgggugcc

SEQ ID NO: 6117 - RNA, 21 nt, Artificial Sequence
  Synthetic
gagaugccacuccgggugccu

SEQ ID NO: 6118 - RNA, 21 nt, Artificial Sequence
  Synthetic
agaugccacuccgggugccuc

SEQ ID NO: 6119 - RNA, 21 nt, Artificial Sequence
  Synthetic
gaugccacuccgggugccuca

SEQ ID NO: 6120 - RNA, 21 nt, Artificial Sequence
  Synthetic
augccacuccgggugccucac

SEQ ID NO: 6121 - RNA, 21 nt, Artificial Sequence
  Synthetic
ugccacuccgggugccucacc

SEQ ID NO: 6122 - RNA, 21 nt, Artificial Sequence
  Synthetic
gccacuccgggugccucaccg

SEQ ID NO: 6123 - RNA, 21 nt, Artificial Sequence
  Synthetic
ccacuccgggugccucaccgu

SEQ ID NO: 6124 - RNA, 21 nt, Artificial Sequence
  Synthetic
cacuccgggugccucaccgug

SEQ ID NO: 6125 - RNA, 21 nt, Artificial Sequence
  Synthetic
acuccgggugccucaccgugu

SEQ ID NO: 6126 - RNA, 21 nt, Artificial Sequence
  Synthetic
cuccgggugccucaccgugua

SEQ ID NO: 6127 - RNA, 21 nt, Artificial Sequence
  Synthetic
uccgggugccucaccguguag

SEQ ID NO: 6128 - RNA, 21 nt, Artificial Sequence
  Synthetic
ccgggugccucaccguguaga

SEQ ID NO: 6129 - RNA, 21 nt, Artificial Sequence
  Synthetic
cgggugccucaccguguagau

SEQ ID NO: 6130 - RNA, 21 nt, Artificial Sequence
  Synthetic
gggugccucaccguguagaug

SEQ ID NO: 6131 - RNA, 21 nt, Artificial Sequence
  Synthetic
ggugccucaccguguagaugg

SEQ ID NO: 6132 - RNA, 21 nt, Artificial Sequence
  Synthetic
gugccucaccguguagauggc

SEQ ID NO: 6133 - RNA, 21 nt, Artificial Sequence
  Synthetic
ugccucaccguguagauggcc

SEQ ID NO: 6134 - RNA, 21 nt, Artificial Sequence
  Synthetic
gccucaccguguagauggccg

SEQ ID NO: 6135 - RNA, 21 nt, Artificial Sequence
  Synthetic
ccucaccguguagauggccgc

SEQ ID NO: 6136 - RNA, 21 nt, Artificial Sequence
  Synthetic
cucaccguguagauggccgca

SEQ ID NO: 6137 - RNA, 21 nt, Artificial Sequence
  Synthetic
ucaccguguagauggccgcag

SEQ ID NO: 6138 - RNA, 21 nt, Artificial Sequence
  Synthetic
caccguguagauggccgcagc

SEQ ID NO: 6139 - RNA, 21 nt, Artificial Sequence
  Synthetic
accguguagauggccgcagca

SEQ ID NO: 6140 - RNA, 21 nt, Artificial Sequence
  Synthetic
ccguguagauggccgcagcac

SEQ ID NO: 6141 - RNA, 21 nt, Artificial Sequence
  Synthetic
cguguagauggccgcagcacu

SEQ ID NO: 6142 - RNA, 21 nt, Artificial Sequence
  Synthetic
guguagauggccgcagcacuc

SEQ ID NO: 6143 - RNA, 21 nt, Artificial Sequence
  Synthetic
uguagauggccgcagcacuca

SEQ ID NO: 6144 - RNA, 21 nt, Artificial Sequence
  Synthetic
guagauggccgcagcacucau

SEQ ID NO: 6145 - RNA, 21 nt, Artificial Sequence
  Synthetic
uagauggccgcagcacucauc

SEQ ID NO: 6146 - RNA, 21 nt, Artificial Sequence
  Synthetic
agauggccgcagcacucauca

SEQ ID NO: 6147 - RNA, 21 nt, Artificial Sequence
  Synthetic
gauggccgcagcacucaucac

SEQ ID NO: 6148 - RNA, 21 nt, Artificial Sequence
  Synthetic
auggccgcagcacucaucacg

SEQ ID NO: 6149 - RNA, 21 nt, Artificial Sequence
  Synthetic
uggccgcagcacucaucacgc

SEQ ID NO: 6150 - RNA, 21 nt, Artificial Sequence
  Synthetic
ggccgcagcacucaucacgca

SEQ ID NO: 6151 - RNA, 21 nt, Artificial Sequence
  Synthetic
gccgcagcacucaucacgcac

SEQ ID NO: 6152 - RNA, 21 nt, Artificial Sequence
  Synthetic
ccgcagcacucaucacgcaca

SEQ ID NO: 6153 - RNA, 21 nt, Artificial Sequence
  Synthetic
cgcagcacucaucacgcacag

SEQ ID NO: 6154 - RNA, 21 nt, Artificial Sequence
  Synthetic
gcagcacucaucacgcacaga

SEQ ID NO: 6155 - RNA, 21 nt, Artificial Sequence
  Synthetic
cagcacucaucacgcacagac

SEQ ID NO: 6156 - RNA, 21 nt, Artificial Sequence
  Synthetic
agcacucaucacgcacagacc

SEQ ID NO: 6157 - RNA, 21 nt, Artificial Sequence
  Synthetic
gcacucaucacgcacagacca

SEQ ID NO: 6158 - RNA, 21 nt, Artificial Sequence
  Synthetic
cacucaucacgcacagaccag

SEQ ID NO: 6159 - RNA, 21 nt, Artificial Sequence
  Synthetic
acucaucacgcacagaccagc

SEQ ID NO: 6160 - RNA, 21 nt, Artificial Sequence
  Synthetic
cucaucacgcacagaccagca

SEQ ID NO: 6161 - RNA, 21 nt, Artificial Sequence
  Synthetic
ucaucacgcacagaccagcaa

SEQ ID NO: 6162 - RNA, 21 nt, Artificial Sequence
  Synthetic
caucacgcacagaccagcaag

SEQ ID NO: 6163 - RNA, 21 nt, Artificial Sequence
  Synthetic
aucacgcacagaccagcaaga

SEQ ID NO: 6164 - RNA, 21 nt, Artificial Sequence
  Synthetic
ucacgcacagaccagcaagaa

SEQ ID NO: 6165 - RNA, 21 nt, Artificial Sequence
  Synthetic
cacgcacagaccagcaagaau

SEQ ID NO: 6166 - RNA, 21 nt, Artificial Sequence
  Synthetic
acgcacagaccagcaagaauu

SEQ ID NO: 6167 - RNA, 21 nt, Artificial Sequence
  Synthetic
cgcacagaccagcaagaauuu

SEQ ID NO: 6168 - RNA, 21 nt, Artificial Sequence
  Synthetic
gcacagaccagcaagaauuug

SEQ ID NO: 6169 - RNA, 21 nt, Artificial Sequence
  Synthetic
cacagaccagcaagaauuugg

SEQ ID NO: 6170 - RNA, 21 nt, Artificial Sequence
  Synthetic
acagaccagcaagaauuugga

SEQ ID NO: 6171 - RNA, 21 nt, Artificial Sequence
  Synthetic
cagaccagcaagaauuuggaa

SEQ ID NO: 6172 - RNA, 21 nt, Artificial Sequence
  Synthetic
agaccagcaagaauuuggaag

SEQ ID NO: 6173 - RNA, 21 nt, Artificial Sequence
  Synthetic
gaccagcaagaauuuggaaga

SEQ ID NO: 6174 - RNA, 21 nt, Artificial Sequence
  Synthetic
accagcaagaauuuggaagau

SEQ ID NO: 6175 - RNA, 21 nt, Artificial Sequence
  Synthetic
ccagcaagaauuuggaagauu

SEQ ID NO: 6176 - RNA, 21 nt, Artificial Sequence
  Synthetic
cagcaagaauuuggaagauuc

SEQ ID NO: 6177 - RNA, 21 nt, Artificial Sequence
  Synthetic
agcaagaauuuggaagauucc

SEQ ID NO: 6178 - RNA, 21 nt, Artificial Sequence
  Synthetic
gcaagaauuuggaagauucca

SEQ ID NO: 6179 - RNA, 21 nt, Artificial Sequence
  Synthetic
caagaauuuggaagauuccag

SEQ ID NO: 6180 - RNA, 21 nt, Artificial Sequence
  Synthetic
aagaauuuggaagauuccagu

SEQ ID NO: 6181 - RNA, 21 nt, Artificial Sequence
  Synthetic
agaauuuggaagauuccagug

SEQ ID NO: 6182 - RNA, 21 nt, Artificial Sequence
  Synthetic
gaauuuggaagauuccaguga

SEQ ID NO: 6183 - RNA, 21 nt, Artificial Sequence
  Synthetic
aauuuggaagauuccagugau

SEQ ID NO: 6184 - RNA, 21 nt, Artificial Sequence
  Synthetic
auuuggaagauuccagugaug

SEQ ID NO: 6185 - RNA, 21 nt, Artificial Sequence
  Synthetic
uuuggaagauuccagugaugu

SEQ ID NO: 6186 - RNA, 21 nt, Artificial Sequence
  Synthetic
uuggaagauuccagugaugua

SEQ ID NO: 6187 - RNA, 21 nt, Artificial Sequence
  Synthetic
uggaagauuccagugauguaa

SEQ ID NO: 6188 - RNA, 21 nt, Artificial Sequence
  Synthetic
ggaagauuccagugauguaaa

SEQ ID NO: 6189 - RNA, 21 nt, Artificial Sequence
  Synthetic
gaagauuccagugauguaaaa

SEQ ID NO: 6190 - RNA, 21 nt, Artificial Sequence
  Synthetic
aagauuccagugauguaaaac

SEQ ID NO: 6191 - RNA, 21 nt, Artificial Sequence
  Synthetic
agauuccagugauguaaaacc

SEQ ID NO: 6192 - RNA, 21 nt, Artificial Sequence
  Synthetic
gauuccagugauguaaaaccu

SEQ ID NO: 6193 - RNA, 21 nt, Artificial Sequence
  Synthetic
auuccagugauguaaaaccug

SEQ ID NO: 6194 - RNA, 21 nt, Artificial Sequence
  Synthetic
uuccagugauguaaaaccugc

SEQ ID NO: 6195 - RNA, 21 nt, Artificial Sequence
  Synthetic
uccagugauguaaaaccugcc

SEQ ID NO: 6196 - RNA, 21 nt, Artificial Sequence
  Synthetic
ccagugauguaaaaccugccc

SEQ ID NO: 6197 - RNA, 21 nt, Artificial Sequence
  Synthetic
cagugauguaaaaccugcccc

SEQ ID NO: 6198 - RNA, 21 nt, Artificial Sequence
  Synthetic
agugauguaaaaccugccccc

SEQ ID NO: 6199 - RNA, 21 nt, Artificial Sequence
  Synthetic
gugauguaaaaccugcccccc

SEQ ID NO: 6200 - RNA, 21 nt, Artificial Sequence
  Synthetic
ugauguaaaaccugccccccu

SEQ ID NO: 6201 - RNA, 21 nt, Artificial Sequence
  Synthetic
gauguaaaaccugccccccuu

SEQ ID NO: 6202 - RNA, 21 nt, Artificial Sequence
  Synthetic
auguaaaaccugccccccuug

SEQ ID NO: 6203 - RNA, 21 nt, Artificial Sequence
  Synthetic
uguaaaaccugccccccuugg

SEQ ID NO: 6204 - RNA, 21 nt, Artificial Sequence
  Synthetic
guaaaaccugccccccuuggu

SEQ ID NO: 6205 - RNA, 21 nt, Artificial Sequence
  Synthetic
uaaaaccugccccccuuggug

SEQ ID NO: 6206 - RNA, 21 nt, Artificial Sequence
  Synthetic
aaaaccugccccccuugguga

SEQ ID NO: 6207 - RNA, 21 nt, Artificial Sequence
  Synthetic
aaaccugccccccuuggugag

SEQ ID NO: 6208 - RNA, 21 nt, Artificial Sequence
  Synthetic
aaccugccccccuuggugagg

SEQ ID NO: 6209 - RNA, 21 nt, Artificial Sequence
  Synthetic
accugccccccuuggugaggg

SEQ ID NO: 6210 - RNA, 21 nt, Artificial Sequence
  Synthetic
ccugccccccuuggugagggu

SEQ ID NO: 6211 - RNA, 21 nt, Artificial Sequence
  Synthetic
cugccccccuuggugagggug

SEQ ID NO: 6212 - RNA, 21 nt, Artificial Sequence
  Synthetic
ugccccccuuggugaggguga

SEQ ID NO: 6213 - RNA, 21 nt, Artificial Sequence
  Synthetic
gccccccuuggugagggugaa

SEQ ID NO: 6214 - RNA, 21 nt, Artificial Sequence
  Synthetic
ccccccuuggugagggugaag

SEQ ID NO: 6215 - RNA, 21 nt, Artificial Sequence
  Synthetic
cccccuuggugagggugaaga

SEQ ID NO: 6216 - RNA, 21 nt, Artificial Sequence
  Synthetic
ccccuuggugagggugaagag

SEQ ID NO: 6217 - RNA, 21 nt, Artificial Sequence
  Synthetic
cccuuggugagggugaagagu

SEQ ID NO: 6218 - RNA, 21 nt, Artificial Sequence
  Synthetic
ccuuggugagggugaagaguu

SEQ ID NO: 6219 - RNA, 21 nt, Artificial Sequence
  Synthetic
cuuggugagggugaagaguug

SEQ ID NO: 6220 - RNA, 21 nt, Artificial Sequence
  Synthetic
uuggugagggugaagaguugg

SEQ ID NO: 6221 - RNA, 21 nt, Artificial Sequence
  Synthetic
uggugagggugaagaguuggc

SEQ ID NO: 6222 - RNA, 21 nt, Artificial Sequence
  Synthetic
ggugagggugaagaguuggca

SEQ ID NO: 6223 - RNA, 21 nt, Artificial Sequence
  Synthetic
gugagggugaagaguuggcag

SEQ ID NO: 6224 - RNA, 21 nt, Artificial Sequence
  Synthetic
ugagggugaagaguuggcaga

SEQ ID NO: 6225 - RNA, 21 nt, Artificial Sequence
  Synthetic
gagggugaagaguuggcagaa

SEQ ID NO: 6226 - RNA, 21 nt, Artificial Sequence
  Synthetic
agggugaagaguuggcagaag

SEQ ID NO: 6227 - RNA, 21 nt, Artificial Sequence
  Synthetic
gggugaagaguuggcagaaga

SEQ ID NO: 6228 - RNA, 21 nt, Artificial Sequence
  Synthetic
ggugaagaguuggcagaagaa

SEQ ID NO: 6229 - RNA, 21 nt, Artificial Sequence
  Synthetic
gugaagaguuggcagaagaac

SEQ ID NO: 6230 - RNA, 21 nt, Artificial Sequence
  Synthetic
ugaagaguuggcagaagaaca

SEQ ID NO: 6231 - RNA, 21 nt, Artificial Sequence
  Synthetic
gaagaguuggcagaagaacag

SEQ ID NO: 6232 - RNA, 21 nt, Artificial Sequence
  Synthetic
aagaguuggcagaagaacagg

SEQ ID NO: 6233 - RNA, 21 nt, Artificial Sequence
  Synthetic
agaguuggcagaagaacagga

SEQ ID NO: 6234 - RNA, 21 nt, Artificial Sequence
  Synthetic
gaguuggcagaagaacaggaa

SEQ ID NO: 6235 - RNA, 21 nt, Artificial Sequence
  Synthetic
aguuggcagaagaacaggaac

SEQ ID NO: 6236 - RNA, 21 nt, Artificial Sequence
  Synthetic
guuggcagaagaacaggaaca

SEQ ID NO: 6237 - RNA, 21 nt, Artificial Sequence
  Synthetic
uuggcagaagaacaggaacag

SEQ ID NO: 6238 - RNA, 21 nt, Artificial Sequence
  Synthetic
uggcagaagaacaggaacaga

SEQ ID NO: 6239 - RNA, 21 nt, Artificial Sequence
  Synthetic
ggcagaagaacaggaacagag

SEQ ID NO: 6240 - RNA, 21 nt, Artificial Sequence
  Synthetic
gcagaagaacaggaacagaga

SEQ ID NO: 6241 - RNA, 21 nt, Artificial Sequence
  Synthetic
cagaagaacaggaacagagac

SEQ ID NO: 6242 - RNA, 21 nt, Artificial Sequence
  Synthetic
agaagaacaggaacagagaca

SEQ ID NO: 6243 - RNA, 21 nt, Artificial Sequence
  Synthetic
gaagaacaggaacagagacag

SEQ ID NO: 6244 - RNA, 21 nt, Artificial Sequence
  Synthetic
aagaacaggaacagagacaga

SEQ ID NO: 6245 - RNA, 21 nt, Artificial Sequence
  Synthetic
agaacaggaacagagacagaa

SEQ ID NO: 6246 - RNA, 21 nt, Artificial Sequence
  Synthetic
gaacaggaacagagacagaau

SEQ ID NO: 6247 - RNA, 21 nt, Artificial Sequence
  Synthetic
aacaggaacagagacagaaug

SEQ ID NO: 6248 - RNA, 21 nt, Artificial Sequence
  Synthetic
acaggaacagagacagaaugc

SEQ ID NO: 6249 - RNA, 21 nt, Artificial Sequence
  Synthetic
caggaacagagacagaaugcu

SEQ ID NO: 6250 - RNA, 21 nt, Artificial Sequence
  Synthetic
aggaacagagacagaaugcug

SEQ ID NO: 6251 - RNA, 21 nt, Artificial Sequence
  Synthetic
ggaacagagacagaaugcuga

SEQ ID NO: 6252 - RNA, 21 nt, Artificial Sequence
  Synthetic
gaacagagacagaaugcugaa

SEQ ID NO: 6253 - RNA, 21 nt, Artificial Sequence
  Synthetic
aacagagacagaaugcugaag

SEQ ID NO: 6254 - RNA, 21 nt, Artificial Sequence
  Synthetic
acagagacagaaugcugaaga

SEQ ID NO: 6255 - RNA, 21 nt, Artificial Sequence
  Synthetic
cagagacagaaugcugaagau

SEQ ID NO: 6256 - RNA, 21 nt, Artificial Sequence
  Synthetic
agagacagaaugcugaagaug

SEQ ID NO: 6257 - RNA, 21 nt, Artificial Sequence
  Synthetic
gagacagaaugcugaagauga

SEQ ID NO: 6258 - RNA, 21 nt, Artificial Sequence
  Synthetic
agacagaaugcugaagaugau

SEQ ID NO: 6259 - RNA, 21 nt, Artificial Sequence
  Synthetic
gacagaaugcugaagaugauc

SEQ ID NO: 6260 - RNA, 21 nt, Artificial Sequence
  Synthetic
acagaaugcugaagaugaucg

SEQ ID NO: 6261 - RNA, 21 nt, Artificial Sequence
  Synthetic
cagaaugcugaagaugaucga

SEQ ID NO: 6262 - RNA, 21 nt, Artificial Sequence
  Synthetic
agaaugcugaagaugaucgac

SEQ ID NO: 6263 - RNA, 21 nt, Artificial Sequence
  Synthetic
gaaugcugaagaugaucgaca

SEQ ID NO: 6264 - RNA, 21 nt, Artificial Sequence
  Synthetic
aaugcugaagaugaucgacag

SEQ ID NO: 6265 - RNA, 21 nt, Artificial Sequence
  Synthetic
augcugaagaugaucgacagg

SEQ ID NO: 6266 - RNA, 21 nt, Artificial Sequence
  Synthetic
ugcugaagaugaucgacagga

SEQ ID NO: 6267 - RNA, 21 nt, Artificial Sequence
  Synthetic
gcugaagaugaucgacaggau

SEQ ID NO: 6268 - RNA, 21 nt, Artificial Sequence
  Synthetic
cugaagaugaucgacaggauc

SEQ ID NO: 6269 - RNA, 21 nt, Artificial Sequence
  Synthetic
ugaagaugaucgacaggauca

SEQ ID NO: 6270 - RNA, 21 nt, Artificial Sequence
  Synthetic
gaagaugaucgacaggaucau

SEQ ID NO: 6271 - RNA, 21 nt, Artificial Sequence
  Synthetic
aagaugaucgacaggaucaug

SEQ ID NO: 6272 - RNA, 21 nt, Artificial Sequence
  Synthetic
agaugaucgacaggaucaugg

SEQ ID NO: 6273 - RNA, 21 nt, Artificial Sequence
  Synthetic
gaugaucgacaggaucauggu

SEQ ID NO: 6274 - RNA, 21 nt, Artificial Sequence
  Synthetic
augaucgacaggaucauggug

SEQ ID NO: 6275 - RNA, 21 nt, Artificial Sequence
  Synthetic
ugaucgacaggaucauggugg

SEQ ID NO: 6276 - RNA, 21 nt, Artificial Sequence
  Synthetic
gaucgacaggaucaugguggc

SEQ ID NO: 6277 - RNA, 21 nt, Artificial Sequence
  Synthetic
aucgacaggaucaugguggcc

SEQ ID NO: 6278 - RNA, 21 nt, Artificial Sequence
  Synthetic
ucgacaggaucaugguggccu

SEQ ID NO: 6279 - RNA, 21 nt, Artificial Sequence
  Synthetic
cgacaggaucaugguggccug

SEQ ID NO: 6280 - RNA, 21 nt, Artificial Sequence
  Synthetic
gacaggaucaugguggccugg

SEQ ID NO: 6281 - RNA, 21 nt, Artificial Sequence
  Synthetic
acaggaucaugguggccugga

SEQ ID NO: 6282 - RNA, 21 nt, Artificial Sequence
  Synthetic
caggaucaugguggccuggac

SEQ ID NO: 6283 - RNA, 21 nt, Artificial Sequence
  Synthetic
aggaucaugguggccuggaca

SEQ ID NO: 6284 - RNA, 21 nt, Artificial Sequence
  Synthetic
ggaucaugguggccuggacag

SEQ ID NO: 6285 - RNA, 21 nt, Artificial Sequence
  Synthetic
gaucaugguggccuggacaga

SEQ ID NO: 6286 - RNA, 21 nt, Artificial Sequence
  Synthetic
aucaugguggccuggacagac

SEQ ID NO: 6287 - RNA, 21 nt, Artificial Sequence
  Synthetic
ucaugguggccuggacagacu

SEQ ID NO: 6288 - RNA, 21 nt, Artificial Sequence
  Synthetic
caugguggccuggacagacug

SEQ ID NO: 6289 - RNA, 21 nt, Artificial Sequence
  Synthetic
augguggccuggacagacugc

SEQ ID NO: 6290 - RNA, 21 nt, Artificial Sequence
  Synthetic
ugguggccuggacagacugca

SEQ ID NO: 6291 - RNA, 21 nt, Artificial Sequence
  Synthetic
gguggccuggacagacugcag

SEQ ID NO: 6292 - RNA, 21 nt, Artificial Sequence
  Synthetic
guggccuggacagacugcagc

SEQ ID NO: 6293 - RNA, 21 nt, Artificial Sequence
  Synthetic
uggccuggacagacugcagcc

SEQ ID NO: 6294 - RNA, 21 nt, Artificial Sequence
  Synthetic
ggccuggacagacugcagcca

SEQ ID NO: 6295 - RNA, 21 nt, Artificial Sequence
  Synthetic
gccuggacagacugcagccau

SEQ ID NO: 6296 - RNA, 21 nt, Artificial Sequence
  Synthetic
ccuggacagacugcagccauu

SEQ ID NO: 6297 - RNA, 21 nt, Artificial Sequence
  Synthetic
cuggacagacugcagccauuc

SEQ ID NO: 6298 - RNA, 21 nt, Artificial Sequence
  Synthetic
uggacagacugcagccauucg

SEQ ID NO: 6299 - RNA, 21 nt, Artificial Sequence
  Synthetic
ggacagacugcagccauucgu

SEQ ID NO: 6300 - RNA, 21 nt, Artificial Sequence
  Synthetic
gacagacugcagccauucguu

SEQ ID NO: 6301 - RNA, 21 nt, Artificial Sequence
  Synthetic
acagacugcagccauucguuu

SEQ ID NO: 6302 - RNA, 21 nt, Artificial Sequence
  Synthetic
cagacugcagccauucguuug

SEQ ID NO: 6303 - RNA, 21 nt, Artificial Sequence
  Synthetic
agacugcagccauucguuugg

SEQ ID NO: 6304 - RNA, 21 nt, Artificial Sequence
  Synthetic
gacugcagccauucguuuggu

SEQ ID NO: 6305 - RNA, 21 nt, Artificial Sequence
  Synthetic
acugcagccauucguuuggug

SEQ ID NO: 6306 - RNA, 21 nt, Artificial Sequence
  Synthetic
cugcagccauucguuugguga

SEQ ID NO: 6307 - RNA, 21 nt, Artificial Sequence
  Synthetic
ugcagccauucguuuggugau

SEQ ID NO: 6308 - RNA, 21 nt, Artificial Sequence
  Synthetic
gcagccauucguuuggugaug

SEQ ID NO: 6309 - RNA, 21 nt, Artificial Sequence
  Synthetic
cagccauucguuuggugauga

SEQ ID NO: 6310 - RNA, 21 nt, Artificial Sequence
  Synthetic
agccauucguuuggugaugau

SEQ ID NO: 6311 - RNA, 21 nt, Artificial Sequence
  Synthetic
gccauucguuuggugaugaug

SEQ ID NO: 6312 - RNA, 21 nt, Artificial Sequence
  Synthetic
ccauucguuuggugaugauga

SEQ ID NO: 6313 - RNA, 21 nt, Artificial Sequence
  Synthetic
cauucguuuggugaugaugag

SEQ ID NO: 6314 - RNA, 21 nt, Artificial Sequence
  Synthetic
auucguuuggugaugaugaga

SEQ ID NO: 6315 - RNA, 21 nt, Artificial Sequence
  Synthetic
uucguuuggugaugaugagaa

SEQ ID NO: 6316 - RNA, 21 nt, Artificial Sequence
  Synthetic
ucguuuggugaugaugagaaa

SEQ ID NO: 6317 - RNA, 21 nt, Artificial Sequence
  Synthetic
cguuuggugaugaugagaaac

SEQ ID NO: 6318 - RNA, 21 nt, Artificial Sequence
  Synthetic
guuuggugaugaugagaaaca

SEQ ID NO: 6319 - RNA, 21 nt, Artificial Sequence
  Synthetic
uuuggugaugaugagaaacag

SEQ ID NO: 6320 - RNA, 21 nt, Artificial Sequence
  Synthetic
uuggugaugaugagaaacagu

SEQ ID NO: 6321 - RNA, 21 nt, Artificial Sequence
  Synthetic
uggugaugaugagaaacagug

SEQ ID NO: 6322 - RNA, 21 nt, Artificial Sequence
  Synthetic
ggugaugaugagaaacagugg

SEQ ID NO: 6323 - RNA, 21 nt, Artificial Sequence
  Synthetic
gugaugaugagaaacaguggu

SEQ ID NO: 6324 - RNA, 21 nt, Artificial Sequence
  Synthetic
ugaugaugagaaacaguggug

SEQ ID NO: 6325 - RNA, 21 nt, Artificial Sequence
  Synthetic
gaugaugagaaacaguggugg

SEQ ID NO: 6326 - RNA, 21 nt, Artificial Sequence
  Synthetic
augaugagaaacaguggugga

SEQ ID NO: 6327 - RNA, 21 nt, Artificial Sequence
  Synthetic
ugaugagaaacagugguggac

SEQ ID NO: 6328 - RNA, 21 nt, Artificial Sequence
  Synthetic
gaugagaaacagugguggaca

SEQ ID NO: 6329 - RNA, 21 nt, Artificial Sequence
  Synthetic
augagaaacagugguggacau

SEQ ID NO: 6330 - RNA, 21 nt, Artificial Sequence
  Synthetic
ugagaaacagugguggacauu

SEQ ID NO: 6331 - RNA, 21 nt, Artificial Sequence
  Synthetic
gagaaacagugguggacauuu

SEQ ID NO: 6332 - RNA, 21 nt, Artificial Sequence
  Synthetic
agaaacagugguggacauuuc

SEQ ID NO: 6333 - RNA, 21 nt, Artificial Sequence
  Synthetic
gaaacagugguggacauuucc

SEQ ID NO: 6334 - RNA, 21 nt, Artificial Sequence
  Synthetic
aaacagugguggacauuuccu

SEQ ID NO: 6335 - RNA, 21 nt, Artificial Sequence
  Synthetic
aacagugguggacauuuccug

SEQ ID NO: 6336 - RNA, 21 nt, Artificial Sequence
  Synthetic
acagugguggacauuuccuga

SEQ ID NO: 6337 - RNA, 21 nt, Artificial Sequence
  Synthetic
cagugguggacauuuccugag

SEQ ID NO: 6338 - RNA, 21 nt, Artificial Sequence
  Synthetic
agugguggacauuuccugagg

SEQ ID NO: 6339 - RNA, 21 nt, Artificial Sequence
  Synthetic
gugguggacauuuccugagga

SEQ ID NO: 6340 - RNA, 21 nt, Artificial Sequence
  Synthetic
ugguggacauuuccugaggaa

SEQ ID NO: 6341 - RNA, 21 nt, Artificial Sequence
  Synthetic
gguggacauuuccugaggaag

SEQ ID NO: 6342 - RNA, 21 nt, Artificial Sequence
  Synthetic
guggacauuuccugaggaaga

SEQ ID NO: 6343 - RNA, 21 nt, Artificial Sequence
  Synthetic
uggacauuuccugaggaagag

SEQ ID NO: 6344 - RNA, 21 nt, Artificial Sequence
  Synthetic
ggacauuuccugaggaagagg

SEQ ID NO: 6345 - RNA, 21 nt, Artificial Sequence
  Synthetic
gacauuuccugaggaagaggu

SEQ ID NO: 6346 - RNA, 21 nt, Artificial Sequence
  Synthetic
acauuuccugaggaagaggug

SEQ ID NO: 6347 - RNA, 21 nt, Artificial Sequence
  Synthetic
cauuuccugaggaagaggugc

SEQ ID NO: 6348 - RNA, 21 nt, Artificial Sequence
  Synthetic
auuuccugaggaagaggugcu

SEQ ID NO: 6349 - RNA, 21 nt, Artificial Sequence
  Synthetic
uuuccugaggaagaggugcua

SEQ ID NO: 6350 - RNA, 21 nt, Artificial Sequence
  Synthetic
uuccugaggaagaggugcuac

SEQ ID NO: 6351 - RNA, 21 nt, Artificial Sequence
  Synthetic
uccugaggaagaggugcuaca

SEQ ID NO: 6352 - RNA, 21 nt, Artificial Sequence
  Synthetic
ccugaggaagaggugcuacag

SEQ ID NO: 6353 - RNA, 21 nt, Artificial Sequence
  Synthetic
cugaggaagaggugcuacagu

SEQ ID NO: 6354 - RNA, 21 nt, Artificial Sequence
  Synthetic
ugaggaagaggugcuacaguu

SEQ ID NO: 6355 - RNA, 21 nt, Artificial Sequence
  Synthetic
gaggaagaggugcuacaguuc

SEQ ID NO: 6356 - RNA, 21 nt, Artificial Sequence
  Synthetic
aggaagaggugcuacaguucu

SEQ ID NO: 6357 - RNA, 21 nt, Artificial Sequence
  Synthetic
ggaagaggugcuacaguucug

SEQ ID NO: 6358 - RNA, 21 nt, Artificial Sequence
  Synthetic
gaagaggugcuacaguucugc

SEQ ID NO: 6359 - RNA, 21 nt, Artificial Sequence
  Synthetic
aagaggugcuacaguucugcc

SEQ ID NO: 6360 - RNA, 21 nt, Artificial Sequence
  Synthetic
agaggugcuacaguucugcca

SEQ ID NO: 6361 - RNA, 21 nt, Artificial Sequence
  Synthetic
gaggugcuacaguucugccag

SEQ ID NO: 6362 - RNA, 21 nt, Artificial Sequence
  Synthetic
aggugcuacaguucugccaga

SEQ ID NO: 6363 - RNA, 21 nt, Artificial Sequence
  Synthetic
ggugcuacaguucugccagag

SEQ ID NO: 6364 - RNA, 21 nt, Artificial Sequence
  Synthetic
gugcuacaguucugccagaga

SEQ ID NO: 6365 - RNA, 21 nt, Artificial Sequence
  Synthetic
ugcuacaguucugccagagau

SEQ ID NO: 6366 - RNA, 21 nt, Artificial Sequence
  Synthetic
gcuacaguucugccagagauc

SEQ ID NO: 6367 - RNA, 21 nt, Artificial Sequence
  Synthetic
cuacaguucugccagagauca

SEQ ID NO: 6368 - RNA, 21 nt, Artificial Sequence
  Synthetic
uacaguucugccagagaucag

SEQ ID NO: 6369 - RNA, 21 nt, Artificial Sequence
  Synthetic
acaguucugccagagaucagu

SEQ ID NO: 6370 - RNA, 21 nt, Artificial Sequence
  Synthetic
caguucugccagagaucaguu

SEQ ID NO: 6371 - RNA, 21 nt, Artificial Sequence
  Synthetic
aguucugccagagaucaguug

SEQ ID NO: 6372 - RNA, 21 nt, Artificial Sequence
  Synthetic
guucugccagagaucaguugc

SEQ ID NO: 6373 - RNA, 21 nt, Artificial Sequence
  Synthetic
uucugccagagaucaguugcg

SEQ ID NO: 6374 - RNA, 21 nt, Artificial Sequence
  Synthetic
ucugccagagaucaguugcgu

SEQ ID NO: 6375 - RNA, 21 nt, Artificial Sequence
  Synthetic
cugccagagaucaguugcgug

SEQ ID NO: 6376 - RNA, 21 nt, Artificial Sequence
  Synthetic
ugccagagaucaguugcgugu

SEQ ID NO: 6377 - RNA, 21 nt, Artificial Sequence
  Synthetic
gccagagaucaguugcguguc

SEQ ID NO: 6378 - RNA, 21 nt, Artificial Sequence
  Synthetic
ccagagaucaguugcgugucc

SEQ ID NO: 6379 - RNA, 21 nt, Artificial Sequence
  Synthetic
cagagaucaguugcgugucca

SEQ ID NO: 6380 - RNA, 21 nt, Artificial Sequence
  Synthetic
agagaucaguugcguguccau

SEQ ID NO: 6381 - RNA, 21 nt, Artificial Sequence
  Synthetic
gagaucaguugcguguccauu

SEQ ID NO: 6382 - RNA, 21 nt, Artificial Sequence
  Synthetic
agaucaguugcguguccauug

SEQ ID NO: 6383 - RNA, 21 nt, Artificial Sequence
  Synthetic
gaucaguugcguguccauugc

SEQ ID NO: 6384 - RNA, 21 nt, Artificial Sequence
  Synthetic
aucaguugcguguccauugcc

SEQ ID NO: 6385 - RNA, 21 nt, Artificial Sequence
  Synthetic
ucaguugcguguccauugccc

SEQ ID NO: 6386 - RNA, 21 nt, Artificial Sequence
  Synthetic
caguugcguguccauugccca

SEQ ID NO: 6387 - RNA, 21 nt, Artificial Sequence
  Synthetic
aguugcguguccauugcccac

SEQ ID NO: 6388 - RNA, 21 nt, Artificial Sequence
  Synthetic
guugcguguccauugcccacg

SEQ ID NO: 6389 - RNA, 21 nt, Artificial Sequence
  Synthetic
uugcguguccauugcccacga

SEQ ID NO: 6390 - RNA, 21 nt, Artificial Sequence
  Synthetic
ugcguguccauugcccacgau

SEQ ID NO: 6391 - RNA, 21 nt, Artificial Sequence
  Synthetic
gcguguccauugcccacgauc

SEQ ID NO: 6392 - RNA, 21 nt, Artificial Sequence
  Synthetic
cguguccauugcccacgaucc

SEQ ID NO: 6393 - RNA, 21 nt, Artificial Sequence
  Synthetic
guguccauugcccacgaucca

SEQ ID NO: 6394 - RNA, 21 nt, Artificial Sequence
  Synthetic
uguccauugcccacgauccau

SEQ ID NO: 6395 - RNA, 21 nt, Artificial Sequence
  Synthetic
guccauugcccacgauccauu

SEQ ID NO: 6396 - RNA, 21 nt, Artificial Sequence
  Synthetic
uccauugcccacgauccauug

SEQ ID NO: 6397 - RNA, 21 nt, Artificial Sequence
  Synthetic
ccauugcccacgauccauugg

SEQ ID NO: 6398 - RNA, 21 nt, Artificial Sequence
  Synthetic
cauugcccacgauccauuggc

SEQ ID NO: 6399 - RNA, 21 nt, Artificial Sequence
  Synthetic
auugcccacgauccauuggcu

SEQ ID NO: 6400 - RNA, 21 nt, Artificial Sequence
  Synthetic
uugcccacgauccauuggcug

SEQ ID NO: 6401 - RNA, 21 nt, Artificial Sequence
  Synthetic
ugcccacgauccauuggcuga

SEQ ID NO: 6402 - RNA, 21 nt, Artificial Sequence
  Synthetic
gcccacgauccauuggcugac

SEQ ID NO: 6403 - RNA, 21 nt, Artificial Sequence
  Synthetic
cccacgauccauuggcugacg

SEQ ID NO: 6404 - RNA, 21 nt, Artificial Sequence
  Synthetic
ccacgauccauuggcugacga

SEQ ID NO: 6405 - RNA, 21 nt, Artificial Sequence
  Synthetic
cacgauccauuggcugacgau

SEQ ID NO: 6406 - RNA, 21 nt, Artificial Sequence
  Synthetic
acgauccauuggcugacgauc

SEQ ID NO: 6407 - RNA, 21 nt, Artificial Sequence
  Synthetic
cgauccauuggcugacgaucg

SEQ ID NO: 6408 - RNA, 21 nt, Artificial Sequence
  Synthetic
gauccauuggcugacgaucgu

SEQ ID NO: 6409 - RNA, 21 nt, Artificial Sequence
  Synthetic
auccauuggcugacgaucgug

SEQ ID NO: 6410 - RNA, 21 nt, Artificial Sequence
  Synthetic
uccauuggcugacgaucgugg

SEQ ID NO: 6411 - RNA, 21 nt, Artificial Sequence
  Synthetic
ccauuggcugacgaucgugga

SEQ ID NO: 6412 - RNA, 21 nt, Artificial Sequence
  Synthetic
cauuggcugacgaucguggag

SEQ ID NO: 6413 - RNA, 21 nt, Artificial Sequence
  Synthetic
auuggcugacgaucguggaga

SEQ ID NO: 6414 - RNA, 21 nt, Artificial Sequence
  Synthetic
uuggcugacgaucguggagac

SEQ ID NO: 6415 - RNA, 21 nt, Artificial Sequence
  Synthetic
uggcugacgaucguggagacg

SEQ ID NO: 6416 - RNA, 21 nt, Artificial Sequence
  Synthetic
ggcugacgaucguggagacga

SEQ ID NO: 6417 - RNA, 21 nt, Artificial Sequence
  Synthetic
gcugacgaucguggagacgaa

SEQ ID NO: 6418 - RNA, 21 nt, Artificial Sequence
  Synthetic
cugacgaucguggagacgaac

SEQ ID NO: 6419 - RNA, 21 nt, Artificial Sequence
  Synthetic
ugacgaucguggagacgaaca

SEQ ID NO: 6420 - RNA, 21 nt, Artificial Sequence
  Synthetic
gacgaucguggagacgaacag

SEQ ID NO: 6421 - RNA, 21 nt, Artificial Sequence
  Synthetic
acgaucguggagacgaacagc

SEQ ID NO: 6422 - RNA, 21 nt, Artificial Sequence
  Synthetic
cgaucguggagacgaacagca

SEQ ID NO: 6423 - RNA, 21 nt, Artificial Sequence
  Synthetic
gaucguggagacgaacagcag

SEQ ID NO: 6424 - RNA, 21 nt, Artificial Sequence
  Synthetic
aucguggagacgaacagcagc

SEQ ID NO: 6425 - RNA, 21 nt, Artificial Sequence
  Synthetic
ucguggagacgaacagcagca

SEQ ID NO: 6426 - RNA, 21 nt, Artificial Sequence
  Synthetic
cguggagacgaacagcagcac

SEQ ID NO: 6427 - RNA, 21 nt, Artificial Sequence
  Synthetic
guggagacgaacagcagcacc

SEQ ID NO: 6428 - RNA, 21 nt, Artificial Sequence
  Synthetic
uggagacgaacagcagcacca

SEQ ID NO: 6429 - RNA, 21 nt, Artificial Sequence
  Synthetic
ggagacgaacagcagcaccag

SEQ ID NO: 6430 - RNA, 21 nt, Artificial Sequence
  Synthetic
gagacgaacagcagcaccagc

SEQ ID NO: 6431 - RNA, 21 nt, Artificial Sequence
  Synthetic
agacgaacagcagcaccagca

SEQ ID NO: 6432 - RNA, 21 nt, Artificial Sequence
  Synthetic
gacgaacagcagcaccagcac

SEQ ID NO: 6433 - RNA, 21 nt, Artificial Sequence
  Synthetic
acgaacagcagcaccagcacc

SEQ ID NO: 6434 - RNA, 21 nt, Artificial Sequence
  Synthetic
cgaacagcagcaccagcaccg

SEQ ID NO: 6435 - RNA, 21 nt, Artificial Sequence
  Synthetic
gaacagcagcaccagcaccgc

SEQ ID NO: 6436 - RNA, 21 nt, Artificial Sequence
  Synthetic
aacagcagcaccagcaccgcg

SEQ ID NO: 6437 - RNA, 21 nt, Artificial Sequence
  Synthetic
acagcagcaccagcaccgcga

SEQ ID NO: 6438 - RNA, 21 nt, Artificial Sequence
  Synthetic
cagcagcaccagcaccgcgac

SEQ ID NO: 6439 - RNA, 21 nt, Artificial Sequence
  Synthetic
agcagcaccagcaccgcgacg

SEQ ID NO: 6440 - RNA, 21 nt, Artificial Sequence
  Synthetic
gcagcaccagcaccgcgacgu

SEQ ID NO: 6441 - RNA, 21 nt, Artificial Sequence
  Synthetic
cagcaccagcaccgcgacgug

SEQ ID NO: 6442 - RNA, 21 nt, Artificial Sequence
  Synthetic
agcaccagcaccgcgacgugg

SEQ ID NO: 6443 - RNA, 21 nt, Artificial Sequence
  Synthetic
gcaccagcaccgcgacgugga

SEQ ID NO: 6444 - RNA, 21 nt, Artificial Sequence
  Synthetic
caccagcaccgcgacguggag

SEQ ID NO: 6445 - RNA, 21 nt, Artificial Sequence
  Synthetic
accagcaccgcgacguggagg

SEQ ID NO: 6446 - RNA, 21 nt, Artificial Sequence
  Synthetic
ccagcaccgcgacguggagga

SEQ ID NO: 6447 - RNA, 21 nt, Artificial Sequence
  Synthetic
cagcaccgcgacguggaggac

SEQ ID NO: 6448 - RNA, 21 nt, Artificial Sequence
  Synthetic
agcaccgcgacguggaggacg

SEQ ID NO: 6449 - RNA, 21 nt, Artificial Sequence
  Synthetic
gcaccgcgacguggaggacga

SEQ ID NO: 6450 - RNA, 21 nt, Artificial Sequence
  Synthetic
caccgcgacguggaggacgau

SEQ ID NO: 6451 - RNA, 21 nt, Artificial Sequence
  Synthetic
accgcgacguggaggacgaug

SEQ ID NO: 6452 - RNA, 21 nt, Artificial Sequence
  Synthetic
ccgcgacguggaggacgauga

SEQ ID NO: 6453 - RNA, 21 nt, Artificial Sequence
  Synthetic
cgcgacguggaggacgaugau

SEQ ID NO: 6454 - RNA, 21 nt, Artificial Sequence
  Synthetic
gcgacguggaggacgaugaua

SEQ ID NO: 6455 - RNA, 21 nt, Artificial Sequence
  Synthetic
cgacguggaggacgaugauac

SEQ ID NO: 6456 - RNA, 21 nt, Artificial Sequence
  Synthetic
gacguggaggacgaugauacu

SEQ ID NO: 6457 - RNA, 21 nt, Artificial Sequence
  Synthetic
acguggaggacgaugauacuc

SEQ ID NO: 6458 - RNA, 21 nt, Artificial Sequence
  Synthetic
cguggaggacgaugauacuca

SEQ ID NO: 6459 - RNA, 21 nt, Artificial Sequence
  Synthetic
guggaggacgaugauacucag

SEQ ID NO: 6460 - RNA, 21 nt, Artificial Sequence
  Synthetic
uggaggacgaugauacucagc

SEQ ID NO: 6461 - RNA, 21 nt, Artificial Sequence
  Synthetic
ggaggacgaugauacucagca

SEQ ID NO: 6462 - RNA, 21 nt, Artificial Sequence
  Synthetic
gaggacgaugauacucagcaa

SEQ ID NO: 6463 - RNA, 21 nt, Artificial Sequence
  Synthetic
aggacgaugauacucagcaac

SEQ ID NO: 6464 - RNA, 21 nt, Artificial Sequence
  Synthetic
ggacgaugauacucagcaaca

SEQ ID NO: 6465 - RNA, 21 nt, Artificial Sequence
  Synthetic
gacgaugauacucagcaacag

SEQ ID NO: 6466 - RNA, 21 nt, Artificial Sequence
  Synthetic
acgaugauacucagcaacagg

SEQ ID NO: 6467 - RNA, 21 nt, Artificial Sequence
  Synthetic
cgaugauacucagcaacagga

SEQ ID NO: 6468 - RNA, 21 nt, Artificial Sequence
  Synthetic
gaugauacucagcaacaggag

SEQ ID NO: 6469 - RNA, 21 nt, Artificial Sequence
  Synthetic
augauacucagcaacaggagg

SEQ ID NO: 6470 - RNA, 21 nt, Artificial Sequence
  Synthetic
ugauacucagcaacaggagga

SEQ ID NO: 6471 - RNA, 21 nt, Artificial Sequence
  Synthetic
gauacucagcaacaggaggag

SEQ ID NO: 6472 - RNA, 21 nt, Artificial Sequence
  Synthetic
auacucagcaacaggaggagc

SEQ ID NO: 6473 - RNA, 21 nt, Artificial Sequence
  Synthetic
uacucagcaacaggaggagca

SEQ ID NO: 6474 - RNA, 21 nt, Artificial Sequence
  Synthetic
acucagcaacaggaggagcau

SEQ ID NO: 6475 - RNA, 21 nt, Artificial Sequence
  Synthetic
cucagcaacaggaggagcauu

SEQ ID NO: 6476 - RNA, 21 nt, Artificial Sequence
  Synthetic
ucagcaacaggaggagcauuc

SEQ ID NO: 6477 - RNA, 21 nt, Artificial Sequence
  Synthetic
cagcaacaggaggagcauucu

SEQ ID NO: 6478 - RNA, 21 nt, Artificial Sequence
  Synthetic
agcaacaggaggagcauucug

SEQ ID NO: 6479 - RNA, 21 nt, Artificial Sequence
  Synthetic
gcaacaggaggagcauucugg

SEQ ID NO: 6480 - RNA, 21 nt, Artificial Sequence
  Synthetic
caacaggaggagcauucuggc

SEQ ID NO: 6481 - RNA, 21 nt, Artificial Sequence
  Synthetic
aacaggaggagcauucuggcg

SEQ ID NO: 6482 - RNA, 21 nt, Artificial Sequence
  Synthetic
acaggaggagcauucuggcgg

SEQ ID NO: 6483 - RNA, 21 nt, Artificial Sequence
  Synthetic
caggaggagcauucuggcggc

SEQ ID NO: 6484 - RNA, 21 nt, Artificial Sequence
  Synthetic
aggaggagcauucuggcggca

SEQ ID NO: 6485 - RNA, 21 nt, Artificial Sequence
  Synthetic
ggaggagcauucuggcggcaa

SEQ ID NO: 6486 - RNA, 21 nt, Artificial Sequence
  Synthetic
gaggagcauucuggcggcaag

SEQ ID NO: 6487 - RNA, 21 nt, Artificial Sequence
  Synthetic
aggagcauucuggcggcaagu

SEQ ID NO: 6488 - RNA, 21 nt, Artificial Sequence
  Synthetic
ggagcauucuggcggcaaguu

SEQ ID NO: 6489 - RNA, 21 nt, Artificial Sequence
  Synthetic
gagcauucuggcggcaaguuc

SEQ ID NO: 6490 - RNA, 21 nt, Artificial Sequence
  Synthetic
agcauucuggcggcaaguucu

SEQ ID NO: 6491 - RNA, 21 nt, Artificial Sequence
  Synthetic
gcauucuggcggcaaguucug

SEQ ID NO: 6492 - RNA, 21 nt, Artificial Sequence
  Synthetic
cauucuggcggcaaguucugc

SEQ ID NO: 6493 - RNA, 21 nt, Artificial Sequence
  Synthetic
auucuggcggcaaguucugcu

SEQ ID NO: 6494 - RNA, 21 nt, Artificial Sequence
  Synthetic
uucuggcggcaaguucugcuc

SEQ ID NO: 6495 - RNA, 21 nt, Artificial Sequence
  Synthetic
ucuggcggcaaguucugcuca

SEQ ID NO: 6496 - RNA, 21 nt, Artificial Sequence
  Synthetic
cuggcggcaaguucugcucag

SEQ ID NO: 6497 - RNA, 21 nt, Artificial Sequence
  Synthetic
uggcggcaaguucugcucagc

SEQ ID NO: 6498 - RNA, 21 nt, Artificial Sequence
  Synthetic
ggcggcaaguucugcucagcg

SEQ ID NO: 6499 - RNA, 21 nt, Artificial Sequence
  Synthetic
gcggcaaguucugcucagcgg

SEQ ID NO: 6500 - RNA, 21 nt, Artificial Sequence
  Synthetic
cggcaaguucugcucagcgga

SEQ ID NO: 6501 - RNA, 21 nt, Artificial Sequence
  Synthetic
ggcaaguucugcucagcggag

SEQ ID NO: 6502 - RNA, 21 nt, Artificial Sequence
  Synthetic
gcaaguucugcucagcggagu

SEQ ID NO: 6503 - RNA, 21 nt, Artificial Sequence
  Synthetic
caaguucugcucagcggaguu

SEQ ID NO: 6504 - RNA, 21 nt, Artificial Sequence
  Synthetic
aaguucugcucagcggaguuu

SEQ ID NO: 6505 - RNA, 21 nt, Artificial Sequence
  Synthetic
aguucugcucagcggaguuuc

SEQ ID NO: 6506 - RNA, 21 nt, Artificial Sequence
  Synthetic
guucugcucagcggaguuucu

SEQ ID NO: 6507 - RNA, 21 nt, Artificial Sequence
  Synthetic
uucugcucagcggaguuucug

SEQ ID NO: 6508 - RNA, 21 nt, Artificial Sequence
  Synthetic
ucugcucagcggaguuucugc

SEQ ID NO: 6509 - RNA, 21 nt, Artificial Sequence
  Synthetic
cugcucagcggaguuucugca

SEQ ID NO: 6510 - RNA, 21 nt, Artificial Sequence
  Synthetic
ugcucagcggaguuucugcag

SEQ ID NO: 6511 - RNA, 21 nt, Artificial Sequence
  Synthetic
gcucagcggaguuucugcagc

SEQ ID NO: 6512 - RNA, 21 nt, Artificial Sequence
  Synthetic
cucagcggaguuucugcagcc

SEQ ID NO: 6513 - RNA, 21 nt, Artificial Sequence
  Synthetic
ucagcggaguuucugcagccc

SEQ ID NO: 6514 - RNA, 21 nt, Artificial Sequence
  Synthetic
cagcggaguuucugcagccca

SEQ ID NO: 6515 - RNA, 21 nt, Artificial Sequence
  Synthetic
agcggaguuucugcagcccaa

SEQ ID NO: 6516 - RNA, 21 nt, Artificial Sequence
  Synthetic
gcggaguuucugcagcccaaa

SEQ ID NO: 6517 - RNA, 21 nt, Artificial Sequence
  Synthetic
cggaguuucugcagcccaaag

SEQ ID NO: 6518 - RNA, 21 nt, Artificial Sequence
  Synthetic
ggaguuucugcagcccaaagg

SEQ ID NO: 6519 - RNA, 21 nt, Artificial Sequence
  Synthetic
gaguuucugcagcccaaagga

SEQ ID NO: 6520 - RNA, 21 nt, Artificial Sequence
  Synthetic
aguuucugcagcccaaaggaa

SEQ ID NO: 6521 - RNA, 21 nt, Artificial Sequence
  Synthetic
guuucugcagcccaaaggaac

SEQ ID NO: 6522 - RNA, 21 nt, Artificial Sequence
  Synthetic
uuucugcagcccaaaggaaca

SEQ ID NO: 6523 - RNA, 21 nt, Artificial Sequence
  Synthetic
uucugcagcccaaaggaacag

SEQ ID NO: 6524 - RNA, 21 nt, Artificial Sequence
  Synthetic
ucugcagcccaaaggaacagc

SEQ ID NO: 6525 - RNA, 21 nt, Artificial Sequence
  Synthetic
cugcagcccaaaggaacagcu

SEQ ID NO: 6526 - RNA, 21 nt, Artificial Sequence
  Synthetic
ugcagcccaaaggaacagcug

SEQ ID NO: 6527 - RNA, 21 nt, Artificial Sequence
  Synthetic
gcagcccaaaggaacagcugu

SEQ ID NO: 6528 - RNA, 21 nt, Artificial Sequence
  Synthetic
cagcccaaaggaacagcuguc

SEQ ID NO: 6529 - RNA, 21 nt, Artificial Sequence
  Synthetic
agcccaaaggaacagcugucc

SEQ ID NO: 6530 - RNA, 21 nt, Artificial Sequence
  Synthetic
gcccaaaggaacagcuguccc

SEQ ID NO: 6531 - RNA, 21 nt, Artificial Sequence
  Synthetic
cccaaaggaacagcugucccg

SEQ ID NO: 6532 - RNA, 21 nt, Artificial Sequence
  Synthetic
ccaaaggaacagcugucccga

SEQ ID NO: 6533 - RNA, 21 nt, Artificial Sequence
  Synthetic
caaaggaacagcugucccgau

SEQ ID NO: 6534 - RNA, 21 nt, Artificial Sequence
  Synthetic
aaaggaacagcugucccgauc

SEQ ID NO: 6535 - RNA, 21 nt, Artificial Sequence
  Synthetic
aaggaacagcugucccgaucc

SEQ ID NO: 6536 - RNA, 21 nt, Artificial Sequence
  Synthetic
aggaacagcugucccgauccu

SEQ ID NO: 6537 - RNA, 21 nt, Artificial Sequence
  Synthetic
ggaacagcugucccgauccuc

SEQ ID NO: 6538 - RNA, 21 nt, Artificial Sequence
  Synthetic
gaacagcugucccgauccuca

SEQ ID NO: 6539 - RNA, 21 nt, Artificial Sequence
  Synthetic
aacagcugucccgauccucag

SEQ ID NO: 6540 - RNA, 21 nt, Artificial Sequence
  Synthetic
acagcugucccgauccucagg

SEQ ID NO: 6541 - RNA, 21 nt, Artificial Sequence
  Synthetic
cagcugucccgauccucaggg

SEQ ID NO: 6542 - RNA, 21 nt, Artificial Sequence
  Synthetic
agcugucccgauccucagggu

SEQ ID NO: 6543 - RNA, 21 nt, Artificial Sequence
  Synthetic
gcugucccgauccucagggug

SEQ ID NO: 6544 - RNA, 21 nt, Artificial Sequence
  Synthetic
cugucccgauccucagggugg

SEQ ID NO: 6545 - RNA, 21 nt, Artificial Sequence
  Synthetic
ugucccgauccucaggguggc

SEQ ID NO: 6546 - RNA, 21 nt, Artificial Sequence
  Synthetic
gucccgauccucaggguggcc

SEQ ID NO: 6547 - RNA, 21 nt, Artificial Sequence
  Synthetic
ucccgauccucaggguggccu

SEQ ID NO: 6548 - RNA, 21 nt, Artificial Sequence
  Synthetic
cccgauccucaggguggccuc

SEQ ID NO: 6549 - RNA, 21 nt, Artificial Sequence
  Synthetic
ccgauccucaggguggccuca

SEQ ID NO: 6550 - RNA, 21 nt, Artificial Sequence
  Synthetic
cgauccucaggguggccucaa

SEQ ID NO: 6551 - RNA, 21 nt, Artificial Sequence
  Synthetic
gauccucaggguggccucaaa

SEQ ID NO: 6552 - RNA, 21 nt, Artificial Sequence
  Synthetic
auccucaggguggccucaaac

SEQ ID NO: 6553 - RNA, 21 nt, Artificial Sequence
  Synthetic
uccucaggguggccucaaaca

SEQ ID NO: 6554 - RNA, 21 nt, Artificial Sequence
  Synthetic
ccucaggguggccucaaacac

SEQ ID NO: 6555 - RNA, 21 nt, Artificial Sequence
  Synthetic
cucaggguggccucaaacaca

SEQ ID NO: 6556 - RNA, 21 nt, Artificial Sequence
  Synthetic
ucaggguggccucaaacacaa

SEQ ID NO: 6557 - RNA, 21 nt, Artificial Sequence
  Synthetic
caggguggccucaaacacaaa

SEQ ID NO: 6558 - RNA, 21 nt, Artificial Sequence
  Synthetic
aggguggccucaaacacaaac

SEQ ID NO: 6559 - RNA, 21 nt, Artificial Sequence
  Synthetic
ggguggccucaaacacaaacu

SEQ ID NO: 6560 - RNA, 21 nt, Artificial Sequence
  Synthetic
gguggccucaaacacaaacuc

SEQ ID NO: 6561 - RNA, 21 nt, Artificial Sequence
  Synthetic
guggccucaaacacaaacucg

SEQ ID NO: 6562 - RNA, 21 nt, Artificial Sequence
  Synthetic
uggccucaaacacaaacucgg

SEQ ID NO: 6563 - RNA, 21 nt, Artificial Sequence
  Synthetic
ggccucaaacacaaacucggg

SEQ ID NO: 6564 - RNA, 21 nt, Artificial Sequence
  Synthetic
gccucaaacacaaacucgggu

SEQ ID NO: 6565 - RNA, 21 nt, Artificial Sequence
  Synthetic
ccucaaacacaaacucgggug

SEQ ID NO: 6566 - RNA, 21 nt, Artificial Sequence
  Synthetic
cucaaacacaaacucgggugc

SEQ ID NO: 6567 - RNA, 21 nt, Artificial Sequence
  Synthetic
ucaaacacaaacucgggugcg

SEQ ID NO: 6568 - RNA, 21 nt, Artificial Sequence
  Synthetic
caaacacaaacucgggugcgu

SEQ ID NO: 6569 - RNA, 21 nt, Artificial Sequence
  Synthetic
aaacacaaacucgggugcguu

SEQ ID NO: 6570 - RNA, 21 nt, Artificial Sequence
  Synthetic
aacacaaacucgggugcguug

SEQ ID NO: 6571 - RNA, 21 nt, Artificial Sequence
  Synthetic
acacaaacucgggugcguugg

SEQ ID NO: 6572 - RNA, 21 nt, Artificial Sequence
  Synthetic
cacaaacucgggugcguuggc

SEQ ID NO: 6573 - RNA, 21 nt, Artificial Sequence
  Synthetic
acaaacucgggugcguuggcu

SEQ ID NO: 6574 - RNA, 21 nt, Artificial Sequence
  Synthetic
caaacucgggugcguuggcuc

SEQ ID NO: 6575 - RNA, 21 nt, Artificial Sequence
  Synthetic
aaacucgggugcguuggcucc

SEQ ID NO: 6576 - RNA, 21 nt, Artificial Sequence
  Synthetic
aacucgggugcguuggcuccg

SEQ ID NO: 6577 - RNA, 21 nt, Artificial Sequence
  Synthetic
acucgggugcguuggcuccgc

SEQ ID NO: 6578 - RNA, 21 nt, Artificial Sequence
  Synthetic
cucgggugcguuggcuccgcu

SEQ ID NO: 6579 - RNA, 21 nt, Artificial Sequence
  Synthetic
ucgggugcguuggcuccgcug

SEQ ID NO: 6580 - RNA, 21 nt, Artificial Sequence
  Synthetic
cgggugcguuggcuccgcugc

SEQ ID NO: 6581 - RNA, 21 nt, Artificial Sequence
  Synthetic
gggugcguuggcuccgcugcu

SEQ ID NO: 6582 - RNA, 21 nt, Artificial Sequence
  Synthetic
ggugcguuggcuccgcugcug

SEQ ID NO: 6583 - RNA, 21 nt, Artificial Sequence
  Synthetic
gugcguuggcuccgcugcugg

SEQ ID NO: 6584 - RNA, 21 nt, Artificial Sequence
  Synthetic
ugcguuggcuccgcugcuggc

SEQ ID NO: 6585 - RNA, 21 nt, Artificial Sequence
  Synthetic
gcguuggcuccgcugcuggcg

SEQ ID NO: 6586 - RNA, 21 nt, Artificial Sequence
  Synthetic
cguuggcuccgcugcuggcgc

SEQ ID NO: 6587 - RNA, 21 nt, Artificial Sequence
  Synthetic
guuggcuccgcugcuggcgcc

SEQ ID NO: 6588 - RNA, 21 nt, Artificial Sequence
  Synthetic
uuggcuccgcugcuggcgccg

SEQ ID NO: 6589 - RNA, 21 nt, Artificial Sequence
  Synthetic
uggcuccgcugcuggcgccgc

SEQ ID NO: 6590 - RNA, 21 nt, Artificial Sequence
  Synthetic
ggcuccgcugcuggcgccgcc

SEQ ID NO: 6591 - RNA, 21 nt, Artificial Sequence
  Synthetic
gcuccgcugcuggcgccgcca

SEQ ID NO: 6592 - RNA, 21 nt, Artificial Sequence
  Synthetic
cuccgcugcuggcgccgccaa

SEQ ID NO: 6593 - RNA, 21 nt, Artificial Sequence
  Synthetic
uccgcugcuggcgccgccaaa

SEQ ID NO: 6594 - RNA, 21 nt, Artificial Sequence
  Synthetic
ccgcugcuggcgccgccaaag

SEQ ID NO: 6595 - RNA, 21 nt, Artificial Sequence
  Synthetic
cgcugcuggcgccgccaaagc

SEQ ID NO: 6596 - RNA, 21 nt, Artificial Sequence
  Synthetic
gcugcuggcgccgccaaagcu

SEQ ID NO: 6597 - RNA, 21 nt, Artificial Sequence
  Synthetic
cugcuggcgccgccaaagcug

SEQ ID NO: 6598 - RNA, 21 nt, Artificial Sequence
  Synthetic
ugcuggcgccgccaaagcugc

SEQ ID NO: 6599 - RNA, 21 nt, Artificial Sequence
  Synthetic
gcuggcgccgccaaagcugcg

SEQ ID NO: 6600 - RNA, 21 nt, Artificial Sequence
  Synthetic
cuggcgccgccaaagcugcgc

SEQ ID NO: 6601 - RNA, 21 nt, Artificial Sequence
  Synthetic
uggcgccgccaaagcugcgcu

SEQ ID NO: 6602 - RNA, 21 nt, Artificial Sequence
  Synthetic
ggcgccgccaaagcugcgcug

SEQ ID NO: 6603 - RNA, 21 nt, Artificial Sequence
  Synthetic
gcgccgccaaagcugcgcugc

SEQ ID NO: 6604 - RNA, 21 nt, Artificial Sequence
  Synthetic
cgccgccaaagcugcgcugcg

SEQ ID NO: 6605 - RNA, 21 nt, Artificial Sequence
  Synthetic
gccgccaaagcugcgcugcgg

SEQ ID NO: 6606 - RNA, 21 nt, Artificial Sequence
  Synthetic
ccgccaaagcugcgcugcggg

SEQ ID NO: 6607 - RNA, 21 nt, Artificial Sequence
  Synthetic
cgccaaagcugcgcugcgggg

SEQ ID NO: 6608 - RNA, 21 nt, Artificial Sequence
  Synthetic
gccaaagcugcgcugcggggc

SEQ ID NO: 6609 - RNA, 21 nt, Artificial Sequence
  Synthetic
ccaaagcugcgcugcggggcu

SEQ ID NO: 6610 - RNA, 21 nt, Artificial Sequence
  Synthetic
caaagcugcgcugcggggcug

SEQ ID NO: 6611 - RNA, 21 nt, Artificial Sequence
  Synthetic
aaagcugcgcugcggggcugc

SEQ ID NO: 6612 - RNA, 21 nt, Artificial Sequence
  Synthetic
aagcugcgcugcggggcugcg

SEQ ID NO: 6613 - RNA, 21 nt, Artificial Sequence
  Synthetic
agcugcgcugcggggcugcgc

SEQ ID NO: 6614 - RNA, 21 nt, Artificial Sequence
  Synthetic
gcugcgcugcggggcugcgcg

SEQ ID NO: 6615 - RNA, 21 nt, Artificial Sequence
  Synthetic
cugcgcugcggggcugcgcgc

SEQ ID NO: 6616 - RNA, 21 nt, Artificial Sequence
  Synthetic
ugcgcugcggggcugcgcgcg

SEQ ID NO: 6617 - RNA, 21 nt, Artificial Sequence
  Synthetic
gcgcugcggggcugcgcgcgc

SEQ ID NO: 6618 - RNA, 21 nt, Artificial Sequence
  Synthetic
cgcugcggggcugcgcgcgcg

SEQ ID NO: 6619 - RNA, 21 nt, Artificial Sequence
  Synthetic
gcugcggggcugcgcgcgcgc

SEQ ID NO: 6620 - RNA, 21 nt, Artificial Sequence
  Synthetic
cugcggggcugcgcgcgcgcg

SEQ ID NO: 6621 - RNA, 21 nt, Artificial Sequence
  Synthetic
ugcggggcugcgcgcgcgcga

SEQ ID NO: 6622 - RNA, 21 nt, Artificial Sequence
  Synthetic
gcggggcugcgcgcgcgcgaa

SEQ ID NO: 6623 - RNA, 21 nt, Artificial Sequence
  Synthetic
cggggcugcgcgcgcgcgaag

SEQ ID NO: 6624 - RNA, 21 nt, Artificial Sequence
  Synthetic
ggggcugcgcgcgcgcgaagc

SEQ ID NO: 6625 - RNA, 21 nt, Artificial Sequence
  Synthetic
gggcugcgcgcgcgcgaagca

SEQ ID NO: 6626 - RNA, 21 nt, Artificial Sequence
  Synthetic
ggcugcgcgcgcgcgaagcaa

SEQ ID NO: 6627 - RNA, 21 nt, Artificial Sequence
  Synthetic
gcugcgcgcgcgcgaagcaag

SEQ ID NO: 6628 - RNA, 21 nt, Artificial Sequence
  Synthetic
cugcgcgcgcgcgaagcaagg

SEQ ID NO: 6629 - RNA, 21 nt, Artificial Sequence
  Synthetic
ugcgcgcgcgcgaagcaaggg

SEQ ID NO: 6630 - RNA, 21 nt, Artificial Sequence
  Synthetic
gcgcgcgcgcgaagcaagggg

SEQ ID NO: 6631 - RNA, 21 nt, Artificial Sequence
  Synthetic
cgcgcgcgcgaagcaaggggg

SEQ ID NO: 6632 - RNA, 21 nt, Artificial Sequence
  Synthetic
gcgcgcgcgaagcaagggggc

SEQ ID NO: 6633 - RNA, 21 nt, Artificial Sequence
  Synthetic
cgcgcgcgaagcaagggggca

SEQ ID NO: 6634 - RNA, 21 nt, Artificial Sequence
  Synthetic
gcgcgcgaagcaagggggcag

SEQ ID NO: 6635 - RNA, 21 nt, Artificial Sequence
  Synthetic
cgcgcgaagcaagggggcagu

SEQ ID NO: 6636 - RNA, 21 nt, Artificial Sequence
  Synthetic
gcgcgaagcaagggggcagug

SEQ ID NO: 6637 - RNA, 21 nt, Artificial Sequence
  Synthetic
cgcgaagcaagggggcagugg

SEQ ID NO: 6638 - RNA, 21 nt, Artificial Sequence
  Synthetic
gcgaagcaagggggcaguggg

SEQ ID NO: 6639 - RNA, 21 nt, Artificial Sequence
  Synthetic
cgaagcaagggggcaguggga

SEQ ID NO: 6640 - RNA, 21 nt, Artificial Sequence
  Synthetic
gaagcaagggggcagugggag

SEQ ID NO: 6641 - RNA, 21 nt, Artificial Sequence
  Synthetic
aagcaagggggcagugggagg

SEQ ID NO: 6642 - RNA, 21 nt, Artificial Sequence
  Synthetic
agcaagggggcagugggaggc

SEQ ID NO: 6643 - RNA, 21 nt, Artificial Sequence
  Synthetic
gcaagggggcagugggaggcu

SEQ ID NO: 6644 - RNA, 21 nt, Artificial Sequence
  Synthetic
caagggggcagugggaggcuc

SEQ ID NO: 6645 - RNA, 21 nt, Artificial Sequence
  Synthetic
aagggggcagugggaggcucc

SEQ ID NO: 6646 - RNA, 21 nt, Artificial Sequence
  Synthetic
agggggcagugggaggcuccu

SEQ ID NO: 6647 - RNA, 21 nt, Artificial Sequence
  Synthetic
gggggcagugggaggcuccug

SEQ ID NO: 6648 - RNA, 21 nt, Artificial Sequence
  Synthetic
ggggcagugggaggcuccugg

SEQ ID NO: 6649 - RNA, 21 nt, Artificial Sequence
  Synthetic
gggcagugggaggcuccuggc

SEQ ID NO: 6650 - RNA, 21 nt, Artificial Sequence
  Synthetic
ggcagugggaggcuccuggcg

SEQ ID NO: 6651 - RNA, 21 nt, Artificial Sequence
  Synthetic
gcagugggaggcuccuggcgu

SEQ ID NO: 6652 - RNA, 21 nt, Artificial Sequence
  Synthetic
cagugggaggcuccuggcguu

SEQ ID NO: 6653 - RNA, 21 nt, Artificial Sequence
  Synthetic
agugggaggcuccuggcguuc

SEQ ID NO: 6654 - RNA, 21 nt, Artificial Sequence
  Synthetic
gugggaggcuccuggcguucc

SEQ ID NO: 6655 - RNA, 21 nt, Artificial Sequence
  Synthetic
ugggaggcuccuggcguuccc

SEQ ID NO: 6656 - RNA, 21 nt, Artificial Sequence
  Synthetic
gggaggcuccuggcguucccc

SEQ ID NO: 6657 - RNA, 21 nt, Artificial Sequence
  Synthetic
ggaggcuccuggcguuccccu

SEQ ID NO: 6658 - RNA, 21 nt, Artificial Sequence
  Synthetic
gaggcuccuggcguuccccuu

SEQ ID NO: 6659 - RNA, 21 nt, Artificial Sequence
  Synthetic
aggcuccuggcguuccccuuu

SEQ ID NO: 6660 - RNA, 21 nt, Artificial Sequence
  Synthetic
ggcuccuggcguuccccuuua

SEQ ID NO: 6661 - RNA, 21 nt, Artificial Sequence
  Synthetic
gcuccuggcguuccccuuuaa

SEQ ID NO: 6662 - RNA, 21 nt, Artificial Sequence
  Synthetic
cuccuggcguuccccuuuaac

SEQ ID NO: 6663 - RNA, 21 nt, Artificial Sequence
  Synthetic
uccuggcguuccccuuuaacg

SEQ ID NO: 6664 - RNA, 21 nt, Artificial Sequence
  Synthetic
ccuggcguuccccuuuaacgg

SEQ ID NO: 6665 - RNA, 21 nt, Artificial Sequence
  Synthetic
cuggcguuccccuuuaacggg

SEQ ID NO: 6666 - RNA, 21 nt, Artificial Sequence
  Synthetic
uggcguuccccuuuaacggga

SEQ ID NO: 6667 - RNA, 21 nt, Artificial Sequence
  Synthetic
ggcguuccccuuuaacgggaa

SEQ ID NO: 6668 - RNA, 21 nt, Artificial Sequence
  Synthetic
gcguuccccuuuaacgggaac

SEQ ID NO: 6669 - RNA, 21 nt, Artificial Sequence
  Synthetic
cguuccccuuuaacgggaaca

SEQ ID NO: 6670 - RNA, 21 nt, Artificial Sequence
  Synthetic
guuccccuuuaacgggaacaa

SEQ ID NO: 6671 - RNA, 21 nt, Artificial Sequence
  Synthetic
uuccccuuuaacgggaacaac

SEQ ID NO: 6672 - RNA, 21 nt, Artificial Sequence
  Synthetic
uccccuuuaacgggaacaacg

SEQ ID NO: 6673 - RNA, 21 nt, Artificial Sequence
  Synthetic
ccccuuuaacgggaacaacgc

SEQ ID NO: 6674 - RNA, 21 nt, Artificial Sequence
  Synthetic
cccuuuaacgggaacaacgcc

SEQ ID NO: 6675 - RNA, 21 nt, Artificial Sequence
  Synthetic
ccuuuaacgggaacaacgccc

SEQ ID NO: 6676 - RNA, 21 nt, Artificial Sequence
  Synthetic
cuuuaacgggaacaacgcccu

SEQ ID NO: 6677 - RNA, 21 nt, Artificial Sequence
  Synthetic
uuuaacgggaacaacgcccug

SEQ ID NO: 6678 - RNA, 21 nt, Artificial Sequence
  Synthetic
uuaacgggaacaacgcccugu

SEQ ID NO: 6679 - RNA, 21 nt, Artificial Sequence
  Synthetic
uaacgggaacaacgcccuguu

SEQ ID NO: 6680 - RNA, 21 nt, Artificial Sequence
  Synthetic
aacgggaacaacgcccuguuu

SEQ ID NO: 6681 - RNA, 21 nt, Artificial Sequence
  Synthetic
acgggaacaacgcccuguuug

SEQ ID NO: 6682 - RNA, 21 nt, Artificial Sequence
  Synthetic
cgggaacaacgcccuguuugc

SEQ ID NO: 6683 - RNA, 21 nt, Artificial Sequence
  Synthetic
gggaacaacgcccuguuugcg

SEQ ID NO: 6684 - RNA, 21 nt, Artificial Sequence
  Synthetic
ggaacaacgcccuguuugcgu

SEQ ID NO: 6685 - RNA, 21 nt, Artificial Sequence
  Synthetic
gaacaacgcccuguuugcguc

SEQ ID NO: 6686 - RNA, 21 nt, Artificial Sequence
  Synthetic
aacaacgcccuguuugcgucg

SEQ ID NO: 6687 - RNA, 21 nt, Artificial Sequence
  Synthetic
acaacgcccuguuugcgucgc

SEQ ID NO: 6688 - RNA, 21 nt, Artificial Sequence
  Synthetic
caacgcccuguuugcgucgcu

SEQ ID NO: 6689 - RNA, 21 nt, Artificial Sequence
  Synthetic
aacgcccuguuugcgucgcug

SEQ ID NO: 6690 - RNA, 21 nt, Artificial Sequence
  Synthetic
acgcccuguuugcgucgcugc

SEQ ID NO: 6691 - RNA, 21 nt, Artificial Sequence
  Synthetic
cgcccuguuugcgucgcugca

SEQ ID NO: 6692 - RNA, 21 nt, Artificial Sequence
  Synthetic
gcccuguuugcgucgcugcag

SEQ ID NO: 6693 - RNA, 21 nt, Artificial Sequence
  Synthetic
cccuguuugcgucgcugcagu

SEQ ID NO: 6694 - RNA, 21 nt, Artificial Sequence
  Synthetic
ccuguuugcgucgcugcagua

SEQ ID NO: 6695 - RNA, 21 nt, Artificial Sequence
  Synthetic
cuguuugcgucgcugcaguag

SEQ ID NO: 6696 - RNA, 21 nt, Artificial Sequence
  Synthetic
uguuugcgucgcugcaguagg

SEQ ID NO: 6697 - RNA, 21 nt, Artificial Sequence
  Synthetic
guuugcgucgcugcaguaggg

SEQ ID NO: 6698 - RNA, 21 nt, Artificial Sequence
  Synthetic
uuugcgucgcugcaguagggu

SEQ ID NO: 6699 - RNA, 21 nt, Artificial Sequence
  Synthetic
uugcgucgcugcaguagggug

SEQ ID NO: 6700 - RNA, 21 nt, Artificial Sequence
  Synthetic
ugcgucgcugcaguagggugu

SEQ ID NO: 6701 - RNA, 21 nt, Artificial Sequence
  Synthetic
gcgucgcugcaguagggugug

SEQ ID NO: 6702 - RNA, 21 nt, Artificial Sequence
  Synthetic
cgucgcugcaguagggugugu

SEQ ID NO: 6703 - RNA, 21 nt, Artificial Sequence
  Synthetic
gucgcugcaguaggguguguc

SEQ ID NO: 6704 - RNA, 21 nt, Artificial Sequence
  Synthetic
ucgcugcaguagggugugucc

SEQ ID NO: 6705 - RNA, 21 nt, Artificial Sequence
  Synthetic
cgcugcaguaggguguguccc

SEQ ID NO: 6706 - RNA, 21 nt, Artificial Sequence
  Synthetic
gcugcaguagggugugucccu

SEQ ID NO: 6707 - RNA, 21 nt, Artificial Sequence
  Synthetic
cugcaguagggugugucccug

SEQ ID NO: 6708 - RNA, 21 nt, Artificial Sequence
  Synthetic
ugcaguagggugugucccugg

SEQ ID NO: 6709 - RNA, 21 nt, Artificial Sequence
  Synthetic
gcaguagggugugucccuggg

SEQ ID NO: 6710 - RNA, 21 nt, Artificial Sequence
  Synthetic
caguagggugugucccugggu

SEQ ID NO: 6711 - RNA, 21 nt, Artificial Sequence
  Synthetic
aguagggugugucccuggguc

SEQ ID NO: 6712 - RNA, 21 nt, Artificial Sequence
  Synthetic
guagggugugucccuggguca

SEQ ID NO: 6713 - RNA, 21 nt, Artificial Sequence
  Synthetic
uagggugugucccugggucag

SEQ ID NO: 6714 - RNA, 21 nt, Artificial Sequence
  Synthetic
agggugugucccugggucagc

SEQ ID NO: 6715 - RNA, 21 nt, Artificial Sequence
  Synthetic
gggugugucccugggucagcg

SEQ ID NO: 6716 - RNA, 21 nt, Artificial Sequence
  Synthetic
ggugugucccugggucagcgu

SEQ ID NO: 6717 - RNA, 21 nt, Artificial Sequence
  Synthetic
gugugucccugggucagcgug

SEQ ID NO: 6718 - RNA, 21 nt, Artificial Sequence
  Synthetic
ugugucccugggucagcgugu

SEQ ID NO: 6719 - RNA, 21 nt, Artificial Sequence
  Synthetic
gugucccugggucagcgugug

SEQ ID NO: 6720 - RNA, 21 nt, Artificial Sequence
  Synthetic
ugucccugggucagcgugugc

SEQ ID NO: 6721 - RNA, 21 nt, Artificial Sequence
  Synthetic
gucccugggucagcgugugcg

SEQ ID NO: 6722 - RNA, 21 nt, Artificial Sequence
  Synthetic
ucccugggucagcgugugcgg

SEQ ID NO: 6723 - RNA, 21 nt, Artificial Sequence
  Synthetic
cccugggucagcgugugcggg

SEQ ID NO: 6724 - RNA, 21 nt, Artificial Sequence
  Synthetic
ccugggucagcgugugcggga

SEQ ID NO: 6725 - RNA, 21 nt, Artificial Sequence
  Synthetic
cugggucagcgugugcgggag

SEQ ID NO: 6726 - RNA, 21 nt, Artificial Sequence
  Synthetic
ugggucagcgugugcgggagg

SEQ ID NO: 6727 - RNA, 21 nt, Artificial Sequence
  Synthetic
gggucagcgugugcgggaggg

SEQ ID NO: 6728 - RNA, 21 nt, Artificial Sequence
  Synthetic
ggucagcgugugcgggagggc

SEQ ID NO: 6729 - RNA, 21 nt, Artificial Sequence
  Synthetic
gucagcgugugcgggagggcg

SEQ ID NO: 6730 - RNA, 21 nt, Artificial Sequence
  Synthetic
ucagcgugugcgggagggcgg

SEQ ID NO: 6731 - RNA, 21 nt, Artificial Sequence
  Synthetic
cagcgugugcgggagggcggg

SEQ ID NO: 6732 - RNA, 21 nt, Artificial Sequence
  Synthetic
agcgugugcgggagggcggga

SEQ ID NO: 6733 - RNA, 21 nt, Artificial Sequence
  Synthetic
gcgugugcgggagggcgggac

SEQ ID NO: 6734 - RNA, 21 nt, Artificial Sequence
  Synthetic
cgugugcgggagggcgggacu

SEQ ID NO: 6735 - RNA, 21 nt, Artificial Sequence
  Synthetic
gugugcgggagggcgggacuc

SEQ ID NO: 6736 - RNA, 21 nt, Artificial Sequence
  Synthetic
ugugcgggagggcgggacuca

SEQ ID NO: 6737 - RNA, 21 nt, Artificial Sequence
  Synthetic
gugcgggagggcgggacucag

SEQ ID NO: 6738 - RNA, 21 nt, Artificial Sequence
  Synthetic
ugcgggagggcgggacucagg

SEQ ID NO: 6739 - RNA, 21 nt, Artificial Sequence
  Synthetic
gcgggagggcgggacucaggg

SEQ ID NO: 6740 - RNA, 21 nt, Artificial Sequence
  Synthetic
cgggagggcgggacucaggga

SEQ ID NO: 6741 - RNA, 21 nt, Artificial Sequence
  Synthetic
gggagggcgggacucagggag

SEQ ID NO: 6742 - RNA, 21 nt, Artificial Sequence
  Synthetic
ggagggcgggacucagggagg

SEQ ID NO: 6743 - RNA, 21 nt, Artificial Sequence
  Synthetic
gagggcgggacucagggagga

SEQ ID NO: 6744 - RNA, 21 nt, Artificial Sequence
  Synthetic
agggcgggacucagggaggag

SEQ ID NO: 6745 - RNA, 21 nt, Artificial Sequence
  Synthetic
gggcgggacucagggaggaga

SEQ ID NO: 6746 - RNA, 21 nt, Artificial Sequence
  Synthetic
ggcgggacucagggaggagag

SEQ ID NO: 6747 - RNA, 21 nt, Artificial Sequence
  Synthetic
gcgggacucagggaggagagg

SEQ ID NO: 6748 - RNA, 21 nt, Artificial Sequence
  Synthetic
cgggacucagggaggagaggg

SEQ ID NO: 6749 - RNA, 21 nt, Artificial Sequence
  Synthetic
gggacucagggaggagagggg

SEQ ID NO: 6750 - RNA, 21 nt, Artificial Sequence
  Synthetic
ggacucagggaggagaggggg

SEQ ID NO: 6751 - RNA, 21 nt, Artificial Sequence
  Synthetic
gacucagggaggagagggggc

SEQ ID NO: 6752 - RNA, 21 nt, Artificial Sequence
  Synthetic
acucagggaggagagggggca

SEQ ID NO: 6753 - RNA, 21 nt, Artificial Sequence
  Synthetic
cucagggaggagagggggcag

SEQ ID NO: 6754 - RNA, 21 nt, Artificial Sequence
  Synthetic
ucagggaggagagggggcagg

SEQ ID NO: 6755 - RNA, 21 nt, Artificial Sequence
  Synthetic
cagggaggagagggggcagga

SEQ ID NO: 6756 - RNA, 21 nt, Artificial Sequence
  Synthetic
agggaggagagggggcaggag

SEQ ID NO: 6757 - RNA, 21 nt, Artificial Sequence
  Synthetic
gggaggagagggggcaggaga

SEQ ID NO: 6758 - RNA, 21 nt, Artificial Sequence
  Synthetic
ggaggagagggggcaggagag

SEQ ID NO: 6759 - RNA, 21 nt, Artificial Sequence
  Synthetic
gaggagagggggcaggagaga

SEQ ID NO: 6760 - RNA, 21 nt, Artificial Sequence
  Synthetic
aggagagggggcaggagagag

SEQ ID NO: 6761 - RNA, 21 nt, Artificial Sequence
  Synthetic
ggagagggggcaggagagagg

SEQ ID NO: 6762 - RNA, 21 nt, Artificial Sequence
  Synthetic
gagagggggcaggagagaggg

SEQ ID NO: 6763 - RNA, 21 nt, Artificial Sequence
  Synthetic
agagggggcaggagagaggga

SEQ ID NO: 6764 - RNA, 21 nt, Artificial Sequence
  Synthetic
gagggggcaggagagagggag

SEQ ID NO: 6765 - RNA, 21 nt, Artificial Sequence
  Synthetic
agggggcaggagagagggagg

SEQ ID NO: 6766 - RNA, 21 nt, Artificial Sequence
  Synthetic
gggggcaggagagagggaggg

SEQ ID NO: 6767 - RNA, 21 nt, Artificial Sequence
  Synthetic
ggggcaggagagagggagggc

SEQ ID NO: 6768 - RNA, 21 nt, Artificial Sequence
  Synthetic
gggcaggagagagggagggca

SEQ ID NO: 6769 - RNA, 21 nt, Artificial Sequence
  Synthetic
ggcaggagagagggagggcag

SEQ ID NO: 6770 - RNA, 21 nt, Artificial Sequence
  Synthetic
gcaggagagagggagggcagg

SEQ ID NO: 6771 - RNA, 21 nt, Artificial Sequence
  Synthetic
caggagagagggagggcagga

SEQ ID NO: 6772 - RNA, 21 nt, Artificial Sequence
  Synthetic
aggagagagggagggcaggag

SEQ ID NO: 6773 - RNA, 21 nt, Artificial Sequence
  Synthetic
ggagagagggagggcaggaga

SEQ ID NO: 6774 - RNA, 21 nt, Artificial Sequence
  Synthetic
gagagagggagggcaggagac

SEQ ID NO: 6775 - RNA, 21 nt, Artificial Sequence
  Synthetic
agagagggagggcaggagaca

SEQ ID NO: 6776 - RNA, 21 nt, Artificial Sequence
  Synthetic
gagagggagggcaggagacag

SEQ ID NO: 6777 - RNA, 21 nt, Artificial Sequence
  Synthetic
agagggagggcaggagacagu

SEQ ID NO: 6778 - RNA, 21 nt, Artificial Sequence
  Synthetic
gagggagggcaggagacaguc

SEQ ID NO: 6779 - RNA, 21 nt, Artificial Sequence
  Synthetic
agggagggcaggagacaguca

SEQ ID NO: 6780 - RNA, 21 nt, Artificial Sequence
  Synthetic
gggagggcaggagacagucac

SEQ ID NO: 6781 - RNA, 21 nt, Artificial Sequence
  Synthetic
ggagggcaggagacagucacu

SEQ ID NO: 6782 - RNA, 21 nt, Artificial Sequence
  Synthetic
gagggcaggagacagucacuu

SEQ ID NO: 6783 - RNA, 21 nt, Artificial Sequence
  Synthetic
agggcaggagacagucacuug

SEQ ID NO: 6784 - RNA, 21 nt, Artificial Sequence
  Synthetic
gggcaggagacagucacuugg

SEQ ID NO: 6785 - RNA, 21 nt, Artificial Sequence
  Synthetic
ggcaggagacagucacuuggc

SEQ ID NO: 6786 - RNA, 21 nt, Artificial Sequence
  Synthetic
gcaggagacagucacuuggcc

SEQ ID NO: 6787 - RNA, 21 nt, Artificial Sequence
  Synthetic
caggagacagucacuuggccu

SEQ ID NO: 6788 - RNA, 21 nt, Artificial Sequence
  Synthetic
aggagacagucacuuggccuu

SEQ ID NO: 6789 - RNA, 21 nt, Artificial Sequence
  Synthetic
ggagacagucacuuggccuua

SEQ ID NO: 6790 - RNA, 21 nt, Artificial Sequence
  Synthetic
gagacagucacuuggccuuaa

SEQ ID NO: 6791 - RNA, 21 nt, Artificial Sequence
  Synthetic
agacagucacuuggccuuaaa

SEQ ID NO: 6792 - RNA, 21 nt, Artificial Sequence
  Synthetic
gacagucacuuggccuuaaau

SEQ ID NO: 6793 - RNA, 21 nt, Artificial Sequence
  Synthetic
acagucacuuggccuuaaaug

SEQ ID NO: 6794 - RNA, 21 nt, Artificial Sequence
  Synthetic
cagucacuuggccuuaaaugc

SEQ ID NO: 6795 - RNA, 21 nt, Artificial Sequence
  Synthetic
agucacuuggccuuaaaugcg

SEQ ID NO: 6796 - RNA, 21 nt, Artificial Sequence
  Synthetic
gucacuuggccuuaaaugcgc

SEQ ID NO: 6797 - RNA, 21 nt, Artificial Sequence
  Synthetic
ucacuuggccuuaaaugcgcc

SEQ ID NO: 6798 - RNA, 21 nt, Artificial Sequence
  Synthetic
cacuuggccuuaaaugcgccu

SEQ ID NO: 6799 - RNA, 21 nt, Artificial Sequence
  Synthetic
acuuggccuuaaaugcgccuc

SEQ ID NO: 6800 - RNA, 21 nt, Artificial Sequence
  Synthetic
cuuggccuuaaaugcgccuca

SEQ ID NO: 6801 - RNA, 21 nt, Artificial Sequence
  Synthetic
uuggccuuaaaugcgccucaa

SEQ ID NO: 6802 - RNA, 21 nt, Artificial Sequence
  Synthetic
uggccuuaaaugcgccucaag

SEQ ID NO: 6803 - RNA, 21 nt, Artificial Sequence
  Synthetic
ggccuuaaaugcgccucaaga

SEQ ID NO: 6804 - RNA, 21 nt, Artificial Sequence
  Synthetic
gccuuaaaugcgccucaagaa

SEQ ID NO: 6805 - RNA, 21 nt, Artificial Sequence
  Synthetic
ccuuaaaugcgccucaagaaa

SEQ ID NO: 6806 - RNA, 21 nt, Artificial Sequence
  Synthetic
cuuaaaugcgccucaagaaaa

SEQ ID NO: 6807 - RNA, 21 nt, Artificial Sequence
  Synthetic
uuaaaugcgccucaagaaaaa

SEQ ID NO: 6808 - RNA, 21 nt, Artificial Sequence
  Synthetic
uaaaugcgccucaagaaaaag

SEQ ID NO: 6809 - RNA, 21 nt, Artificial Sequence
  Synthetic
aaaugcgccucaagaaaaagu

SEQ ID NO: 6810 - RNA, 21 nt, Artificial Sequence
  Synthetic
aaugcgccucaagaaaaaguc

SEQ ID NO: 6811 - RNA, 21 nt, Artificial Sequence
  Synthetic
augcgccucaagaaaaagucg

SEQ ID NO: 6812 - RNA, 21 nt, Artificial Sequence
  Synthetic
ugcgccucaagaaaaagucgg

SEQ ID NO: 6813 - RNA, 21 nt, Artificial Sequence
  Synthetic
gcgccucaagaaaaagucggu

SEQ ID NO: 6814 - RNA, 21 nt, Artificial Sequence
  Synthetic
cgccucaagaaaaagucgguc

SEQ ID NO: 6815 - RNA, 21 nt, Artificial Sequence
  Synthetic
gccucaagaaaaagucggucc

SEQ ID NO: 6816 - RNA, 21 nt, Artificial Sequence
  Synthetic
ccucaagaaaaagucgguccc

SEQ ID NO: 6817 - RNA, 21 nt, Artificial Sequence
  Synthetic
cucaagaaaaagucggucccu

SEQ ID NO: 6818 - RNA, 21 nt, Artificial Sequence
  Synthetic
ucaagaaaaagucggucccug

SEQ ID NO: 6819 - RNA, 21 nt, Artificial Sequence
  Synthetic
caagaaaaagucggucccugc

SEQ ID NO: 6820 - RNA, 21 nt, Artificial Sequence
  Synthetic
aagaaaaagucggucccugca

SEQ ID NO: 6821 - RNA, 21 nt, Artificial Sequence
  Synthetic
agaaaaagucggucccugcaa

SEQ ID NO: 6822 - RNA, 21 nt, Artificial Sequence
  Synthetic
gaaaaagucggucccugcaaa

SEQ ID NO: 6823 - RNA, 21 nt, Artificial Sequence
  Synthetic
aaaaagucggucccugcaaaa

SEQ ID NO: 6824 - RNA, 21 nt, Artificial Sequence
  Synthetic
aaaagucggucccugcaaaac

SEQ ID NO: 6825 - RNA, 21 nt, Artificial Sequence
  Synthetic
aaagucggucccugcaaaacc

SEQ ID NO: 6826 - RNA, 21 nt, Artificial Sequence
  Synthetic
aagucggucccugcaaaaccg

SEQ ID NO: 6827 - RNA, 21 nt, Artificial Sequence
  Synthetic
agucggucccugcaaaaccgc

SEQ ID NO: 6828 - RNA, 21 nt, Artificial Sequence
  Synthetic
gucggucccugcaaaaccgcg

SEQ ID NO: 6829 - RNA, 21 nt, Artificial Sequence
  Synthetic
ucggucccugcaaaaccgcgg

SEQ ID NO: 6830 - RNA, 21 nt, Artificial Sequence
  Synthetic
cggucccugcaaaaccgcggc

SEQ ID NO: 6831 - RNA, 21 nt, Artificial Sequence
  Synthetic
ggucccugcaaaaccgcggcg

SEQ ID NO: 6832 - RNA, 21 nt, Artificial Sequence
  Synthetic
gucccugcaaaaccgcggcga

SEQ ID NO: 6833 - RNA, 21 nt, Artificial Sequence
  Synthetic
ucccugcaaaaccgcggcgac

SEQ ID NO: 6834 - RNA, 21 nt, Artificial Sequence
  Synthetic
cccugcaaaaccgcggcgacu

SEQ ID NO: 6835 - RNA, 21 nt, Artificial Sequence
  Synthetic
ccugcaaaaccgcggcgacuu

SEQ ID NO: 6836 - RNA, 21 nt, Artificial Sequence
  Synthetic
cugcaaaaccgcggcgacuuu

SEQ ID NO: 6837 - RNA, 21 nt, Artificial Sequence
  Synthetic
ugcaaaaccgcggcgacuuuu

SEQ ID NO: 6838 - RNA, 21 nt, Artificial Sequence
  Synthetic
gcaaaaccgcggcgacuuuua

SEQ ID NO: 6839 - RNA, 21 nt, Artificial Sequence
  Synthetic
caaaaccgcggcgacuuuuac

SEQ ID NO: 6840 - RNA, 21 nt, Artificial Sequence
  Synthetic
aaaaccgcggcgacuuuuacu

SEQ ID NO: 6841 - RNA, 21 nt, Artificial Sequence
  Synthetic
aaaccgcggcgacuuuuacuc

SEQ ID NO: 6842 - RNA, 21 nt, Artificial Sequence
  Synthetic
aaccgcggcgacuuuuacucg

SEQ ID NO: 6843 - RNA, 21 nt, Artificial Sequence
  Synthetic
accgcggcgacuuuuacucga

SEQ ID NO: 6844 - RNA, 21 nt, Artificial Sequence
  Synthetic
ccgcggcgacuuuuacucgaa

SEQ ID NO: 6845 - RNA, 21 nt, Artificial Sequence
  Synthetic
cgcggcgacuuuuacucgaaa

SEQ ID NO: 6846 - RNA, 21 nt, Artificial Sequence
  Synthetic
gcggcgacuuuuacucgaaac

SEQ ID NO: 6847 - RNA, 21 nt, Artificial Sequence
  Synthetic
cggcgacuuuuacucgaaacc

SEQ ID NO: 6848 - RNA, 21 nt, Artificial Sequence
  Synthetic
ggcgacuuuuacucgaaacca

SEQ ID NO: 6849 - RNA, 21 nt, Artificial Sequence
  Synthetic
gcgacuuuuacucgaaaccag

SEQ ID NO: 6850 - RNA, 21 nt, Artificial Sequence
  Synthetic
cgacuuuuacucgaaaccaga

SEQ ID NO: 6851 - RNA, 21 nt, Artificial Sequence
  Synthetic
gacuuuuacucgaaaccagag

SEQ ID NO: 6852 - RNA, 21 nt, Artificial Sequence
  Synthetic
acuuuuacucgaaaccagagg

SEQ ID NO: 6853 - RNA, 21 nt, Artificial Sequence
  Synthetic
cuuuuacucgaaaccagaggc

SEQ ID NO: 6854 - RNA, 21 nt, Artificial Sequence
  Synthetic
uuuuacucgaaaccagaggcg

SEQ ID NO: 6855 - RNA, 21 nt, Artificial Sequence
  Synthetic
uuuacucgaaaccagaggcgg

SEQ ID NO: 6856 - RNA, 21 nt, Artificial Sequence
  Synthetic
uuacucgaaaccagaggcggc

SEQ ID NO: 6857 - RNA, 21 nt, Artificial Sequence
  Synthetic
uacucgaaaccagaggcggcu

SEQ ID NO: 6858 - RNA, 21 nt, Artificial Sequence
  Synthetic
acucgaaaccagaggcggcug

SEQ ID NO: 6859 - RNA, 21 nt, Artificial Sequence
  Synthetic
cucgaaaccagaggcggcuga

SEQ ID NO: 6860 - RNA, 21 nt, Artificial Sequence
  Synthetic
ucgaaaccagaggcggcugag

SEQ ID NO: 6861 - RNA, 21 nt, Artificial Sequence
  Synthetic
cgaaaccagaggcggcugagc

SEQ ID NO: 6862 - RNA, 21 nt, Artificial Sequence
  Synthetic
gaaaccagaggcggcugagcu

SEQ ID NO: 6863 - RNA, 21 nt, Artificial Sequence
  Synthetic
aaaccagaggcggcugagcuu

SEQ ID NO: 6864 - RNA, 21 nt, Artificial Sequence
  Synthetic
aaccagaggcggcugagcuuu

SEQ ID NO: 6865 - RNA, 21 nt, Artificial Sequence
  Synthetic
accagaggcggcugagcuuuc

SEQ ID NO: 6866 - RNA, 21 nt, Artificial Sequence
  Synthetic
ccagaggcggcugagcuuucu

SEQ ID NO: 6867 - RNA, 21 nt, Artificial Sequence
  Synthetic
cagaggcggcugagcuuucuc

SEQ ID NO: 6868 - RNA, 21 nt, Artificial Sequence
  Synthetic
agaggcggcugagcuuucuca

SEQ ID NO: 6869 - RNA, 21 nt, Artificial Sequence
  Synthetic
gaggcggcugagcuuucucac

SEQ ID NO: 6870 - RNA, 21 nt, Artificial Sequence
  Synthetic
aggcggcugagcuuucucacc

SEQ ID NO: 6871 - RNA, 21 nt, Artificial Sequence
  Synthetic
ggcggcugagcuuucucaccu

SEQ ID NO: 6872 - RNA, 21 nt, Artificial Sequence
  Synthetic
gcggcugagcuuucucaccuc

SEQ ID NO: 6873 - RNA, 21 nt, Artificial Sequence
  Synthetic
cggcugagcuuucucaccucc

SEQ ID NO: 6874 - RNA, 21 nt, Artificial Sequence
  Synthetic
ggcugagcuuucucaccuccc

SEQ ID NO: 6875 - RNA, 21 nt, Artificial Sequence
  Synthetic
gcugagcuuucucaccuccca

SEQ ID NO: 6876 - RNA, 21 nt, Artificial Sequence
  Synthetic
cugagcuuucucaccucccac

SEQ ID NO: 6877 - RNA, 21 nt, Artificial Sequence
  Synthetic
ugagcuuucucaccucccacc

SEQ ID NO: 6878 - RNA, 21 nt, Artificial Sequence
  Synthetic
gagcuuucucaccucccaccu

SEQ ID NO: 6879 - RNA, 21 nt, Artificial Sequence
  Synthetic
agcuuucucaccucccaccuc

SEQ ID NO: 6880 - RNA, 21 nt, Artificial Sequence
  Synthetic
gcuuucucaccucccaccucc

SEQ ID NO: 6881 - RNA, 21 nt, Artificial Sequence
  Synthetic
cuuucucaccucccaccuccc

SEQ ID NO: 6882 - RNA, 21 nt, Artificial Sequence
  Synthetic
uuucucaccucccaccucccu

SEQ ID NO: 6883 - RNA, 21 nt, Artificial Sequence
  Synthetic
uucucaccucccaccucccuu

SEQ ID NO: 6884 - RNA, 21 nt, Artificial Sequence
  Synthetic
ucucaccucccaccucccuuc

SEQ ID NO: 6885 - RNA, 21 nt, Artificial Sequence
  Synthetic
cucaccucccaccucccuucu

SEQ ID NO: 6886 - RNA, 21 nt, Artificial Sequence
  Synthetic
ucaccucccaccucccuucuc

SEQ ID NO: 6887 - RNA, 21 nt, Artificial Sequence
  Synthetic
caccucccaccucccuucucc

SEQ ID NO: 6888 - RNA, 21 nt, Artificial Sequence
  Synthetic
accucccaccucccuucuccc

SEQ ID NO: 6889 - RNA, 21 nt, Artificial Sequence
  Synthetic
ccucccaccucccuucucccc

SEQ ID NO: 6890 - RNA, 21 nt, Artificial Sequence
  Synthetic
cucccaccucccuucuccccu

SEQ ID NO: 6891 - RNA, 21 nt, Artificial Sequence
  Synthetic
ucccaccucccuucuccccug

SEQ ID NO: 6892 - RNA, 21 nt, Artificial Sequence
  Synthetic
cccaccucccuucuccccugg

SEQ ID NO: 6893 - RNA, 21 nt, Artificial Sequence
  Synthetic
ccaccucccuucuccccuggc

SEQ ID NO: 6894 - RNA, 21 nt, Artificial Sequence
  Synthetic
caccucccuucuccccuggcc

SEQ ID NO: 6895 - RNA, 21 nt, Artificial Sequence
  Synthetic
accucccuucuccccuggccc

SEQ ID NO: 6896 - RNA, 21 nt, Artificial Sequence
  Synthetic
ccucccuucuccccuggcccc

SEQ ID NO: 6897 - RNA, 21 nt, Artificial Sequence
  Synthetic
cucccuucuccccuggccccg

SEQ ID NO: 6898 - RNA, 21 nt, Artificial Sequence
  Synthetic
ucccuucuccccuggccccgu

SEQ ID NO: 6899 - RNA, 21 nt, Artificial Sequence
  Synthetic
cccuucuccccuggccccgug

SEQ ID NO: 6900 - RNA, 21 nt, Artificial Sequence
  Synthetic
ccuucuccccuggccccgugg

SEQ ID NO: 6901 - RNA, 21 nt, Artificial Sequence
  Synthetic
cuucuccccuggccccgugga

SEQ ID NO: 6902 - RNA, 21 nt, Artificial Sequence
  Synthetic
uucuccccuggccccguggag

SEQ ID NO: 6903 - RNA, 21 nt, Artificial Sequence
  Synthetic
ucuccccuggccccguggaga

SEQ ID NO: 6904 - RNA, 21 nt, Artificial Sequence
  Synthetic
cuccccuggccccguggagac

SEQ ID NO: 6905 - RNA, 21 nt, Artificial Sequence
  Synthetic
uccccuggccccguggagacc

SEQ ID NO: 6906 - RNA, 21 nt, Artificial Sequence
  Synthetic
ccccuggccccguggagaccu

SEQ ID NO: 6907 - RNA, 21 nt, Artificial Sequence
  Synthetic
cccuggccccguggagaccua

SEQ ID NO: 6908 - RNA, 21 nt, Artificial Sequence
  Synthetic
ccuggccccguggagaccuag

SEQ ID NO: 6909 - RNA, 21 nt, Artificial Sequence
  Synthetic
cuggccccguggagaccuagu

SEQ ID NO: 6910 - RNA, 21 nt, Artificial Sequence
  Synthetic
uggccccguggagaccuagug

SEQ ID NO: 6911 - RNA, 21 nt, Artificial Sequence
  Synthetic
ggccccguggagaccuagugu

SEQ ID NO: 6912 - RNA, 21 nt, Artificial Sequence
  Synthetic
gccccguggagaccuaguguu

SEQ ID NO: 6913 - RNA, 21 nt, Artificial Sequence
  Synthetic
ccccguggagaccuaguguug

SEQ ID NO: 6914 - RNA, 21 nt, Artificial Sequence
  Synthetic
cccguggagaccuaguguuga

SEQ ID NO: 6915 - RNA, 21 nt, Artificial Sequence
  Synthetic
ccguggagaccuaguguugac

SEQ ID NO: 6916 - RNA, 21 nt, Artificial Sequence
  Synthetic
cguggagaccuaguguugacc

SEQ ID NO: 6917 - RNA, 21 nt, Artificial Sequence
  Synthetic
guggagaccuaguguugaccg

SEQ ID NO: 6918 - RNA, 21 nt, Artificial Sequence
  Synthetic
uggagaccuaguguugaccga

SEQ ID NO: 6919 - RNA, 21 nt, Artificial Sequence
  Synthetic
ggagaccuaguguugaccgag

SEQ ID NO: 6920 - RNA, 21 nt, Artificial Sequence
  Synthetic
gagaccuaguguugaccgaga

SEQ ID NO: 6921 - RNA, 21 nt, Artificial Sequence
  Synthetic
agaccuaguguugaccgagaa

SEQ ID NO: 6922 - RNA, 21 nt, Artificial Sequence
  Synthetic
gaccuaguguugaccgagaaa

SEQ ID NO: 6923 - RNA, 21 nt, Artificial Sequence
  Synthetic
accuaguguugaccgagaaac

SEQ ID NO: 6924 - RNA, 21 nt, Artificial Sequence
  Synthetic
ccuaguguugaccgagaaacu

SEQ ID NO: 6925 - RNA, 21 nt, Artificial Sequence
  Synthetic
cuaguguugaccgagaaacug

SEQ ID NO: 6926 - RNA, 21 nt, Artificial Sequence
  Synthetic
uaguguugaccgagaaacugg

SEQ ID NO: 6927 - RNA, 21 nt, Artificial Sequence
  Synthetic
aguguugaccgagaaacuggc

SEQ ID NO: 6928 - RNA, 21 nt, Artificial Sequence
  Synthetic
guguugaccgagaaacuggcu

SEQ ID NO: 6929 - RNA, 21 nt, Artificial Sequence
  Synthetic
uguugaccgagaaacuggcuc

SEQ ID NO: 6930 - RNA, 21 nt, Artificial Sequence
  Synthetic
guugaccgagaaacuggcucc

SEQ ID NO: 6931 - RNA, 21 nt, Artificial Sequence
  Synthetic
uugaccgagaaacuggcuccu

SEQ ID NO: 6932 - RNA, 21 nt, Artificial Sequence
  Synthetic
ugaccgagaaacuggcuccuc

SEQ ID NO: 6933 - RNA, 21 nt, Artificial Sequence
  Synthetic
gaccgagaaacuggcuccuca

SEQ ID NO: 6934 - RNA, 21 nt, Artificial Sequence
  Synthetic
accgagaaacuggcuccucag

SEQ ID NO: 6935 - RNA, 21 nt, Artificial Sequence
  Synthetic
ccgagaaacuggcuccucagc

SEQ ID NO: 6936 - RNA, 21 nt, Artificial Sequence
  Synthetic
cgagaaacuggcuccucagcc

SEQ ID NO: 6937 - RNA, 21 nt, Artificial Sequence
  Synthetic
gagaaacuggcuccucagccc

SEQ ID NO: 6938 - RNA, 21 nt, Artificial Sequence
  Synthetic
agaaacuggcuccucagccca

SEQ ID NO: 6939 - RNA, 21 nt, Artificial Sequence
  Synthetic
gaaacuggcuccucagcccac

SEQ ID NO: 6940 - RNA, 21 nt, Artificial Sequence
  Synthetic
aaacuggcuccucagcccacu

SEQ ID NO: 6941 - RNA, 21 nt, Artificial Sequence
  Synthetic
aacuggcuccucagcccacuc

SEQ ID NO: 6942 - RNA, 21 nt, Artificial Sequence
  Synthetic
acuggcuccucagcccacucu

SEQ ID NO: 6943 - RNA, 21 nt, Artificial Sequence
  Synthetic
cuggcuccucagcccacucug

SEQ ID NO: 6944 - RNA, 21 nt, Artificial Sequence
  Synthetic
uggcuccucagcccacucugg

SEQ ID NO: 6945 - RNA, 21 nt, Artificial Sequence
  Synthetic
ggcuccucagcccacucuggg

SEQ ID NO: 6946 - RNA, 21 nt, Artificial Sequence
  Synthetic
gcuccucagcccacucuggga

SEQ ID NO: 6947 - RNA, 21 nt, Artificial Sequence
  Synthetic
cuccucagcccacucugggaa

SEQ ID NO: 6948 - RNA, 21 nt, Artificial Sequence
  Synthetic
uccucagcccacucugggaag

SEQ ID NO: 6949 - RNA, 21 nt, Artificial Sequence
  Synthetic
ccucagcccacucugggaaga

SEQ ID NO: 6950 - RNA, 21 nt, Artificial Sequence
  Synthetic
cucagcccacucugggaagac

SEQ ID NO: 6951 - RNA, 21 nt, Artificial Sequence
  Synthetic
ucagcccacucugggaagacc

SEQ ID NO: 6952 - RNA, 21 nt, Artificial Sequence
  Synthetic
cagcccacucugggaagaccc

SEQ ID NO: 6953 - RNA, 21 nt, Artificial Sequence
  Synthetic
agcccacucugggaagaccca

SEQ ID NO: 6954 - RNA, 21 nt, Artificial Sequence
  Synthetic
gcccacucugggaagacccag

SEQ ID NO: 6955 - RNA, 21 nt, Artificial Sequence
  Synthetic
cccacucugggaagacccagc

SEQ ID NO: 6956 - RNA, 21 nt, Artificial Sequence
  Synthetic
ccacucugggaagacccagcc

SEQ ID NO: 6957 - RNA, 21 nt, Artificial Sequence
  Synthetic
cacucugggaagacccagcca

SEQ ID NO: 6958 - RNA, 21 nt, Artificial Sequence
  Synthetic
acucugggaagacccagccaa

SEQ ID NO: 6959 - RNA, 21 nt, Artificial Sequence
  Synthetic
cucugggaagacccagccaaa

SEQ ID NO: 6960 - RNA, 21 nt, Artificial Sequence
  Synthetic
ucugggaagacccagccaaau

SEQ ID NO: 6961 - RNA, 21 nt, Artificial Sequence
  Synthetic
cugggaagacccagccaaaug

SEQ ID NO: 6962 - RNA, 21 nt, Artificial Sequence
  Synthetic
ugggaagacccagccaaaugu

SEQ ID NO: 6963 - RNA, 21 nt, Artificial Sequence
  Synthetic
gggaagacccagccaaaugua

SEQ ID NO: 6964 - RNA, 21 nt, Artificial Sequence
  Synthetic
ggaagacccagccaaauguag

SEQ ID NO: 6965 - RNA, 21 nt, Artificial Sequence
  Synthetic
gaagacccagccaaauguagc

SEQ ID NO: 6966 - RNA, 21 nt, Artificial Sequence
  Synthetic
aagacccagccaaauguagcu

SEQ ID NO: 6967 - RNA, 21 nt, Artificial Sequence
  Synthetic
agacccagccaaauguagcuc

SEQ ID NO: 6968 - RNA, 21 nt, Artificial Sequence
  Synthetic
gacccagccaaauguagcuca

SEQ ID NO: 6969 - RNA, 21 nt, Artificial Sequence
  Synthetic
acccagccaaauguagcucag

SEQ ID NO: 6970 - RNA, 21 nt, Artificial Sequence
  Synthetic
cccagccaaauguagcucagc

SEQ ID NO: 6971 - RNA, 21 nt, Artificial Sequence
  Synthetic
ccagccaaauguagcucagcg

SEQ ID NO: 6972 - RNA, 21 nt, Artificial Sequence
  Synthetic
cagccaaauguagcucagcgg

SEQ ID NO: 6973 - RNA, 21 nt, Artificial Sequence
  Synthetic
agccaaauguagcucagcgga

SEQ ID NO: 6974 - RNA, 21 nt, Artificial Sequence
  Synthetic
gccaaauguagcucagcggau

SEQ ID NO: 6975 - RNA, 21 nt, Artificial Sequence
  Synthetic
ccaaauguagcucagcggaug

SEQ ID NO: 6976 - RNA, 21 nt, Artificial Sequence
  Synthetic
caaauguagcucagcggaugc

SEQ ID NO: 6977 - RNA, 21 nt, Artificial Sequence
  Synthetic
aaauguagcucagcggaugcc

SEQ ID NO: 6978 - RNA, 21 nt, Artificial Sequence
  Synthetic
aauguagcucagcggaugccc

SEQ ID NO: 6979 - RNA, 21 nt, Artificial Sequence
  Synthetic
auguagcucagcggaugccca

SEQ ID NO: 6980 - RNA, 21 nt, Artificial Sequence
  Synthetic
uguagcucagcggaugcccag

SEQ ID NO: 6981 - RNA, 21 nt, Artificial Sequence
  Synthetic
guagcucagcggaugcccagg

SEQ ID NO: 6982 - RNA, 21 nt, Artificial Sequence
  Synthetic
uagcucagcggaugcccaggg

SEQ ID NO: 6983 - RNA, 21 nt, Artificial Sequence
  Synthetic
agcucagcggaugcccagggc

SEQ ID NO: 6984 - RNA, 21 nt, Artificial Sequence
  Synthetic
gcucagcggaugcccagggcu

SEQ ID NO: 6985 - RNA, 21 nt, Artificial Sequence
  Synthetic
cucagcggaugcccagggcug

SEQ ID NO: 6986 - RNA, 21 nt, Artificial Sequence
  Synthetic
ucagcggaugcccagggcugg

SEQ ID NO: 6987 - RNA, 21 nt, Artificial Sequence
  Synthetic
cagcggaugcccagggcuggg

SEQ ID NO: 6988 - RNA, 21 nt, Artificial Sequence
  Synthetic
agcggaugcccagggcugggc

SEQ ID NO: 6989 - RNA, 21 nt, Artificial Sequence
  Synthetic
gcggaugcccagggcugggcu

SEQ ID NO: 6990 - RNA, 21 nt, Artificial Sequence
  Synthetic
cggaugcccagggcugggcuu

SEQ ID NO: 6991 - RNA, 21 nt, Artificial Sequence
  Synthetic
ggaugcccagggcugggcuuc

SEQ ID NO: 6992 - RNA, 21 nt, Artificial Sequence
  Synthetic
gaugcccagggcugggcuucu

SEQ ID NO: 6993 - RNA, 21 nt, Artificial Sequence
  Synthetic
augcccagggcugggcuucug

SEQ ID NO: 6994 - RNA, 21 nt, Artificial Sequence
  Synthetic
ugcccagggcugggcuucugg

SEQ ID NO: 6995 - RNA, 21 nt, Artificial Sequence
  Synthetic
gcccagggcugggcuucuggg

SEQ ID NO: 6996 - RNA, 21 nt, Artificial Sequence
  Synthetic
cccagggcugggcuucugggc

SEQ ID NO: 6997 - RNA, 21 nt, Artificial Sequence
  Synthetic
ccagggcugggcuucugggcc

SEQ ID NO: 6998 - RNA, 21 nt, Artificial Sequence
  Synthetic
cagggcugggcuucugggccc

SEQ ID NO: 6999 - RNA, 21 nt, Artificial Sequence
  Synthetic
agggcugggcuucugggcccg

SEQ ID NO: 7000 - RNA, 21 nt, Artificial Sequence
  Synthetic
gggcugggcuucugggcccgc

SEQ ID NO: 7001 - RNA, 21 nt, Artificial Sequence
  Synthetic
ggcugggcuucugggcccgcc

SEQ ID NO: 7002 - RNA, 21 nt, Artificial Sequence
  Synthetic
gcugggcuucugggcccgccg

SEQ ID NO: 7003 - RNA, 21 nt, Artificial Sequence
  Synthetic
cugggcuucugggcccgccga

SEQ ID NO: 7004 - RNA, 21 nt, Artificial Sequence
  Synthetic
ugggcuucugggcccgccgac

SEQ ID NO: 7005 - RNA, 21 nt, Artificial Sequence
  Synthetic
gggcuucugggcccgccgacg

SEQ ID NO: 7006 - RNA, 21 nt, Artificial Sequence
  Synthetic
ggcuucugggcccgccgacgc

SEQ ID NO: 7007 - RNA, 21 nt, Artificial Sequence
  Synthetic
gcuucugggcccgccgacgcc

SEQ ID NO: 7008 - RNA, 21 nt, Artificial Sequence
  Synthetic
cuucugggcccgccgacgccg

SEQ ID NO: 7009 - RNA, 21 nt, Artificial Sequence
  Synthetic
uucugggcccgccgacgccga

SEQ ID NO: 7010 - RNA, 21 nt, Artificial Sequence
  Synthetic
ucugggcccgccgacgccgac

SEQ ID NO: 7011 - RNA, 21 nt, Artificial Sequence
  Synthetic
cugggcccgccgacgccgacc

SEQ ID NO: 7012 - RNA, 21 nt, Artificial Sequence
  Synthetic
ugggcccgccgacgccgaccg

SEQ ID NO: 7013 - RNA, 21 nt, Artificial Sequence
  Synthetic
gggcccgccgacgccgaccgc

SEQ ID NO: 7014 - RNA, 21 nt, Artificial Sequence
  Synthetic
ggcccgccgacgccgaccgcg

SEQ ID NO: 7015 - RNA, 21 nt, Artificial Sequence
  Synthetic
gcccgccgacgccgaccgcgc

SEQ ID NO: 7016 - RNA, 21 nt, Artificial Sequence
  Synthetic
cccgccgacgccgaccgcgcc

SEQ ID NO: 7017 - RNA, 21 nt, Artificial Sequence
  Synthetic
ccgccgacgccgaccgcgccc

SEQ ID NO: 7018 - RNA, 21 nt, Artificial Sequence
  Synthetic
cgccgacgccgaccgcgcccg

SEQ ID NO: 7019 - RNA, 21 nt, Artificial Sequence
  Synthetic
gccgacgccgaccgcgcccgc

SEQ ID NO: 7020 - RNA, 21 nt, Artificial Sequence
  Synthetic
ccgacgccgaccgcgcccgcg

SEQ ID NO: 7021 - RNA, 21 nt, Artificial Sequence
  Synthetic
cgacgccgaccgcgcccgcgc

SEQ ID NO: 7022 - RNA, 21 nt, Artificial Sequence
  Synthetic
gacgccgaccgcgcccgcgcg

SEQ ID NO: 7023 - RNA, 21 nt, Artificial Sequence
  Synthetic
acgccgaccgcgcccgcgcgg

SEQ ID NO: 7024 - RNA, 21 nt, Artificial Sequence
  Synthetic
cgccgaccgcgcccgcgcggg

SEQ ID NO: 7025 - RNA, 21 nt, Artificial Sequence
  Synthetic
gccgaccgcgcccgcgcgggg

SEQ ID NO: 7026 - RNA, 21 nt, Artificial Sequence
  Synthetic
ccgaccgcgcccgcgcggggc

SEQ ID NO: 7027 - RNA, 21 nt, Artificial Sequence
  Synthetic
cgaccgcgcccgcgcggggcu

SEQ ID NO: 7028 - RNA, 21 nt, Artificial Sequence
  Synthetic
gaccgcgcccgcgcggggcug

SEQ ID NO: 7029 - RNA, 21 nt, Artificial Sequence
  Synthetic
accgcgcccgcgcggggcuga

SEQ ID NO: 7030 - RNA, 21 nt, Artificial Sequence
  Synthetic
ccgcgcccgcgcggggcugag

SEQ ID NO: 7031 - RNA, 21 nt, Artificial Sequence
  Synthetic
cgcgcccgcgcggggcugagg

SEQ ID NO: 7032 - RNA, 21 nt, Artificial Sequence
  Synthetic
gcgcccgcgcggggcugaggc

SEQ ID NO: 7033 - RNA, 21 nt, Artificial Sequence
  Synthetic
cgcccgcgcggggcugaggcu

SEQ ID NO: 7034 - RNA, 21 nt, Artificial Sequence
  Synthetic
gcccgcgcggggcugaggcug

SEQ ID NO: 7035 - RNA, 21 nt, Artificial Sequence
  Synthetic
cccgcgcggggcugaggcugg

SEQ ID NO: 7036 - RNA, 21 nt, Artificial Sequence
  Synthetic
ccgcgcggggcugaggcugga

SEQ ID NO: 7037 - RNA, 21 nt, Artificial Sequence
  Synthetic
cgcgcggggcugaggcuggau

SEQ ID NO: 7038 - RNA, 21 nt, Artificial Sequence
  Synthetic
gcgcggggcugaggcuggauu

SEQ ID NO: 7039 - RNA, 21 nt, Artificial Sequence
  Synthetic
cgcggggcugaggcuggauuc

SEQ ID NO: 7040 - RNA, 21 nt, Artificial Sequence
  Synthetic
gcggggcugaggcuggauucc

SEQ ID NO: 7041 - RNA, 21 nt, Artificial Sequence
  Synthetic
cggggcugaggcuggauuccu

SEQ ID NO: 7042 - RNA, 21 nt, Artificial Sequence
  Synthetic
ggggcugaggcuggauuccuu

SEQ ID NO: 7043 - RNA, 21 nt, Artificial Sequence
  Synthetic
gggcugaggcuggauuccuuu

SEQ ID NO: 7044 - RNA, 21 nt, Artificial Sequence
  Synthetic
ggcugaggcuggauuccuuuc

SEQ ID NO: 7045 - RNA, 21 nt, Artificial Sequence
  Synthetic
gcugaggcuggauuccuuucc

SEQ ID NO: 7046 - RNA, 21 nt, Artificial Sequence
  Synthetic
cugaggcuggauuccuuuccc

SEQ ID NO: 7047 - RNA, 21 nt, Artificial Sequence
  Synthetic
ugaggcuggauuccuuuccca

SEQ ID NO: 7048 - RNA, 21 nt, Artificial Sequence
  Synthetic
gaggcuggauuccuuucccac

SEQ ID NO: 7049 - RNA, 21 nt, Artificial Sequence
  Synthetic
aggcuggauuccuuucccacu

SEQ ID NO: 7050 - RNA, 21 nt, Artificial Sequence
  Synthetic
ggcuggauuccuuucccacua

SEQ ID NO: 7051 - RNA, 21 nt, Artificial Sequence
  Synthetic
gcuggauuccuuucccacuaa

SEQ ID NO: 7052 - RNA, 21 nt, Artificial Sequence
  Synthetic
cuggauuccuuucccacuaau

SEQ ID NO: 7053 - RNA, 21 nt, Artificial Sequence
  Synthetic
uggauuccuuucccacuaaua

SEQ ID NO: 7054 - RNA, 21 nt, Artificial Sequence
  Synthetic
ggauuccuuucccacuaauag

SEQ ID NO: 7055 - RNA, 21 nt, Artificial Sequence
  Synthetic
gauuccuuucccacuaauaga

SEQ ID NO: 7056 - RNA, 21 nt, Artificial Sequence
  Synthetic
auuccuuucccacuaauagag

SEQ ID NO: 7057 - RNA, 21 nt, Artificial Sequence
  Synthetic
uuccuuucccacuaauagagg

SEQ ID NO: 7058 - RNA, 21 nt, Artificial Sequence
  Synthetic
uccuuucccacuaauagaggg

SEQ ID NO: 7059 - RNA, 21 nt, Artificial Sequence
  Synthetic
ccuuucccacuaauagagggc

SEQ ID NO: 7060 - RNA, 21 nt, Artificial Sequence
  Synthetic
cuuucccacuaauagagggca

SEQ ID NO: 7061 - RNA, 21 nt, Artificial Sequence
  Synthetic
uuucccacuaauagagggcag

SEQ ID NO: 7062 - RNA, 21 nt, Artificial Sequence
  Synthetic
uucccacuaauagagggcagc

SEQ ID NO: 7063 - RNA, 21 nt, Artificial Sequence
  Synthetic
ucccacuaauagagggcagcg

SEQ ID NO: 7064 - RNA, 21 nt, Artificial Sequence
  Synthetic
cccacuaauagagggcagcgg

SEQ ID NO: 7065 - RNA, 21 nt, Artificial Sequence
  Synthetic
ccacuaauagagggcagcggg

SEQ ID NO: 7066 - RNA, 21 nt, Artificial Sequence
  Synthetic
cacuaauagagggcagcgggc

SEQ ID NO: 7067 - RNA, 21 nt, Artificial Sequence
  Synthetic
acuaauagagggcagcgggcg

SEQ ID NO: 7068 - RNA, 21 nt, Artificial Sequence
  Synthetic
cuaauagagggcagcgggcgc

SEQ ID NO: 7069 - RNA, 21 nt, Artificial Sequence
  Synthetic
uaauagagggcagcgggcgcu

SEQ ID NO: 7070 - RNA, 21 nt, Artificial Sequence
  Synthetic
aauagagggcagcgggcgcuu

SEQ ID NO: 7071 - RNA, 21 nt, Artificial Sequence
  Synthetic
auagagggcagcgggcgcuug

SEQ ID NO: 7072 - RNA, 21 nt, Artificial Sequence
  Synthetic
uagagggcagcgggcgcuuga

SEQ ID NO: 7073 - RNA, 21 nt, Artificial Sequence
  Synthetic
agagggcagcgggcgcuugag

SEQ ID NO: 7074 - RNA, 21 nt, Artificial Sequence
  Synthetic
gagggcagcgggcgcuugagc

SEQ ID NO: 7075 - RNA, 21 nt, Artificial Sequence
  Synthetic
agggcagcgggcgcuugagcg

SEQ ID NO: 7076 - RNA, 21 nt, Artificial Sequence
  Synthetic
gggcagcgggcgcuugagcgc

SEQ ID NO: 7077 - RNA, 21 nt, Artificial Sequence
  Synthetic
ggcagcgggcgcuugagcgcu

SEQ ID NO: 7078 - RNA, 21 nt, Artificial Sequence
  Synthetic
gcagcgggcgcuugagcgcug

SEQ ID NO: 7079 - RNA, 21 nt, Artificial Sequence
  Synthetic
cagcgggcgcuugagcgcugg

SEQ ID NO: 7080 - RNA, 21 nt, Artificial Sequence
  Synthetic
agcgggcgcuugagcgcugga

SEQ ID NO: 7081 - RNA, 21 nt, Artificial Sequence
  Synthetic
gcgggcgcuugagcgcuggaa

SEQ ID NO: 7082 - RNA, 21 nt, Artificial Sequence
  Synthetic
cgggcgcuugagcgcuggaag

SEQ ID NO: 7083 - RNA, 21 nt, Artificial Sequence
  Synthetic
gggcgcuugagcgcuggaaga

SEQ ID NO: 7084 - RNA, 21 nt, Artificial Sequence
  Synthetic
ggcgcuugagcgcuggaagaa

SEQ ID NO: 7085 - RNA, 21 nt, Artificial Sequence
  Synthetic
gcgcuugagcgcuggaagaag

SEQ ID NO: 7086 - RNA, 21 nt, Artificial Sequence
  Synthetic
cgcuugagcgcuggaagaagu

SEQ ID NO: 7087 - RNA, 21 nt, Artificial Sequence
  Synthetic
gcuugagcgcuggaagaaguc

SEQ ID NO: 7088 - RNA, 21 nt, Artificial Sequence
  Synthetic
cuugagcgcuggaagaagucc

SEQ ID NO: 7089 - RNA, 21 nt, Artificial Sequence
  Synthetic
uugagcgcuggaagaaguccc

SEQ ID NO: 7090 - RNA, 21 nt, Artificial Sequence
  Synthetic
ugagcgcuggaagaagucccu

SEQ ID NO: 7091 - RNA, 21 nt, Artificial Sequence
  Synthetic
gagcgcuggaagaagucccuc

SEQ ID NO: 7092 - RNA, 21 nt, Artificial Sequence
  Synthetic
agcgcuggaagaagucccucu

SEQ ID NO: 7093 - RNA, 21 nt, Artificial Sequence
  Synthetic
gcgcuggaagaagucccucuc

SEQ ID NO: 7094 - RNA, 21 nt, Artificial Sequence
  Synthetic
cgcuggaagaagucccucucc

SEQ ID NO: 7095 - RNA, 21 nt, Artificial Sequence
  Synthetic
gcuggaagaagucccucuccu

SEQ ID NO: 7096 - RNA, 21 nt, Artificial Sequence
  Synthetic
cuggaagaagucccucuccuc

SEQ ID NO: 7097 - RNA, 21 nt, Artificial Sequence
  Synthetic
uggaagaagucccucuccucu

SEQ ID NO: 7098 - RNA, 21 nt, Artificial Sequence
  Synthetic
ggaagaagucccucuccucuc

SEQ ID NO: 7099 - RNA, 21 nt, Artificial Sequence
  Synthetic
gaagaagucccucuccucucg

SEQ ID NO: 7100 - RNA, 21 nt, Artificial Sequence
  Synthetic
aagaagucccucuccucucgg

SEQ ID NO: 7101 - RNA, 21 nt, Artificial Sequence
  Synthetic
agaagucccucuccucucggg

SEQ ID NO: 7102 - RNA, 21 nt, Artificial Sequence
  Synthetic
gaagucccucuccucucgggu

SEQ ID NO: 7103 - RNA, 21 nt, Artificial Sequence
  Synthetic
aagucccucuccucucggguc

SEQ ID NO: 7104 - RNA, 21 nt, Artificial Sequence
  Synthetic
agucccucuccucucgggucc

SEQ ID NO: 7105 - RNA, 21 nt, Artificial Sequence
  Synthetic
gucccucuccucucggguccu

SEQ ID NO: 7106 - RNA, 21 nt, Artificial Sequence
  Synthetic
ucccucuccucucggguccug

SEQ ID NO: 7107 - RNA, 21 nt, Artificial Sequence
  Synthetic
cccucuccucucggguccugg

SEQ ID NO: 7108 - RNA, 21 nt, Artificial Sequence
  Synthetic
ccucuccucucggguccugga

SEQ ID NO: 7109 - RNA, 21 nt, Artificial Sequence
  Synthetic
cucuccucucggguccuggag

SEQ ID NO: 7110 - RNA, 21 nt, Artificial Sequence
  Synthetic
ucuccucucggguccuggagc

SEQ ID NO: 7111 - RNA, 21 nt, Artificial Sequence
  Synthetic
cuccucucggguccuggagcc

SEQ ID NO: 7112 - RNA, 21 nt, Artificial Sequence
  Synthetic
uccucucggguccuggagccc

SEQ ID NO: 7113 - RNA, 21 nt, Artificial Sequence
  Synthetic
ccucucggguccuggagcccc

SEQ ID NO: 7114 - RNA, 21 nt, Artificial Sequence
  Synthetic
cucucggguccuggagccccu

SEQ ID NO: 7115 - RNA, 21 nt, Artificial Sequence
  Synthetic
ucucggguccuggagccccug

SEQ ID NO: 7116 - RNA, 21 nt, Artificial Sequence
  Synthetic
cucggguccuggagccccugc

SEQ ID NO: 7117 - RNA, 21 nt, Artificial Sequence
  Synthetic
ucggguccuggagccccugcc

SEQ ID NO: 7118 - RNA, 21 nt, Artificial Sequence
  Synthetic
cggguccuggagccccugccc

SEQ ID NO: 7119 - RNA, 21 nt, Artificial Sequence
  Synthetic
ggguccuggagccccugcccu

SEQ ID NO: 7120 - RNA, 21 nt, Artificial Sequence
  Synthetic
gguccuggagccccugcccug

SEQ ID NO: 7121 - RNA, 21 nt, Artificial Sequence
  Synthetic
guccuggagccccugcccugu

SEQ ID NO: 7122 - RNA, 21 nt, Artificial Sequence
  Synthetic
uccuggagccccugcccuguc

SEQ ID NO: 7123 - RNA, 21 nt, Artificial Sequence
  Synthetic
ccuggagccccugcccugucc

SEQ ID NO: 7124 - RNA, 21 nt, Artificial Sequence
  Synthetic
cuggagccccugcccuguccu

SEQ ID NO: 7125 - RNA, 21 nt, Artificial Sequence
  Synthetic
uggagccccugcccuguccug

SEQ ID NO: 7126 - RNA, 21 nt, Artificial Sequence
  Synthetic
ggagccccugcccuguccugg

SEQ ID NO: 7127 - RNA, 21 nt, Artificial Sequence
  Synthetic
gagccccugcccuguccuggc

SEQ ID NO: 7128 - RNA, 21 nt, Artificial Sequence
  Synthetic
agccccugcccuguccuggcg

SEQ ID NO: 7129 - RNA, 21 nt, Artificial Sequence
  Synthetic
gccccugcccuguccuggcgu

SEQ ID NO: 7130 - RNA, 21 nt, Artificial Sequence
  Synthetic
ccccugcccuguccuggcguc

SEQ ID NO: 7131 - RNA, 21 nt, Artificial Sequence
  Synthetic
cccugcccuguccuggcgucu

SEQ ID NO: 7132 - RNA, 21 nt, Artificial Sequence
  Synthetic
ccugcccuguccuggcgucuu

SEQ ID NO: 7133 - RNA, 21 nt, Artificial Sequence
  Synthetic
cugcccuguccuggcgucuua

SEQ ID NO: 7134 - RNA, 21 nt, Artificial Sequence
  Synthetic
ugcccuguccuggcgucuuag

SEQ ID NO: 7135 - RNA, 21 nt, Artificial Sequence
  Synthetic
gcccuguccuggcgucuuagc

SEQ ID NO: 7136 - RNA, 21 nt, Artificial Sequence
  Synthetic
cccuguccuggcgucuuagcc

SEQ ID NO: 7137 - RNA, 21 nt, Artificial Sequence
  Synthetic
ccuguccuggcgucuuagccg

SEQ ID NO: 7138 - RNA, 21 nt, Artificial Sequence
  Synthetic
cuguccuggcgucuuagccgg

SEQ ID NO: 7139 - RNA, 21 nt, Artificial Sequence
  Synthetic
uguccuggcgucuuagccgga

SEQ ID NO: 7140 - RNA, 21 nt, Artificial Sequence
  Synthetic
guccuggcgucuuagccggac

SEQ ID NO: 7141 - RNA, 21 nt, Artificial Sequence
  Synthetic
uccuggcgucuuagccggaca

SEQ ID NO: 7142 - RNA, 21 nt, Artificial Sequence
  Synthetic
ccuggcgucuuagccggacac

SEQ ID NO: 7143 - RNA, 21 nt, Artificial Sequence
  Synthetic
cuggcgucuuagccggacaca

SEQ ID NO: 7144 - RNA, 21 nt, Artificial Sequence
  Synthetic
uggcgucuuagccggacacac

SEQ ID NO: 7145 - RNA, 21 nt, Artificial Sequence
  Synthetic
ggcgucuuagccggacacacc

SEQ ID NO: 7146 - RNA, 21 nt, Artificial Sequence
  Synthetic
gcgucuuagccggacacaccu

SEQ ID NO: 7147 - RNA, 21 nt, Artificial Sequence
  Synthetic
cgucuuagccggacacaccug

SEQ ID NO: 7148 - RNA, 21 nt, Artificial Sequence
  Synthetic
gucuuagccggacacaccugc

SEQ ID NO: 7149 - RNA, 21 nt, Artificial Sequence
  Synthetic
ucuuagccggacacaccugcc

SEQ ID NO: 7150 - RNA, 21 nt, Artificial Sequence
  Synthetic
cuuagccggacacaccugccc

SEQ ID NO: 7151 - RNA, 21 nt, Artificial Sequence
  Synthetic
uuagccggacacaccugcccc

SEQ ID NO: 7152 - RNA, 21 nt, Artificial Sequence
  Synthetic
uagccggacacaccugccccg

SEQ ID NO: 7153 - RNA, 21 nt, Artificial Sequence
  Synthetic
agccggacacaccugccccgc

SEQ ID NO: 7154 - RNA, 21 nt, Artificial Sequence
  Synthetic
gccggacacaccugccccgcg

SEQ ID NO: 7155 - RNA, 21 nt, Artificial Sequence
  Synthetic
ccggacacaccugccccgcgc

SEQ ID NO: 7156 - RNA, 21 nt, Artificial Sequence
  Synthetic
cggacacaccugccccgcgcc

SEQ ID NO: 7157 - RNA, 21 nt, Artificial Sequence
  Synthetic
ggacacaccugccccgcgccg

SEQ ID NO: 7158 - RNA, 21 nt, Artificial Sequence
  Synthetic
gacacaccugccccgcgccgg

SEQ ID NO: 7159 - RNA, 21 nt, Artificial Sequence
  Synthetic
acacaccugccccgcgccggu

SEQ ID NO: 7160 - RNA, 21 nt, Artificial Sequence
  Synthetic
cacaccugccccgcgccgguc

SEQ ID NO: 7161 - RNA, 21 nt, Artificial Sequence
  Synthetic
acaccugccccgcgccggucc

SEQ ID NO: 7162 - RNA, 21 nt, Artificial Sequence
  Synthetic
caccugccccgcgccgguccc

SEQ ID NO: 7163 - RNA, 21 nt, Artificial Sequence
  Synthetic
accugccccgcgccggucccc

SEQ ID NO: 7164 - RNA, 21 nt, Artificial Sequence
  Synthetic
ccugccccgcgccgguccccg

SEQ ID NO: 7165 - RNA, 21 nt, Artificial Sequence
  Synthetic
cugccccgcgccgguccccgc

SEQ ID NO: 7166 - RNA, 21 nt, Artificial Sequence
  Synthetic
ugccccgcgccgguccccgcu

SEQ ID NO: 7167 - RNA, 21 nt, Artificial Sequence
  Synthetic
gccccgcgccgguccccgcua

SEQ ID NO: 7168 - RNA, 21 nt, Artificial Sequence
  Synthetic
ccccgcgccgguccccgcuau

SEQ ID NO: 7169 - RNA, 21 nt, Artificial Sequence
  Synthetic
cccgcgccgguccccgcuauu

SEQ ID NO: 7170 - RNA, 21 nt, Artificial Sequence
  Synthetic
ccgcgccgguccccgcuauua

SEQ ID NO: 7171 - RNA, 21 nt, Artificial Sequence
  Synthetic
cgcgccgguccccgcuauuac

SEQ ID NO: 7172 - RNA, 21 nt, Artificial Sequence
  Synthetic
gcgccgguccccgcuauuacu

SEQ ID NO: 7173 - RNA, 21 nt, Artificial Sequence
  Synthetic
cgccgguccccgcuauuacug

SEQ ID NO: 7174 - RNA, 21 nt, Artificial Sequence
  Synthetic
gccgguccccgcuauuacugu

SEQ ID NO: 7175 - RNA, 21 nt, Artificial Sequence
  Synthetic
ccgguccccgcuauuacuguc

SEQ ID NO: 7176 - RNA, 21 nt, Artificial Sequence
  Synthetic
cgguccccgcuauuacugucu

SEQ ID NO: 7177 - RNA, 21 nt, Artificial Sequence
  Synthetic
gguccccgcuauuacugucug

SEQ ID NO: 7178 - RNA, 21 nt, Artificial Sequence
  Synthetic
guccccgcuauuacugucugc

SEQ ID NO: 7179 - RNA, 21 nt, Artificial Sequence
  Synthetic
uccccgcuauuacugucugca

SEQ ID NO: 7180 - RNA, 21 nt, Artificial Sequence
  Synthetic
ccccgcuauuacugucugcac

SEQ ID NO: 7181 - RNA, 21 nt, Artificial Sequence
  Synthetic
cccgcuauuacugucugcacc

SEQ ID NO: 7182 - RNA, 21 nt, Artificial Sequence
  Synthetic
ccgcuauuacugucugcaccu

SEQ ID NO: 7183 - RNA, 21 nt, Artificial Sequence
  Synthetic
cgcuauuacugucugcaccua

SEQ ID NO: 7184 - RNA, 21 nt, Artificial Sequence
  Synthetic
gcuauuacugucugcaccuac

SEQ ID NO: 7185 - RNA, 21 nt, Artificial Sequence
  Synthetic
cuauuacugucugcaccuacg

SEQ ID NO: 7186 - RNA, 21 nt, Artificial Sequence
  Synthetic
uauuacugucugcaccuacga

SEQ ID NO: 7187 - RNA, 21 nt, Artificial Sequence
  Synthetic
auuacugucugcaccuacgaa

SEQ ID NO: 7188 - RNA, 21 nt, Artificial Sequence
  Synthetic
uuacugucugcaccuacgaag

SEQ ID NO: 7189 - RNA, 21 nt, Artificial Sequence
  Synthetic
uacugucugcaccuacgaagc

SEQ ID NO: 7190 - RNA, 21 nt, Artificial Sequence
  Synthetic
acugucugcaccuacgaagca

SEQ ID NO: 7191 - RNA, 21 nt, Artificial Sequence
  Synthetic
cugucugcaccuacgaagcau

SEQ ID NO: 7192 - RNA, 21 nt, Artificial Sequence
  Synthetic
ugucugcaccuacgaagcaug

SEQ ID NO: 7193 - RNA, 21 nt, Artificial Sequence
  Synthetic
gucugcaccuacgaagcaugc

SEQ ID NO: 7194 - RNA, 21 nt, Artificial Sequence
  Synthetic
ucugcaccuacgaagcaugcc

SEQ ID NO: 7195 - RNA, 21 nt, Artificial Sequence
  Synthetic
cugcaccuacgaagcaugcca

SEQ ID NO: 7196 - RNA, 21 nt, Artificial Sequence
  Synthetic
ugcaccuacgaagcaugccag

SEQ ID NO: 7197 - RNA, 21 nt, Artificial Sequence
  Synthetic
gcaccuacgaagcaugccagc

SEQ ID NO: 7198 - RNA, 21 nt, Artificial Sequence
  Synthetic
caccuacgaagcaugccagcu

SEQ ID NO: 7199 - RNA, 21 nt, Artificial Sequence
  Synthetic
accuacgaagcaugccagcuu

SEQ ID NO: 7200 - RNA, 21 nt, Artificial Sequence
  Synthetic
ccuacgaagcaugccagcuuc

SEQ ID NO: 7201 - RNA, 21 nt, Artificial Sequence
  Synthetic
cuacgaagcaugccagcuucc

SEQ ID NO: 7202 - RNA, 21 nt, Artificial Sequence
  Synthetic
uacgaagcaugccagcuuccu

SEQ ID NO: 7203 - RNA, 21 nt, Artificial Sequence
  Synthetic
acgaagcaugccagcuuccua

SEQ ID NO: 7204 - RNA, 21 nt, Artificial Sequence
  Synthetic
cgaagcaugccagcuuccuag

SEQ ID NO: 7205 - RNA, 21 nt, Artificial Sequence
  Synthetic
gaagcaugccagcuuccuagg

SEQ ID NO: 7206 - RNA, 21 nt, Artificial Sequence
  Synthetic
aagcaugccagcuuccuagga

SEQ ID NO: 7207 - RNA, 21 nt, Artificial Sequence
  Synthetic
agcaugccagcuuccuaggau

SEQ ID NO: 7208 - RNA, 21 nt, Artificial Sequence
  Synthetic
gcaugccagcuuccuaggauu

SEQ ID NO: 7209 - RNA, 21 nt, Artificial Sequence
  Synthetic
caugccagcuuccuaggauug

SEQ ID NO: 7210 - RNA, 21 nt, Artificial Sequence
  Synthetic
augccagcuuccuaggauugg

SEQ ID NO: 7211 - RNA, 21 nt, Artificial Sequence
  Synthetic
ugccagcuuccuaggauuggc

SEQ ID NO: 7212 - RNA, 21 nt, Artificial Sequence
  Synthetic
gccagcuuccuaggauuggcg

SEQ ID NO: 7213 - RNA, 21 nt, Artificial Sequence
  Synthetic
ccagcuuccuaggauuggcgg

SEQ ID NO: 7214 - RNA, 21 nt, Artificial Sequence
  Synthetic
cagcuuccuaggauuggcggg

SEQ ID NO: 7215 - RNA, 21 nt, Artificial Sequence
  Synthetic
agcuuccuaggauuggcgggg

SEQ ID NO: 7216 - RNA, 21 nt, Artificial Sequence
  Synthetic
gcuuccuaggauuggcgggga

SEQ ID NO: 7217 - RNA, 21 nt, Artificial Sequence
  Synthetic
cuuccuaggauuggcggggau

SEQ ID NO: 7218 - RNA, 21 nt, Artificial Sequence
  Synthetic
uuccuaggauuggcggggauu

SEQ ID NO: 7219 - RNA, 21 nt, Artificial Sequence
  Synthetic
uccuaggauuggcggggauug

SEQ ID NO: 7220 - RNA, 21 nt, Artificial Sequence
  Synthetic
ccuaggauuggcggggauuga

SEQ ID NO: 7221 - RNA, 21 nt, Artificial Sequence
  Synthetic
cuaggauuggcggggauugau

SEQ ID NO: 7222 - RNA, 21 nt, Artificial Sequence
  Synthetic
uaggauuggcggggauugauc

SEQ ID NO: 7223 - RNA, 21 nt, Artificial Sequence
  Synthetic
aggauuggcggggauugaucu

SEQ ID NO: 7224 - RNA, 21 nt, Artificial Sequence
  Synthetic
ggauuggcggggauugaucua

SEQ ID NO: 7225 - RNA, 21 nt, Artificial Sequence
  Synthetic
gauuggcggggauugaucuag

SEQ ID NO: 7226 - RNA, 21 nt, Artificial Sequence
  Synthetic
auuggcggggauugaucuagc

SEQ ID NO: 7227 - RNA, 21 nt, Artificial Sequence
  Synthetic
uuggcggggauugaucuagcg

SEQ ID NO: 7228 - RNA, 21 nt, Artificial Sequence
  Synthetic
uggcggggauugaucuagcgg

SEQ ID NO: 7229 - RNA, 21 nt, Artificial Sequence
  Synthetic
ggcggggauugaucuagcggg

SEQ ID NO: 7230 - RNA, 21 nt, Artificial Sequence
  Synthetic
gcggggauugaucuagcgggc

SEQ ID NO: 7231 - RNA, 21 nt, Artificial Sequence
  Synthetic
cggggauugaucuagcgggcu

SEQ ID NO: 7232 - RNA, 21 nt, Artificial Sequence
  Synthetic
ggggauugaucuagcgggcuc

SEQ ID NO: 7233 - RNA, 21 nt, Artificial Sequence
  Synthetic
gggauugaucuagcgggcucc

SEQ ID NO: 7234 - RNA, 21 nt, Artificial Sequence
  Synthetic
ggauugaucuagcgggcuccu

SEQ ID NO: 7235 - RNA, 21 nt, Artificial Sequence
  Synthetic
gauugaucuagcgggcuccuc

SEQ ID NO: 7236 - RNA, 21 nt, Artificial Sequence
  Synthetic
auugaucuagcgggcuccucu

SEQ ID NO: 7237 - RNA, 21 nt, Artificial Sequence
  Synthetic
uugaucuagcgggcuccucuu

SEQ ID NO: 7238 - RNA, 21 nt, Artificial Sequence
  Synthetic
ugaucuagcgggcuccucuug

SEQ ID NO: 7239 - RNA, 21 nt, Artificial Sequence
  Synthetic
gaucuagcgggcuccucuugg

SEQ ID NO: 7240 - RNA, 21 nt, Artificial Sequence
  Synthetic
aucuagcgggcuccucuuggg

SEQ ID NO: 7241 - RNA, 21 nt, Artificial Sequence
  Synthetic
ucuagcgggcuccucuugggu

SEQ ID NO: 7242 - RNA, 21 nt, Artificial Sequence
  Synthetic
cuagcgggcuccucuugggug

SEQ ID NO: 7243 - RNA, 21 nt, Artificial Sequence
  Synthetic
uagcgggcuccucuugggugc

SEQ ID NO: 7244 - RNA, 21 nt, Artificial Sequence
  Synthetic
agcgggcuccucuugggugcg

SEQ ID NO: 7245 - RNA, 21 nt, Artificial Sequence
  Synthetic
gcgggcuccucuugggugcga

SEQ ID NO: 7246 - RNA, 21 nt, Artificial Sequence
  Synthetic
cgggcuccucuugggugcgaa

SEQ ID NO: 7247 - RNA, 21 nt, Artificial Sequence
  Synthetic
gggcuccucuugggugcgaau

SEQ ID NO: 7248 - RNA, 21 nt, Artificial Sequence
  Synthetic
ggcuccucuugggugcgaauu

SEQ ID NO: 7249 - RNA, 21 nt, Artificial Sequence
  Synthetic
gcuccucuugggugcgaauua

SEQ ID NO: 7250 - RNA, 21 nt, Artificial Sequence
  Synthetic
cuccucuugggugcgaauuag

SEQ ID NO: 7251 - RNA, 21 nt, Artificial Sequence
  Synthetic
uccucuugggugcgaauuagg

SEQ ID NO: 7252 - RNA, 21 nt, Artificial Sequence
  Synthetic
ccucuugggugcgaauuaggg

SEQ ID NO: 7253 - RNA, 21 nt, Artificial Sequence
  Synthetic
cucuugggugcgaauuagggg

SEQ ID NO: 7254 - RNA, 21 nt, Artificial Sequence
  Synthetic
ucuugggugcgaauuagggga

SEQ ID NO: 7255 - RNA, 21 nt, Artificial Sequence
  Synthetic
cuugggugcgaauuaggggaa

SEQ ID NO: 7256 - RNA, 21 nt, Artificial Sequence
  Synthetic
uugggugcgaauuaggggaag

SEQ ID NO: 7257 - RNA, 21 nt, Artificial Sequence
  Synthetic
ugggugcgaauuaggggaaga

SEQ ID NO: 7258 - RNA, 21 nt, Artificial Sequence
  Synthetic
gggugcgaauuaggggaagaa

SEQ ID NO: 7259 - RNA, 21 nt, Artificial Sequence
  Synthetic
ggugcgaauuaggggaagaaa

SEQ ID NO: 7260 - RNA, 21 nt, Artificial Sequence
  Synthetic
gugcgaauuaggggaagaaaa

SEQ ID NO: 7261 - RNA, 21 nt, Artificial Sequence
  Synthetic
ugcgaauuaggggaagaaaag

SEQ ID NO: 7262 - RNA, 21 nt, Artificial Sequence
  Synthetic
gcgaauuaggggaagaaaagu

SEQ ID NO: 7263 - RNA, 21 nt, Artificial Sequence
  Synthetic
cgaauuaggggaagaaaaguc

SEQ ID NO: 7264 - RNA, 21 nt, Artificial Sequence
  Synthetic
gaauuaggggaagaaaagucc

SEQ ID NO: 7265 - RNA, 21 nt, Artificial Sequence
  Synthetic
aauuaggggaagaaaaguccg

SEQ ID NO: 7266 - RNA, 21 nt, Artificial Sequence
  Synthetic
auuaggggaagaaaaguccgg

SEQ ID NO: 7267 - RNA, 21 nt, Artificial Sequence
  Synthetic
uuaggggaagaaaaguccggc

SEQ ID NO: 7268 - RNA, 21 nt, Artificial Sequence
  Synthetic
uaggggaagaaaaguccggcc

SEQ ID NO: 7269 - RNA, 21 nt, Artificial Sequence
  Synthetic
aggggaagaaaaguccggccg

SEQ ID NO: 7270 - RNA, 21 nt, Artificial Sequence
  Synthetic
ggggaagaaaaguccggccga

SEQ ID NO: 7271 - RNA, 22 nt, Artificial Sequence
  Synthetic
gaccagugaguuacucugaugu

SEQ ID NO: 7272 - RNA, 22 nt, Artificial Sequence
  Synthetic
accagugaguuacucugauguu

SEQ ID NO: 7273 - RNA, 22 nt, Artificial Sequence
  Synthetic
ccagugaguuacucugauguuu

SEQ ID NO: 7274 - RNA, 22 nt, Artificial Sequence
  Synthetic
cagugaguuacucugauguuua

SEQ ID NO: 7275 - RNA, 22 nt, Artificial Sequence
  Synthetic
agugaguuacucugauguuuau

SEQ ID NO: 7276 - RNA, 22 nt, Artificial Sequence
  Synthetic
gugaguuacucugauguuuauu

SEQ ID NO: 7277 - RNA, 22 nt, Artificial Sequence
  Synthetic
ugaguuacucugauguuuauuu

SEQ ID NO: 7278 - RNA, 22 nt, Artificial Sequence
  Synthetic
gaguuacucugauguuuauuuu

SEQ ID NO: 7279 - RNA, 22 nt, Artificial Sequence
  Synthetic
aguuacucugauguuuauuuua

SEQ ID NO: 7280 - RNA, 22 nt, Artificial Sequence
  Synthetic
guuacucugauguuuauuuuaa

SEQ ID NO: 7281 - RNA, 22 nt, Artificial Sequence
  Synthetic
uuacucugauguuuauuuuaau

SEQ ID NO: 7282 - RNA, 22 nt, Artificial Sequence
  Synthetic
uacucugauguuuauuuuaaug

SEQ ID NO: 7283 - RNA, 22 nt, Artificial Sequence
  Synthetic
acucugauguuuauuuuaaugc

SEQ ID NO: 7284 - RNA, 22 nt, Artificial Sequence
  Synthetic
cucugauguuuauuuuaaugca

SEQ ID NO: 7285 - RNA, 22 nt, Artificial Sequence
  Synthetic
ucugauguuuauuuuaaugcau

SEQ ID NO: 7286 - RNA, 22 nt, Artificial Sequence
  Synthetic
cugauguuuauuuuaaugcauc

SEQ ID NO: 7287 - RNA, 22 nt, Artificial Sequence
  Synthetic
ugauguuuauuuuaaugcaucu

SEQ ID NO: 7288 - RNA, 22 nt, Artificial Sequence
  Synthetic
gauguuuauuuuaaugcaucuu

SEQ ID NO: 7289 - RNA, 22 nt, Artificial Sequence
  Synthetic
auguuuauuuuaaugcaucuua

SEQ ID NO: 7290 - RNA, 22 nt, Artificial Sequence
  Synthetic
uguuuauuuuaaugcaucuuag

SEQ ID NO: 7291 - RNA, 22 nt, Artificial Sequence
  Synthetic
guuuauuuuaaugcaucuuagu

SEQ ID NO: 7292 - RNA, 22 nt, Artificial Sequence
  Synthetic
uuuauuuuaaugcaucuuaguc

SEQ ID NO: 7293 - RNA, 22 nt, Artificial Sequence
  Synthetic
uuauuuuaaugcaucuuagucc

SEQ ID NO: 7294 - RNA, 22 nt, Artificial Sequence
  Synthetic
uauuuuaaugcaucuuagucca

SEQ ID NO: 7295 - RNA, 22 nt, Artificial Sequence
  Synthetic
auuuuaaugcaucuuaguccac

SEQ ID NO: 7296 - RNA, 22 nt, Artificial Sequence
  Synthetic
uuuuaaugcaucuuaguccaca

SEQ ID NO: 7297 - RNA, 22 nt, Artificial Sequence
  Synthetic
uuuaaugcaucuuaguccacac

SEQ ID NO: 7298 - RNA, 22 nt, Artificial Sequence
  Synthetic
uuaaugcaucuuaguccacaca

SEQ ID NO: 7299 - RNA, 22 nt, Artificial Sequence
  Synthetic
uaaugcaucuuaguccacacag

SEQ ID NO: 7300 - RNA, 22 nt, Artificial Sequence
  Synthetic
aaugcaucuuaguccacacagu

SEQ ID NO: 7301 - RNA, 22 nt, Artificial Sequence
  Synthetic
augcaucuuaguccacacaguu

SEQ ID NO: 7302 - RNA, 22 nt, Artificial Sequence
  Synthetic
ugcaucuuaguccacacaguug

SEQ ID NO: 7303 - RNA, 22 nt, Artificial Sequence
  Synthetic
gcaucuuaguccacacaguugg

SEQ ID NO: 7304 - RNA, 22 nt, Artificial Sequence
  Synthetic
caucuuaguccacacaguuggu

SEQ ID NO: 7305 - RNA, 22 nt, Artificial Sequence
  Synthetic
aucuuaguccacacaguuggua

SEQ ID NO: 7306 - RNA, 22 nt, Artificial Sequence
  Synthetic
ucuuaguccacacaguugguau

SEQ ID NO: 7307 - RNA, 22 nt, Artificial Sequence
  Synthetic
cuuaguccacacaguugguaua

SEQ ID NO: 7308 - RNA, 22 nt, Artificial Sequence
  Synthetic
uuaguccacacaguugguauaa

SEQ ID NO: 7309 - RNA, 22 nt, Artificial Sequence
  Synthetic
uaguccacacaguugguauaaa

SEQ ID NO: 7310 - RNA, 22 nt, Artificial Sequence
  Synthetic
aguccacacaguugguauaaaa

SEQ ID NO: 7311 - RNA, 22 nt, Artificial Sequence
  Synthetic
guccacacaguugguauaaaau

SEQ ID NO: 7312 - RNA, 22 nt, Artificial Sequence
  Synthetic
uccacacaguugguauaaaauc

SEQ ID NO: 7313 - RNA, 22 nt, Artificial Sequence
  Synthetic
ccacacaguugguauaaaauca

SEQ ID NO: 7314 - RNA, 22 nt, Artificial Sequence
  Synthetic
cacacaguugguauaaaaucag

SEQ ID NO: 7315 - RNA, 22 nt, Artificial Sequence
  Synthetic
acacaguugguauaaaaucaga

SEQ ID NO: 7316 - RNA, 22 nt, Artificial Sequence
  Synthetic
cacaguugguauaaaaucagaa

SEQ ID NO: 7317 - RNA, 22 nt, Artificial Sequence
  Synthetic
acaguugguauaaaaucagaaa

SEQ ID NO: 7318 - RNA, 22 nt, Artificial Sequence
  Synthetic
caguugguauaaaaucagaaaa

SEQ ID NO: 7319 - RNA, 22 nt, Artificial Sequence
  Synthetic
aguugguauaaaaucagaaaau

SEQ ID NO: 7320 - RNA, 22 nt, Artificial Sequence
  Synthetic
guugguauaaaaucagaaaaug

SEQ ID NO: 7321 - RNA, 22 nt, Artificial Sequence
  Synthetic
uugguauaaaaucagaaaaugc

SEQ ID NO: 7322 - RNA, 22 nt, Artificial Sequence
  Synthetic
ugguauaaaaucagaaaaugca

SEQ ID NO: 7323 - RNA, 22 nt, Artificial Sequence
  Synthetic
gguauaaaaucagaaaaugcaa

SEQ ID NO: 7324 - RNA, 22 nt, Artificial Sequence
  Synthetic
guauaaaaucagaaaaugcaaa

SEQ ID NO: 7325 - RNA, 22 nt, Artificial Sequence
  Synthetic
uauaaaaucagaaaaugcaaag

SEQ ID NO: 7326 - RNA, 22 nt, Artificial Sequence
  Synthetic
auaaaaucagaaaaugcaaagc

SEQ ID NO: 7327 - RNA, 22 nt, Artificial Sequence
  Synthetic
uaaaaucagaaaaugcaaagca

SEQ ID NO: 7328 - RNA, 22 nt, Artificial Sequence
  Synthetic
aaaaucagaaaaugcaaagcaa

SEQ ID NO: 7329 - RNA, 22 nt, Artificial Sequence
  Synthetic
aaaucagaaaaugcaaagcaaa

SEQ ID NO: 7330 - RNA, 22 nt, Artificial Sequence
  Synthetic
aaucagaaaaugcaaagcaaaa

SEQ ID NO: 7331 - RNA, 22 nt, Artificial Sequence
  Synthetic
aucagaaaaugcaaagcaaaaa

SEQ ID NO: 7332 - RNA, 22 nt, Artificial Sequence
  Synthetic
ucagaaaaugcaaagcaaaaac

SEQ ID NO: 7333 - RNA, 22 nt, Artificial Sequence
  Synthetic
cagaaaaugcaaagcaaaaaca

SEQ ID NO: 7334 - RNA, 22 nt, Artificial Sequence
  Synthetic
agaaaaugcaaagcaaaaacaa

SEQ ID NO: 7335 - RNA, 22 nt, Artificial Sequence
  Synthetic
gaaaaugcaaagcaaaaacaaa

SEQ ID NO: 7336 - RNA, 22 nt, Artificial Sequence
  Synthetic
aaaaugcaaagcaaaaacaaaa

SEQ ID NO: 7337 - RNA, 22 nt, Artificial Sequence
  Synthetic
aaaugcaaagcaaaaacaaaag

SEQ ID NO: 7338 - RNA, 22 nt, Artificial Sequence
  Synthetic
aaugcaaagcaaaaacaaaagg

SEQ ID NO: 7339 - RNA, 22 nt, Artificial Sequence
  Synthetic
augcaaagcaaaaacaaaaggu

SEQ ID NO: 7340 - RNA, 22 nt, Artificial Sequence
  Synthetic
ugcaaagcaaaaacaaaagguc

SEQ ID NO: 7341 - RNA, 22 nt, Artificial Sequence
  Synthetic
gcaaagcaaaaacaaaaggucu

SEQ ID NO: 7342 - RNA, 22 nt, Artificial Sequence
  Synthetic
caaagcaaaaacaaaaggucug

SEQ ID NO: 7343 - RNA, 22 nt, Artificial Sequence
  Synthetic
aaagcaaaaacaaaaggucugg

SEQ ID NO: 7344 - RNA, 22 nt, Artificial Sequence
  Synthetic
aagcaaaaacaaaaggucugga

SEQ ID NO: 7345 - RNA, 22 nt, Artificial Sequence
  Synthetic
agcaaaaacaaaaggucuggag

SEQ ID NO: 7346 - RNA, 22 nt, Artificial Sequence
  Synthetic
gcaaaaacaaaaggucuggagu

SEQ ID NO: 7347 - RNA, 22 nt, Artificial Sequence
  Synthetic
caaaaacaaaaggucuggaguc

SEQ ID NO: 7348 - RNA, 22 nt, Artificial Sequence
  Synthetic
aaaaacaaaaggucuggagucu

SEQ ID NO: 7349 - RNA, 22 nt, Artificial Sequence
  Synthetic
aaaacaaaaggucuggagucuu

SEQ ID NO: 7350 - RNA, 22 nt, Artificial Sequence
  Synthetic
aaacaaaaggucuggagucuua

SEQ ID NO: 7351 - RNA, 22 nt, Artificial Sequence
  Synthetic
aacaaaaggucuggagucuuag

SEQ ID NO: 7352 - RNA, 22 nt, Artificial Sequence
  Synthetic
acaaaaggucuggagucuuagc

SEQ ID NO: 7353 - RNA, 22 nt, Artificial Sequence
  Synthetic
caaaaggucuggagucuuagca

SEQ ID NO: 7354 - RNA, 22 nt, Artificial Sequence
  Synthetic
aaaaggucuggagucuuagcau

SEQ ID NO: 7355 - RNA, 22 nt, Artificial Sequence
  Synthetic
aaaggucuggagucuuagcauc

SEQ ID NO: 7356 - RNA, 22 nt, Artificial Sequence
  Synthetic
aaggucuggagucuuagcauca

SEQ ID NO: 7357 - RNA, 22 nt, Artificial Sequence
  Synthetic
aggucuggagucuuagcaucag

SEQ ID NO: 7358 - RNA, 22 nt, Artificial Sequence
  Synthetic
ggucuggagucuuagcaucaga

SEQ ID NO: 7359 - RNA, 22 nt, Artificial Sequence
  Synthetic
gucuggagucuuagcaucagaa

SEQ ID NO: 7360 - RNA, 22 nt, Artificial Sequence
  Synthetic
ucuggagucuuagcaucagaag

SEQ ID NO: 7361 - RNA, 22 nt, Artificial Sequence
  Synthetic
cuggagucuuagcaucagaagg

SEQ ID NO: 7362 - RNA, 22 nt, Artificial Sequence
  Synthetic
uggagucuuagcaucagaaggg

SEQ ID NO: 7363 - RNA, 22 nt, Artificial Sequence
  Synthetic
ggagucuuagcaucagaagggc

SEQ ID NO: 7364 - RNA, 22 nt, Artificial Sequence
  Synthetic
gagucuuagcaucagaagggca

SEQ ID NO: 7365 - RNA, 22 nt, Artificial Sequence
  Synthetic
agucuuagcaucagaagggcac

SEQ ID NO: 7366 - RNA, 22 nt, Artificial Sequence
  Synthetic
gucuuagcaucagaagggcacc

SEQ ID NO: 7367 - RNA, 22 nt, Artificial Sequence
  Synthetic
ucuuagcaucagaagggcacca

SEQ ID NO: 7368 - RNA, 22 nt, Artificial Sequence
  Synthetic
cuuagcaucagaagggcaccau

SEQ ID NO: 7369 - RNA, 22 nt, Artificial Sequence
  Synthetic
uuagcaucagaagggcaccaua

SEQ ID NO: 7370 - RNA, 22 nt, Artificial Sequence
  Synthetic
uagcaucagaagggcaccauau

SEQ ID NO: 7371 - RNA, 22 nt, Artificial Sequence
  Synthetic
agcaucagaagggcaccauaua

SEQ ID NO: 7372 - RNA, 22 nt, Artificial Sequence
  Synthetic
gcaucagaagggcaccauauau

SEQ ID NO: 7373 - RNA, 22 nt, Artificial Sequence
  Synthetic
caucagaagggcaccauauaua

SEQ ID NO: 7374 - RNA, 22 nt, Artificial Sequence
  Synthetic
aucagaagggcaccauauauac

SEQ ID NO: 7375 - RNA, 22 nt, Artificial Sequence
  Synthetic
ucagaagggcaccauauauaca

SEQ ID NO: 7376 - RNA, 22 nt, Artificial Sequence
  Synthetic
cagaagggcaccauauauacau

SEQ ID NO: 7377 - RNA, 22 nt, Artificial Sequence
  Synthetic
agaagggcaccauauauacauc

SEQ ID NO: 7378 - RNA, 22 nt, Artificial Sequence
  Synthetic
gaagggcaccauauauacaucu

SEQ ID NO: 7379 - RNA, 22 nt, Artificial Sequence
  Synthetic
aagggcaccauauauacaucua

SEQ ID NO: 7380 - RNA, 22 nt, Artificial Sequence
  Synthetic
agggcaccauauauacaucuac

SEQ ID NO: 7381 - RNA, 22 nt, Artificial Sequence
  Synthetic
gggcaccauauauacaucuaca

SEQ ID NO: 7382 - RNA, 22 nt, Artificial Sequence
  Synthetic
ggcaccauauauacaucuacag

SEQ ID NO: 7383 - RNA, 22 nt, Artificial Sequence
  Synthetic
gcaccauauauacaucuacagu

SEQ ID NO: 7384 - RNA, 22 nt, Artificial Sequence
  Synthetic
caccauauauacaucuacaguu

SEQ ID NO: 7385 - RNA, 22 nt, Artificial Sequence
  Synthetic
accauauauacaucuacaguug

SEQ ID NO: 7386 - RNA, 22 nt, Artificial Sequence
  Synthetic
ccauauauacaucuacaguugg

SEQ ID NO: 7387 - RNA, 22 nt, Artificial Sequence
  Synthetic
cauauauacaucuacaguuggu

SEQ ID NO: 7388 - RNA, 22 nt, Artificial Sequence
  Synthetic
auauauacaucuacaguuggug

SEQ ID NO: 7389 - RNA, 22 nt, Artificial Sequence
  Synthetic
uauauacaucuacaguuggugg

SEQ ID NO: 7390 - RNA, 22 nt, Artificial Sequence
  Synthetic
auauacaucuacaguugguggc

SEQ ID NO: 7391 - RNA, 22 nt, Artificial Sequence
  Synthetic
uauacaucuacaguugguggcc

SEQ ID NO: 7392 - RNA, 22 nt, Artificial Sequence
  Synthetic
auacaucuacaguugguggcca

SEQ ID NO: 7393 - RNA, 22 nt, Artificial Sequence
  Synthetic
uacaucuacaguugguggccaa

SEQ ID NO: 7394 - RNA, 22 nt, Artificial Sequence
  Synthetic
acaucuacaguugguggccaau

SEQ ID NO: 7395 - RNA, 22 nt, Artificial Sequence
  Synthetic
caucuacaguugguggccaaua

SEQ ID NO: 7396 - RNA, 22 nt, Artificial Sequence
  Synthetic
aucuacaguugguggccaauac

SEQ ID NO: 7397 - RNA, 22 nt, Artificial Sequence
  Synthetic
ucuacaguugguggccaauaca

SEQ ID NO: 7398 - RNA, 22 nt, Artificial Sequence
  Synthetic
cuacaguugguggccaauacaa

SEQ ID NO: 7399 - RNA, 22 nt, Artificial Sequence
  Synthetic
uacaguugguggccaauacaag

SEQ ID NO: 7400 - RNA, 22 nt, Artificial Sequence
  Synthetic
acaguugguggccaauacaagu

SEQ ID NO: 7401 - RNA, 22 nt, Artificial Sequence
  Synthetic
caguugguggccaauacaaguc

SEQ ID NO: 7402 - RNA, 22 nt, Artificial Sequence
  Synthetic
aguugguggccaauacaaguca

SEQ ID NO: 7403 - RNA, 22 nt, Artificial Sequence
  Synthetic
guugguggccaauacaagucau

SEQ ID NO: 7404 - RNA, 22 nt, Artificial Sequence
  Synthetic
uugguggccaauacaagucauu

SEQ ID NO: 7405 - RNA, 22 nt, Artificial Sequence
  Synthetic
ugguggccaauacaagucauug

SEQ ID NO: 7406 - RNA, 22 nt, Artificial Sequence
  Synthetic
gguggccaauacaagucauugc

SEQ ID NO: 7407 - RNA, 22 nt, Artificial Sequence
  Synthetic
guggccaauacaagucauugcc

SEQ ID NO: 7408 - RNA, 22 nt, Artificial Sequence
  Synthetic
uggccaauacaagucauugcca

SEQ ID NO: 7409 - RNA, 22 nt, Artificial Sequence
  Synthetic
ggccaauacaagucauugccag

SEQ ID NO: 7410 - RNA, 22 nt, Artificial Sequence
  Synthetic
gccaauacaagucauugccaga

SEQ ID NO: 7411 - RNA, 22 nt, Artificial Sequence
  Synthetic
ccaauacaagucauugccagac

SEQ ID NO: 7412 - RNA, 22 nt, Artificial Sequence
  Synthetic
caauacaagucauugccagaca

SEQ ID NO: 7413 - RNA, 22 nt, Artificial Sequence
  Synthetic
aauacaagucauugccagacag

SEQ ID NO: 7414 - RNA, 22 nt, Artificial Sequence
  Synthetic
auacaagucauugccagacagu

SEQ ID NO: 7415 - RNA, 22 nt, Artificial Sequence
  Synthetic
uacaagucauugccagacaguc

SEQ ID NO: 7416 - RNA, 22 nt, Artificial Sequence
  Synthetic
acaagucauugccagacagucc

SEQ ID NO: 7417 - RNA, 22 nt, Artificial Sequence
  Synthetic
caagucauugccagacaguccu

SEQ ID NO: 7418 - RNA, 22 nt, Artificial Sequence
  Synthetic
aagucauugccagacaguccuu

SEQ ID NO: 7419 - RNA, 22 nt, Artificial Sequence
  Synthetic
agucauugccagacaguccuug

SEQ ID NO: 7420 - RNA, 22 nt, Artificial Sequence
  Synthetic
gucauugccagacaguccuugg

SEQ ID NO: 7421 - RNA, 22 nt, Artificial Sequence
  Synthetic
ucauugccagacaguccuugga

SEQ ID NO: 7422 - RNA, 22 nt, Artificial Sequence
  Synthetic
cauugccagacaguccuuggag

SEQ ID NO: 7423 - RNA, 22 nt, Artificial Sequence
  Synthetic
auugccagacaguccuuggagg

SEQ ID NO: 7424 - RNA, 22 nt, Artificial Sequence
  Synthetic
uugccagacaguccuuggaggc

SEQ ID NO: 7425 - RNA, 22 nt, Artificial Sequence
  Synthetic
ugccagacaguccuuggaggca

SEQ ID NO: 7426 - RNA, 22 nt, Artificial Sequence
  Synthetic
gccagacaguccuuggaggcac

SEQ ID NO: 7427 - RNA, 22 nt, Artificial Sequence
  Synthetic
ccagacaguccuuggaggcaca

SEQ ID NO: 7428 - RNA, 22 nt, Artificial Sequence
  Synthetic
cagacaguccuuggaggcacag

SEQ ID NO: 7429 - RNA, 22 nt, Artificial Sequence
  Synthetic
agacaguccuuggaggcacaga

SEQ ID NO: 7430 - RNA, 22 nt, Artificial Sequence
  Synthetic
gacaguccuuggaggcacagaa

SEQ ID NO: 7431 - RNA, 22 nt, Artificial Sequence
  Synthetic
acaguccuuggaggcacagaac

SEQ ID NO: 7432 - RNA, 22 nt, Artificial Sequence
  Synthetic
caguccuuggaggcacagaaca

SEQ ID NO: 7433 - RNA, 22 nt, Artificial Sequence
  Synthetic
aguccuuggaggcacagaacag

SEQ ID NO: 7434 - RNA, 22 nt, Artificial Sequence
  Synthetic
guccuuggaggcacagaacagc

SEQ ID NO: 7435 - RNA, 22 nt, Artificial Sequence
  Synthetic
uccuuggaggcacagaacagcc

SEQ ID NO: 7436 - RNA, 22 nt, Artificial Sequence
  Synthetic
ccuuggaggcacagaacagccu

SEQ ID NO: 7437 - RNA, 22 nt, Artificial Sequence
  Synthetic
cuuggaggcacagaacagccua

SEQ ID NO: 7438 - RNA, 22 nt, Artificial Sequence
  Synthetic
uuggaggcacagaacagccuag

SEQ ID NO: 7439 - RNA, 22 nt, Artificial Sequence
  Synthetic
uggaggcacagaacagccuaga

SEQ ID NO: 7440 - RNA, 22 nt, Artificial Sequence
  Synthetic
ggaggcacagaacagccuagac

SEQ ID NO: 7441 - RNA, 22 nt, Artificial Sequence
  Synthetic
gaggcacagaacagccuagacc

SEQ ID NO: 7442 - RNA, 22 nt, Artificial Sequence
  Synthetic
aggcacagaacagccuagaccc

SEQ ID NO: 7443 - RNA, 22 nt, Artificial Sequence
  Synthetic
ggcacagaacagccuagaccca

SEQ ID NO: 7444 - RNA, 22 nt, Artificial Sequence
  Synthetic
gcacagaacagccuagacccag

SEQ ID NO: 7445 - RNA, 22 nt, Artificial Sequence
  Synthetic
cacagaacagccuagacccagc

SEQ ID NO: 7446 - RNA, 22 nt, Artificial Sequence
  Synthetic
acagaacagccuagacccagcc

SEQ ID NO: 7447 - RNA, 22 nt, Artificial Sequence
  Synthetic
cagaacagccuagacccagcca

SEQ ID NO: 7448 - RNA, 22 nt, Artificial Sequence
  Synthetic
agaacagccuagacccagccaa

SEQ ID NO: 7449 - RNA, 22 nt, Artificial Sequence
  Synthetic
gaacagccuagacccagccaag

SEQ ID NO: 7450 - RNA, 22 nt, Artificial Sequence
  Synthetic
aacagccuagacccagccaagc

SEQ ID NO: 7451 - RNA, 22 nt, Artificial Sequence
  Synthetic
acagccuagacccagccaagcu

SEQ ID NO: 7452 - RNA, 22 nt, Artificial Sequence
  Synthetic
cagccuagacccagccaagcuc

SEQ ID NO: 7453 - RNA, 22 nt, Artificial Sequence
  Synthetic
agccuagacccagccaagcucu

SEQ ID NO: 7454 - RNA, 22 nt, Artificial Sequence
  Synthetic
gccuagacccagccaagcucua

SEQ ID NO: 7455 - RNA, 22 nt, Artificial Sequence
  Synthetic
ccuagacccagccaagcucuag

SEQ ID NO: 7456 - RNA, 22 nt, Artificial Sequence
  Synthetic
cuagacccagccaagcucuagg

SEQ ID NO: 7457 - RNA, 22 nt, Artificial Sequence
  Synthetic
uagacccagccaagcucuagga

SEQ ID NO: 7458 - RNA, 22 nt, Artificial Sequence
  Synthetic
agacccagccaagcucuaggaa

SEQ ID NO: 7459 - RNA, 22 nt, Artificial Sequence
  Synthetic
gacccagccaagcucuaggaac

SEQ ID NO: 7460 - RNA, 22 nt, Artificial Sequence
  Synthetic
acccagccaagcucuaggaacu

SEQ ID NO: 7461 - RNA, 22 nt, Artificial Sequence
  Synthetic
cccagccaagcucuaggaacuc

SEQ ID NO: 7462 - RNA, 22 nt, Artificial Sequence
  Synthetic
ccagccaagcucuaggaacuca

SEQ ID NO: 7463 - RNA, 22 nt, Artificial Sequence
  Synthetic
cagccaagcucuaggaacucac

SEQ ID NO: 7464 - RNA, 22 nt, Artificial Sequence
  Synthetic
agccaagcucuaggaacucacg

SEQ ID NO: 7465 - RNA, 22 nt, Artificial Sequence
  Synthetic
gccaagcucuaggaacucacgg

SEQ ID NO: 7466 - RNA, 22 nt, Artificial Sequence
  Synthetic
ccaagcucuaggaacucacggu

SEQ ID NO: 7467 - RNA, 22 nt, Artificial Sequence
  Synthetic
caagcucuaggaacucacgguc

SEQ ID NO: 7468 - RNA, 22 nt, Artificial Sequence
  Synthetic
aagcucuaggaacucacggucc

SEQ ID NO: 7469 - RNA, 22 nt, Artificial Sequence
  Synthetic
agcucuaggaacucacgguccc

SEQ ID NO: 7470 - RNA, 22 nt, Artificial Sequence
  Synthetic
gcucuaggaacucacgguccca

SEQ ID NO: 7471 - RNA, 22 nt, Artificial Sequence
  Synthetic
cucuaggaacucacggucccaa

SEQ ID NO: 7472 - RNA, 22 nt, Artificial Sequence
  Synthetic
ucuaggaacucacggucccaag

SEQ ID NO: 7473 - RNA, 22 nt, Artificial Sequence
  Synthetic
cuaggaacucacggucccaagg

SEQ ID NO: 7474 - RNA, 22 nt, Artificial Sequence
  Synthetic
uaggaacucacggucccaagga

SEQ ID NO: 7475 - RNA, 22 nt, Artificial Sequence
  Synthetic
aggaacucacggucccaaggag

SEQ ID NO: 7476 - RNA, 22 nt, Artificial Sequence
  Synthetic
ggaacucacggucccaaggagu

SEQ ID NO: 7477 - RNA, 22 nt, Artificial Sequence
  Synthetic
gaacucacggucccaaggaguc

SEQ ID NO: 7478 - RNA, 22 nt, Artificial Sequence
  Synthetic
aacucacggucccaaggagucu

SEQ ID NO: 7479 - RNA, 22 nt, Artificial Sequence
  Synthetic
acucacggucccaaggagucua

SEQ ID NO: 7480 - RNA, 22 nt, Artificial Sequence
  Synthetic
cucacggucccaaggagucuag

SEQ ID NO: 7481 - RNA, 22 nt, Artificial Sequence
  Synthetic
ucacggucccaaggagucuaga

SEQ ID NO: 7482 - RNA, 22 nt, Artificial Sequence
  Synthetic
cacggucccaaggagucuagac

SEQ ID NO: 7483 - RNA, 22 nt, Artificial Sequence
  Synthetic
acggucccaaggagucuagacg

SEQ ID NO: 7484 - RNA, 22 nt, Artificial Sequence
  Synthetic
cggucccaaggagucuagacgc

SEQ ID NO: 7485 - RNA, 22 nt, Artificial Sequence
  Synthetic
ggucccaaggagucuagacgcu

SEQ ID NO: 7486 - RNA, 22 nt, Artificial Sequence
  Synthetic
gucccaaggagucuagacgcuu

SEQ ID NO: 7487 - RNA, 22 nt, Artificial Sequence
  Synthetic
ucccaaggagucuagacgcuug

SEQ ID NO: 7488 - RNA, 22 nt, Artificial Sequence
  Synthetic
cccaaggagucuagacgcuugu

SEQ ID NO: 7489 - RNA, 22 nt, Artificial Sequence
  Synthetic
ccaaggagucuagacgcuuguu

SEQ ID NO: 7490 - RNA, 22 nt, Artificial Sequence
  Synthetic
caaggagucuagacgcuuguuc

SEQ ID NO: 7491 - RNA, 22 nt, Artificial Sequence
  Synthetic
aaggagucuagacgcuuguucu

SEQ ID NO: 7492 - RNA, 22 nt, Artificial Sequence
  Synthetic
aggagucuagacgcuuguucug

SEQ ID NO: 7493 - RNA, 22 nt, Artificial Sequence
  Synthetic
ggagucuagacgcuuguucuga

SEQ ID NO: 7494 - RNA, 22 nt, Artificial Sequence
  Synthetic
gagucuagacgcuuguucugau

SEQ ID NO: 7495 - RNA, 22 nt, Artificial Sequence
  Synthetic
agucuagacgcuuguucugaug

SEQ ID NO: 7496 - RNA, 22 nt, Artificial Sequence
  Synthetic
gucuagacgcuuguucugaugc

SEQ ID NO: 7497 - RNA, 22 nt, Artificial Sequence
  Synthetic
ucuagacgcuuguucugaugcu

SEQ ID NO: 7498 - RNA, 22 nt, Artificial Sequence
  Synthetic
cuagacgcuuguucugaugcuc

SEQ ID NO: 7499 - RNA, 22 nt, Artificial Sequence
  Synthetic
uagacgcuuguucugaugcucc

SEQ ID NO: 7500 - RNA, 22 nt, Artificial Sequence
  Synthetic
agacgcuuguucugaugcuccg

SEQ ID NO: 7501 - RNA, 22 nt, Artificial Sequence
  Synthetic
gacgcuuguucugaugcuccga

SEQ ID NO: 7502 - RNA, 22 nt, Artificial Sequence
  Synthetic
acgcuuguucugaugcuccgac

SEQ ID NO: 7503 - RNA, 22 nt, Artificial Sequence
  Synthetic
cgcuuguucugaugcuccgacc

SEQ ID NO: 7504 - RNA, 22 nt, Artificial Sequence
  Synthetic
gcuuguucugaugcuccgaccg

SEQ ID NO: 7505 - RNA, 22 nt, Artificial Sequence
  Synthetic
cuuguucugaugcuccgaccgu

SEQ ID NO: 7506 - RNA, 22 nt, Artificial Sequence
  Synthetic
uuguucugaugcuccgaccgua

SEQ ID NO: 7507 - RNA, 22 nt, Artificial Sequence
  Synthetic
uguucugaugcuccgaccguaa

SEQ ID NO: 7508 - RNA, 22 nt, Artificial Sequence
  Synthetic
guucugaugcuccgaccguaag

SEQ ID NO: 7509 - RNA, 22 nt, Artificial Sequence
  Synthetic
uucugaugcuccgaccguaaga

SEQ ID NO: 7510 - RNA, 22 nt, Artificial Sequence
  Synthetic
ucugaugcuccgaccguaagaa

SEQ ID NO: 7511 - RNA, 22 nt, Artificial Sequence
  Synthetic
cugaugcuccgaccguaagaaa

SEQ ID NO: 7512 - RNA, 22 nt, Artificial Sequence
  Synthetic
ugaugcuccgaccguaagaaaa

SEQ ID NO: 7513 - RNA, 22 nt, Artificial Sequence
  Synthetic
gaugcuccgaccguaagaaaaa

SEQ ID NO: 7514 - RNA, 22 nt, Artificial Sequence
  Synthetic
augcuccgaccguaagaaaaau

SEQ ID NO: 7515 - RNA, 22 nt, Artificial Sequence
  Synthetic
ugcuccgaccguaagaaaaaug

SEQ ID NO: 7516 - RNA, 22 nt, Artificial Sequence
  Synthetic
gcuccgaccguaagaaaaaugu

SEQ ID NO: 7517 - RNA, 22 nt, Artificial Sequence
  Synthetic
cuccgaccguaagaaaaaugug

SEQ ID NO: 7518 - RNA, 22 nt, Artificial Sequence
  Synthetic
uccgaccguaagaaaaaugugg

SEQ ID NO: 7519 - RNA, 22 nt, Artificial Sequence
  Synthetic
ccgaccguaagaaaaauguggg

SEQ ID NO: 7520 - RNA, 22 nt, Artificial Sequence
  Synthetic
cgaccguaagaaaaauguggga

SEQ ID NO: 7521 - RNA, 22 nt, Artificial Sequence
  Synthetic
gaccguaagaaaaaugugggag

SEQ ID NO: 7522 - RNA, 22 nt, Artificial Sequence
  Synthetic
accguaagaaaaaugugggagu

SEQ ID NO: 7523 - RNA, 22 nt, Artificial Sequence
  Synthetic
ccguaagaaaaaugugggagug

SEQ ID NO: 7524 - RNA, 22 nt, Artificial Sequence
  Synthetic
cguaagaaaaaugugggaguga

SEQ ID NO: 7525 - RNA, 22 nt, Artificial Sequence
  Synthetic
guaagaaaaaugugggagugau

SEQ ID NO: 7526 - RNA, 22 nt, Artificial Sequence
  Synthetic
uaagaaaaaugugggagugaug

SEQ ID NO: 7527 - RNA, 22 nt, Artificial Sequence
  Synthetic
aagaaaaaugugggagugauga

SEQ ID NO: 7528 - RNA, 22 nt, Artificial Sequence
  Synthetic
agaaaaaugugggagugaugaa

SEQ ID NO: 7529 - RNA, 22 nt, Artificial Sequence
  Synthetic
gaaaaaugugggagugaugaag

SEQ ID NO: 7530 - RNA, 22 nt, Artificial Sequence
  Synthetic
aaaaaugugggagugaugaagg

SEQ ID NO: 7531 - RNA, 22 nt, Artificial Sequence
  Synthetic
aaaaugugggagugaugaaggc

SEQ ID NO: 7532 - RNA, 22 nt, Artificial Sequence
  Synthetic
aaaugugggagugaugaaggcu

SEQ ID NO: 7533 - RNA, 22 nt, Artificial Sequence
  Synthetic
aaugugggagugaugaaggcuu

SEQ ID NO: 7534 - RNA, 22 nt, Artificial Sequence
  Synthetic
augugggagugaugaaggcuuu

SEQ ID NO: 7535 - RNA, 22 nt, Artificial Sequence
  Synthetic
ugugggagugaugaaggcuuua

SEQ ID NO: 7536 - RNA, 22 nt, Artificial Sequence
  Synthetic
gugggagugaugaaggcuuuau

SEQ ID NO: 7537 - RNA, 22 nt, Artificial Sequence
  Synthetic
ugggagugaugaaggcuuuaug

SEQ ID NO: 7538 - RNA, 22 nt, Artificial Sequence
  Synthetic
gggagugaugaaggcuuuauga

SEQ ID NO: 7539 - RNA, 22 nt, Artificial Sequence
  Synthetic
ggagugaugaaggcuuuaugau

SEQ ID NO: 7540 - RNA, 22 nt, Artificial Sequence
  Synthetic
gagugaugaaggcuuuaugauu

SEQ ID NO: 7541 - RNA, 22 nt, Artificial Sequence
  Synthetic
agugaugaaggcuuuaugauuu

SEQ ID NO: 7542 - RNA, 22 nt, Artificial Sequence
  Synthetic
gugaugaaggcuuuaugauuua

SEQ ID NO: 7543 - RNA, 22 nt, Artificial Sequence
  Synthetic
ugaugaaggcuuuaugauuuac

SEQ ID NO: 7544 - RNA, 22 nt, Artificial Sequence
  Synthetic
gaugaaggcuuuaugauuuacu

SEQ ID NO: 7545 - RNA, 22 nt, Artificial Sequence
  Synthetic
augaaggcuuuaugauuuacuc

SEQ ID NO: 7546 - RNA, 22 nt, Artificial Sequence
  Synthetic
ugaaggcuuuaugauuuacuca

SEQ ID NO: 7547 - RNA, 22 nt, Artificial Sequence
  Synthetic
gaaggcuuuaugauuuacucau

SEQ ID NO: 7548 - RNA, 22 nt, Artificial Sequence
  Synthetic
aaggcuuuaugauuuacucauu

SEQ ID NO: 7549 - RNA, 22 nt, Artificial Sequence
  Synthetic
aggcuuuaugauuuacucauua

SEQ ID NO: 7550 - RNA, 22 nt, Artificial Sequence
  Synthetic
ggcuuuaugauuuacucauuau

SEQ ID NO: 7551 - RNA, 22 nt, Artificial Sequence
  Synthetic
gcuuuaugauuuacucauuaua

SEQ ID NO: 7552 - RNA, 22 nt, Artificial Sequence
  Synthetic
cuuuaugauuuacucauuauag

SEQ ID NO: 7553 - RNA, 22 nt, Artificial Sequence
  Synthetic
uuuaugauuuacucauuauagu

SEQ ID NO: 7554 - RNA, 22 nt, Artificial Sequence
  Synthetic
uuaugauuuacucauuauagua

SEQ ID NO: 7555 - RNA, 22 nt, Artificial Sequence
  Synthetic
uaugauuuacucauuauaguaa

SEQ ID NO: 7556 - RNA, 22 nt, Artificial Sequence
  Synthetic
augauuuacucauuauaguaau

SEQ ID NO: 7557 - RNA, 22 nt, Artificial Sequence
  Synthetic
ugauuuacucauuauaguaaua

SEQ ID NO: 7558 - RNA, 22 nt, Artificial Sequence
  Synthetic
gauuuacucauuauaguaauaa

SEQ ID NO: 7559 - RNA, 22 nt, Artificial Sequence
  Synthetic
auuuacucauuauaguaauaau

SEQ ID NO: 7560 - RNA, 22 nt, Artificial Sequence
  Synthetic
uuuacucauuauaguaauaaua

SEQ ID NO: 7561 - RNA, 22 nt, Artificial Sequence
  Synthetic
uuacucauuauaguaauaauag

SEQ ID NO: 7562 - RNA, 22 nt, Artificial Sequence
  Synthetic
uacucauuauaguaauaauagc

SEQ ID NO: 7563 - RNA, 22 nt, Artificial Sequence
  Synthetic
acucauuauaguaauaauagca

SEQ ID NO: 7564 - RNA, 22 nt, Artificial Sequence
  Synthetic
cucauuauaguaauaauagcag

SEQ ID NO: 7565 - RNA, 22 nt, Artificial Sequence
  Synthetic
ucauuauaguaauaauagcagc

SEQ ID NO: 7566 - RNA, 22 nt, Artificial Sequence
  Synthetic
cauuauaguaauaauagcagcc

SEQ ID NO: 7567 - RNA, 22 nt, Artificial Sequence
  Synthetic
auuauaguaauaauagcagccu

SEQ ID NO: 7568 - RNA, 22 nt, Artificial Sequence
  Synthetic
uuauaguaauaauagcagccua

SEQ ID NO: 7569 - RNA, 22 nt, Artificial Sequence
  Synthetic
uauaguaauaauagcagccuag

SEQ ID NO: 7570 - RNA, 22 nt, Artificial Sequence
  Synthetic
auaguaauaauagcagccuagc

SEQ ID NO: 7571 - RNA, 22 nt, Artificial Sequence
  Synthetic
uaguaauaauagcagccuagcu

SEQ ID NO: 7572 - RNA, 22 nt, Artificial Sequence
  Synthetic
aguaauaauagcagccuagcua

SEQ ID NO: 7573 - RNA, 22 nt, Artificial Sequence
  Synthetic
guaauaauagcagccuagcuag

SEQ ID NO: 7574 - RNA, 22 nt, Artificial Sequence
  Synthetic
uaauaauagcagccuagcuagg

SEQ ID NO: 7575 - RNA, 22 nt, Artificial Sequence
  Synthetic
aauaauagcagccuagcuaggu

SEQ ID NO: 7576 - RNA, 22 nt, Artificial Sequence
  Synthetic
auaauagcagccuagcuaggua

SEQ ID NO: 7577 - RNA, 22 nt, Artificial Sequence
  Synthetic
uaauagcagccuagcuagguac

SEQ ID NO: 7578 - RNA, 22 nt, Artificial Sequence
  Synthetic
aauagcagccuagcuagguaca

SEQ ID NO: 7579 - RNA, 22 nt, Artificial Sequence
  Synthetic
auagcagccuagcuagguacaa

SEQ ID NO: 7580 - RNA, 22 nt, Artificial Sequence
  Synthetic
uagcagccuagcuagguacaaa

SEQ ID NO: 7581 - RNA, 22 nt, Artificial Sequence
  Synthetic
agcagccuagcuagguacaaaa

SEQ ID NO: 7582 - RNA, 22 nt, Artificial Sequence
  Synthetic
gcagccuagcuagguacaaaag

SEQ ID NO: 7583 - RNA, 22 nt, Artificial Sequence
  Synthetic
cagccuagcuagguacaaaagc

SEQ ID NO: 7584 - RNA, 22 nt, Artificial Sequence
  Synthetic
agccuagcuagguacaaaagca

SEQ ID NO: 7585 - RNA, 22 nt, Artificial Sequence
  Synthetic
gccuagcuagguacaaaagcag

SEQ ID NO: 7586 - RNA, 22 nt, Artificial Sequence
  Synthetic
ccuagcuagguacaaaagcagu

SEQ ID NO: 7587 - RNA, 22 nt, Artificial Sequence
  Synthetic
cuagcuagguacaaaagcaguu

SEQ ID NO: 7588 - RNA, 22 nt, Artificial Sequence
  Synthetic
uagcuagguacaaaagcaguua

SEQ ID NO: 7589 - RNA, 22 nt, Artificial Sequence
  Synthetic
agcuagguacaaaagcaguuau

SEQ ID NO: 7590 - RNA, 22 nt, Artificial Sequence
  Synthetic
gcuagguacaaaagcaguuaua

SEQ ID NO: 7591 - RNA, 22 nt, Artificial Sequence
  Synthetic
cuagguacaaaagcaguuauaa

SEQ ID NO: 7592 - RNA, 22 nt, Artificial Sequence
  Synthetic
uagguacaaaagcaguuauaaa

SEQ ID NO: 7593 - RNA, 22 nt, Artificial Sequence
  Synthetic
agguacaaaagcaguuauaaac

SEQ ID NO: 7594 - RNA, 22 nt, Artificial Sequence
  Synthetic
gguacaaaagcaguuauaaacc

SEQ ID NO: 7595 - RNA, 22 nt, Artificial Sequence
  Synthetic
guacaaaagcaguuauaaacca

SEQ ID NO: 7596 - RNA, 22 nt, Artificial Sequence
  Synthetic
uacaaaagcaguuauaaaccau

SEQ ID NO: 7597 - RNA, 22 nt, Artificial Sequence
  Synthetic
acaaaagcaguuauaaaccauu

SEQ ID NO: 7598 - RNA, 22 nt, Artificial Sequence
  Synthetic
caaaagcaguuauaaaccauuu

SEQ ID NO: 7599 - RNA, 22 nt, Artificial Sequence
  Synthetic
aaaagcaguuauaaaccauuua

SEQ ID NO: 7600 - RNA, 22 nt, Artificial Sequence
  Synthetic
aaagcaguuauaaaccauuuau

SEQ ID NO: 7601 - RNA, 22 nt, Artificial Sequence
  Synthetic
aagcaguuauaaaccauuuaua

SEQ ID NO: 7602 - RNA, 22 nt, Artificial Sequence
  Synthetic
agcaguuauaaaccauuuauau

SEQ ID NO: 7603 - RNA, 22 nt, Artificial Sequence
  Synthetic
gcaguuauaaaccauuuauauu

SEQ ID NO: 7604 - RNA, 22 nt, Artificial Sequence
  Synthetic
caguuauaaaccauuuauauua

SEQ ID NO: 7605 - RNA, 22 nt, Artificial Sequence
  Synthetic
aguuauaaaccauuuauauuac

SEQ ID NO: 7606 - RNA, 22 nt, Artificial Sequence
  Synthetic
guuauaaaccauuuauauuaca

SEQ ID NO: 7607 - RNA, 22 nt, Artificial Sequence
  Synthetic
uuauaaaccauuuauauuacac

SEQ ID NO: 7608 - RNA, 22 nt, Artificial Sequence
  Synthetic
uauaaaccauuuauauuacaca

SEQ ID NO: 7609 - RNA, 22 nt, Artificial Sequence
  Synthetic
auaaaccauuuauauuacacag

SEQ ID NO: 7610 - RNA, 22 nt, Artificial Sequence
  Synthetic
uaaaccauuuauauuacacaga

SEQ ID NO: 7611 - RNA, 22 nt, Artificial Sequence
  Synthetic
aaaccauuuauauuacacagaa

SEQ ID NO: 7612 - RNA, 22 nt, Artificial Sequence
  Synthetic
aaccauuuauauuacacagaau

SEQ ID NO: 7613 - RNA, 22 nt, Artificial Sequence
  Synthetic
accauuuauauuacacagaauu

SEQ ID NO: 7614 - RNA, 22 nt, Artificial Sequence
  Synthetic
ccauuuauauuacacagaauua

SEQ ID NO: 7615 - RNA, 22 nt, Artificial Sequence
  Synthetic
cauuuauauuacacagaauuau

SEQ ID NO: 7616 - RNA, 22 nt, Artificial Sequence
  Synthetic
auuuauauuacacagaauuauu

SEQ ID NO: 7617 - RNA, 22 nt, Artificial Sequence
  Synthetic
uuuauauuacacagaauuauuc

SEQ ID NO: 7618 - RNA, 22 nt, Artificial Sequence
  Synthetic
uuauauuacacagaauuauuca

SEQ ID NO: 7619 - RNA, 22 nt, Artificial Sequence
  Synthetic
uauauuacacagaauuauucag

SEQ ID NO: 7620 - RNA, 22 nt, Artificial Sequence
  Synthetic
auauuacacagaauuauucagg

SEQ ID NO: 7621 - RNA, 22 nt, Artificial Sequence
  Synthetic
uauuacacagaauuauucaggu

SEQ ID NO: 7622 - RNA, 22 nt, Artificial Sequence
  Synthetic
auuacacagaauuauucagguc

SEQ ID NO: 7623 - RNA, 22 nt, Artificial Sequence
  Synthetic
uuacacagaauuauucaggucu

SEQ ID NO: 7624 - RNA, 22 nt, Artificial Sequence
  Synthetic
uacacagaauuauucaggucuc

SEQ ID NO: 7625 - RNA, 22 nt, Artificial Sequence
  Synthetic
acacagaauuauucaggucucc

SEQ ID NO: 7626 - RNA, 22 nt, Artificial Sequence
  Synthetic
cacagaauuauucaggucucca

SEQ ID NO: 7627 - RNA, 22 nt, Artificial Sequence
  Synthetic
acagaauuauucaggucuccau

SEQ ID NO: 7628 - RNA, 22 nt, Artificial Sequence
  Synthetic
cagaauuauucaggucuccauu

SEQ ID NO: 7629 - RNA, 22 nt, Artificial Sequence
  Synthetic
agaauuauucaggucuccauuc

SEQ ID NO: 7630 - RNA, 22 nt, Artificial Sequence
  Synthetic
gaauuauucaggucuccauucu

SEQ ID NO: 7631 - RNA, 22 nt, Artificial Sequence
  Synthetic
aauuauucaggucuccauucua

SEQ ID NO: 7632 - RNA, 22 nt, Artificial Sequence
  Synthetic
auuauucaggucuccauucuau

SEQ ID NO: 7633 - RNA, 22 nt, Artificial Sequence
  Synthetic
uuauucaggucuccauucuauc

SEQ ID NO: 7634 - RNA, 22 nt, Artificial Sequence
  Synthetic
uauucaggucuccauucuaucu

SEQ ID NO: 7635 - RNA, 22 nt, Artificial Sequence
  Synthetic
auucaggucuccauucuaucuu

SEQ ID NO: 7636 - RNA, 22 nt, Artificial Sequence
  Synthetic
uucaggucuccauucuaucuua

SEQ ID NO: 7637 - RNA, 22 nt, Artificial Sequence
  Synthetic
ucaggucuccauucuaucuuau

SEQ ID NO: 7638 - RNA, 22 nt, Artificial Sequence
  Synthetic
caggucuccauucuaucuuaug

SEQ ID NO: 7639 - RNA, 22 nt, Artificial Sequence
  Synthetic
aggucuccauucuaucuuaugu

SEQ ID NO: 7640 - RNA, 22 nt, Artificial Sequence
  Synthetic
ggucuccauucuaucuuauguu

SEQ ID NO: 7641 - RNA, 22 nt, Artificial Sequence
  Synthetic
gucuccauucuaucuuauguug

SEQ ID NO: 7642 - RNA, 22 nt, Artificial Sequence
  Synthetic
ucuccauucuaucuuauguugu

SEQ ID NO: 7643 - RNA, 22 nt, Artificial Sequence
  Synthetic
cuccauucuaucuuauguugua

SEQ ID NO: 7644 - RNA, 22 nt, Artificial Sequence
  Synthetic
uccauucuaucuuauguuguaa

SEQ ID NO: 7645 - RNA, 22 nt, Artificial Sequence
  Synthetic
ccauucuaucuuauguuguaaa

SEQ ID NO: 7646 - RNA, 22 nt, Artificial Sequence
  Synthetic
cauucuaucuuauguuguaaaa

SEQ ID NO: 7647 - RNA, 22 nt, Artificial Sequence
  Synthetic
auucuaucuuauguuguaaaau

SEQ ID NO: 7648 - RNA, 22 nt, Artificial Sequence
  Synthetic
uucuaucuuauguuguaaaauu

SEQ ID NO: 7649 - RNA, 22 nt, Artificial Sequence
  Synthetic
ucuaucuuauguuguaaaauug

SEQ ID NO: 7650 - RNA, 22 nt, Artificial Sequence
  Synthetic
cuaucuuauguuguaaaauugu

SEQ ID NO: 7651 - RNA, 22 nt, Artificial Sequence
  Synthetic
uaucuuauguuguaaaauuguu

SEQ ID NO: 7652 - RNA, 22 nt, Artificial Sequence
  Synthetic
aucuuauguuguaaaauuguua

SEQ ID NO: 7653 - RNA, 22 nt, Artificial Sequence
  Synthetic
ucuuauguuguaaaauuguuaa

SEQ ID NO: 7654 - RNA, 22 nt, Artificial Sequence
  Synthetic
cuuauguuguaaaauuguuaau

SEQ ID NO: 7655 - RNA, 22 nt, Artificial Sequence
  Synthetic
uuauguuguaaaauuguuaauu

SEQ ID NO: 7656 - RNA, 22 nt, Artificial Sequence
  Synthetic
uauguuguaaaauuguuaauug

SEQ ID NO: 7657 - RNA, 22 nt, Artificial Sequence
  Synthetic
auguuguaaaauuguuaauugg

SEQ ID NO: 7658 - RNA, 22 nt, Artificial Sequence
  Synthetic
uguuguaaaauuguuaauugga

SEQ ID NO: 7659 - RNA, 22 nt, Artificial Sequence
  Synthetic
guuguaaaauuguuaauuggau

SEQ ID NO: 7660 - RNA, 22 nt, Artificial Sequence
  Synthetic
uuguaaaauuguuaauuggauu

SEQ ID NO: 7661 - RNA, 22 nt, Artificial Sequence
  Synthetic
uguaaaauuguuaauuggauuu

SEQ ID NO: 7662 - RNA, 22 nt, Artificial Sequence
  Synthetic
guaaaauuguuaauuggauuuc

SEQ ID NO: 7663 - RNA, 22 nt, Artificial Sequence
  Synthetic
uaaaauuguuaauuggauuucc

SEQ ID NO: 7664 - RNA, 22 nt, Artificial Sequence
  Synthetic
aaaauuguuaauuggauuucca

SEQ ID NO: 7665 - RNA, 22 nt, Artificial Sequence
  Synthetic
aaauuguuaauuggauuuccag

SEQ ID NO: 7666 - RNA, 22 nt, Artificial Sequence
  Synthetic
aauuguuaauuggauuuccagu

SEQ ID NO: 7667 - RNA, 22 nt, Artificial Sequence
  Synthetic
auuguuaauuggauuuccagug

SEQ ID NO: 7668 - RNA, 22 nt, Artificial Sequence
  Synthetic
uuguuaauuggauuuccaguga

SEQ ID NO: 7669 - RNA, 22 nt, Artificial Sequence
  Synthetic
uguuaauuggauuuccagugag

SEQ ID NO: 7670 - RNA, 22 nt, Artificial Sequence
  Synthetic
guuaauuggauuuccagugagu

SEQ ID NO: 7671 - RNA, 22 nt, Artificial Sequence
  Synthetic
uuaauuggauuuccagugaguu

SEQ ID NO: 7672 - RNA, 22 nt, Artificial Sequence
  Synthetic
uaauuggauuuccagugaguug

SEQ ID NO: 7673 - RNA, 22 nt, Artificial Sequence
  Synthetic
aauuggauuuccagugaguugu

SEQ ID NO: 7674 - RNA, 22 nt, Artificial Sequence
  Synthetic
auuggauuuccagugaguuguu

SEQ ID NO: 7675 - RNA, 22 nt, Artificial Sequence
  Synthetic
uuggauuuccagugaguuguuu

SEQ ID NO: 7676 - RNA, 22 nt, Artificial Sequence
  Synthetic
uggauuuccagugaguuguuua

SEQ ID NO: 7677 - RNA, 22 nt, Artificial Sequence
  Synthetic
ggauuuccagugaguuguuuag

SEQ ID NO: 7678 - RNA, 22 nt, Artificial Sequence
  Synthetic
gauuuccagugaguuguuuaga

SEQ ID NO: 7679 - RNA, 22 nt, Artificial Sequence
  Synthetic
auuuccagugaguuguuuagau

SEQ ID NO: 7680 - RNA, 22 nt, Artificial Sequence
  Synthetic
uuuccagugaguuguuuagaug

SEQ ID NO: 7681 - RNA, 22 nt, Artificial Sequence
  Synthetic
uuccagugaguuguuuagauga

SEQ ID NO: 7682 - RNA, 22 nt, Artificial Sequence
  Synthetic
uccagugaguuguuuagaugau

SEQ ID NO: 7683 - RNA, 22 nt, Artificial Sequence
  Synthetic
ccagugaguuguuuagaugauu

SEQ ID NO: 7684 - RNA, 22 nt, Artificial Sequence
  Synthetic
cagugaguuguuuagaugauua

SEQ ID NO: 7685 - RNA, 22 nt, Artificial Sequence
  Synthetic
agugaguuguuuagaugauuag

SEQ ID NO: 7686 - RNA, 22 nt, Artificial Sequence
  Synthetic
gugaguuguuuagaugauuagu

SEQ ID NO: 7687 - RNA, 22 nt, Artificial Sequence
  Synthetic
ugaguuguuuagaugauuagug

SEQ ID NO: 7688 - RNA, 22 nt, Artificial Sequence
  Synthetic
gaguuguuuagaugauuaguga

SEQ ID NO: 7689 - RNA, 22 nt, Artificial Sequence
  Synthetic
aguuguuuagaugauuagugau

SEQ ID NO: 7690 - RNA, 22 nt, Artificial Sequence
  Synthetic
guuguuuagaugauuagugaua

SEQ ID NO: 7691 - RNA, 22 nt, Artificial Sequence
  Synthetic
uuguuuagaugauuagugauaa

SEQ ID NO: 7692 - RNA, 22 nt, Artificial Sequence
  Synthetic
uguuuagaugauuagugauaau

SEQ ID NO: 7693 - RNA, 22 nt, Artificial Sequence
  Synthetic
guuuagaugauuagugauaaua

SEQ ID NO: 7694 - RNA, 22 nt, Artificial Sequence
  Synthetic
uuuagaugauuagugauaauaa

SEQ ID NO: 7695 - RNA, 22 nt, Artificial Sequence
  Synthetic
uuagaugauuagugauaauaag

SEQ ID NO: 7696 - RNA, 22 nt, Artificial Sequence
  Synthetic
uagaugauuagugauaauaagg

SEQ ID NO: 7697 - RNA, 22 nt, Artificial Sequence
  Synthetic
agaugauuagugauaauaagga

SEQ ID NO: 7698 - RNA, 22 nt, Artificial Sequence
  Synthetic
gaugauuagugauaauaaggaa

SEQ ID NO: 7699 - RNA, 22 nt, Artificial Sequence
  Synthetic
augauuagugauaauaaggaau

SEQ ID NO: 7700 - RNA, 22 nt, Artificial Sequence
  Synthetic
ugauuagugauaauaaggaaug

SEQ ID NO: 7701 - RNA, 22 nt, Artificial Sequence
  Synthetic
gauuagugauaauaaggaaugg

SEQ ID NO: 7702 - RNA, 22 nt, Artificial Sequence
  Synthetic
auuagugauaauaaggaauggu

SEQ ID NO: 7703 - RNA, 22 nt, Artificial Sequence
  Synthetic
uuagugauaauaaggaauggua

SEQ ID NO: 7704 - RNA, 22 nt, Artificial Sequence
  Synthetic
uagugauaauaaggaaugguaa

SEQ ID NO: 7705 - RNA, 22 nt, Artificial Sequence
  Synthetic
agugauaauaaggaaugguaaa

SEQ ID NO: 7706 - RNA, 22 nt, Artificial Sequence
  Synthetic
gugauaauaaggaaugguaaau

SEQ ID NO: 7707 - RNA, 22 nt, Artificial Sequence
  Synthetic
ugauaauaaggaaugguaaauc

SEQ ID NO: 7708 - RNA, 22 nt, Artificial Sequence
  Synthetic
gauaauaaggaaugguaaaucc

SEQ ID NO: 7709 - RNA, 22 nt, Artificial Sequence
  Synthetic
auaauaaggaaugguaaaucca

SEQ ID NO: 7710 - RNA, 22 nt, Artificial Sequence
  Synthetic
uaauaaggaaugguaaauccau

SEQ ID NO: 7711 - RNA, 22 nt, Artificial Sequence
  Synthetic
aauaaggaaugguaaauccaua

SEQ ID NO: 7712 - RNA, 22 nt, Artificial Sequence
  Synthetic
auaaggaaugguaaauccauag

SEQ ID NO: 7713 - RNA, 22 nt, Artificial Sequence
  Synthetic
uaaggaaugguaaauccauagc

SEQ ID NO: 7714 - RNA, 22 nt, Artificial Sequence
  Synthetic
aaggaaugguaaauccauagca

SEQ ID NO: 7715 - RNA, 22 nt, Artificial Sequence
  Synthetic
aggaaugguaaauccauagcac

SEQ ID NO: 7716 - RNA, 22 nt, Artificial Sequence
  Synthetic
ggaaugguaaauccauagcacc

SEQ ID NO: 7717 - RNA, 22 nt, Artificial Sequence
  Synthetic
gaaugguaaauccauagcacca

SEQ ID NO: 7718 - RNA, 22 nt, Artificial Sequence
  Synthetic
aaugguaaauccauagcaccau

SEQ ID NO: 7719 - RNA, 22 nt, Artificial Sequence
  Synthetic
augguaaauccauagcaccauu

SEQ ID NO: 7720 - RNA, 22 nt, Artificial Sequence
  Synthetic
ugguaaauccauagcaccauuu

SEQ ID NO: 7721 - RNA, 22 nt, Artificial Sequence
  Synthetic
gguaaauccauagcaccauuuc

SEQ ID NO: 7722 - RNA, 22 nt, Artificial Sequence
  Synthetic
guaaauccauagcaccauuuca

SEQ ID NO: 7723 - RNA, 22 nt, Artificial Sequence
  Synthetic
uaaauccauagcaccauuucaa

SEQ ID NO: 7724 - RNA, 22 nt, Artificial Sequence
  Synthetic
aaauccauagcaccauuucaaa

SEQ ID NO: 7725 - RNA, 22 nt, Artificial Sequence
  Synthetic
aauccauagcaccauuucaaag

SEQ ID NO: 7726 - RNA, 22 nt, Artificial Sequence
  Synthetic
auccauagcaccauuucaaaga

SEQ ID NO: 7727 - RNA, 22 nt, Artificial Sequence
  Synthetic
uccauagcaccauuucaaagac

SEQ ID NO: 7728 - RNA, 22 nt, Artificial Sequence
  Synthetic
ccauagcaccauuucaaagacu

SEQ ID NO: 7729 - RNA, 22 nt, Artificial Sequence
  Synthetic
cauagcaccauuucaaagacuu

SEQ ID NO: 7730 - RNA, 22 nt, Artificial Sequence
  Synthetic
auagcaccauuucaaagacuug

SEQ ID NO: 7731 - RNA, 22 nt, Artificial Sequence
  Synthetic
uagcaccauuucaaagacuugu

SEQ ID NO: 7732 - RNA, 22 nt, Artificial Sequence
  Synthetic
agcaccauuucaaagacuuguu

SEQ ID NO: 7733 - RNA, 22 nt, Artificial Sequence
  Synthetic
gcaccauuucaaagacuuguug

SEQ ID NO: 7734 - RNA, 22 nt, Artificial Sequence
  Synthetic
caccauuucaaagacuuguugu

SEQ ID NO: 7735 - RNA, 22 nt, Artificial Sequence
  Synthetic
accauuucaaagacuuguuguc

SEQ ID NO: 7736 - RNA, 22 nt, Artificial Sequence
  Synthetic
ccauuucaaagacuuguuguca

SEQ ID NO: 7737 - RNA, 22 nt, Artificial Sequence
  Synthetic
cauuucaaagacuuguugucac

SEQ ID NO: 7738 - RNA, 22 nt, Artificial Sequence
  Synthetic
auuucaaagacuuguugucacu

SEQ ID NO: 7739 - RNA, 22 nt, Artificial Sequence
  Synthetic
uuucaaagacuuguugucacug

SEQ ID NO: 7740 - RNA, 22 nt, Artificial Sequence
  Synthetic
uucaaagacuuguugucacuga

SEQ ID NO: 7741 - RNA, 22 nt, Artificial Sequence
  Synthetic
ucaaagacuuguugucacugau

SEQ ID NO: 7742 - RNA, 22 nt, Artificial Sequence
  Synthetic
caaagacuuguugucacugauu

SEQ ID NO: 7743 - RNA, 22 nt, Artificial Sequence
  Synthetic
aaagacuuguugucacugauuu

SEQ ID NO: 7744 - RNA, 22 nt, Artificial Sequence
  Synthetic
aagacuuguugucacugauuuc

SEQ ID NO: 7745 - RNA, 22 nt, Artificial Sequence
  Synthetic
agacuuguugucacugauuucu

SEQ ID NO: 7746 - RNA, 22 nt, Artificial Sequence
  Synthetic
gacuuguugucacugauuucuc

SEQ ID NO: 7747 - RNA, 22 nt, Artificial Sequence
  Synthetic
acuuguugucacugauuucuca

SEQ ID NO: 7748 - RNA, 22 nt, Artificial Sequence
  Synthetic
cuuguugucacugauuucucau

SEQ ID NO: 7749 - RNA, 22 nt, Artificial Sequence
  Synthetic
uuguugucacugauuucucauu

SEQ ID NO: 7750 - RNA, 22 nt, Artificial Sequence
  Synthetic
uguugucacugauuucucauuu

SEQ ID NO: 7751 - RNA, 22 nt, Artificial Sequence
  Synthetic
guugucacugauuucucauuua

SEQ ID NO: 7752 - RNA, 22 nt, Artificial Sequence
  Synthetic
uugucacugauuucucauuuag

SEQ ID NO: 7753 - RNA, 22 nt, Artificial Sequence
  Synthetic
ugucacugauuucucauuuaga

SEQ ID NO: 7754 - RNA, 22 nt, Artificial Sequence
  Synthetic
gucacugauuucucauuuagau

SEQ ID NO: 7755 - RNA, 22 nt, Artificial Sequence
  Synthetic
ucacugauuucucauuuagaug

SEQ ID NO: 7756 - RNA, 22 nt, Artificial Sequence
  Synthetic
cacugauuucucauuuagaugu

SEQ ID NO: 7757 - RNA, 22 nt, Artificial Sequence
  Synthetic
acugauuucucauuuagaugug

SEQ ID NO: 7758 - RNA, 22 nt, Artificial Sequence
  Synthetic
cugauuucucauuuagaugugu

SEQ ID NO: 7759 - RNA, 22 nt, Artificial Sequence
  Synthetic
ugauuucucauuuagaugugug

SEQ ID NO: 7760 - RNA, 22 nt, Artificial Sequence
  Synthetic
gauuucucauuuagauguguga

SEQ ID NO: 7761 - RNA, 22 nt, Artificial Sequence
  Synthetic
auuucucauuuagaugugugac

SEQ ID NO: 7762 - RNA, 22 nt, Artificial Sequence
  Synthetic
uuucucauuuagaugugugacg

SEQ ID NO: 7763 - RNA, 22 nt, Artificial Sequence
  Synthetic
uucucauuuagaugugugacga

SEQ ID NO: 7764 - RNA, 22 nt, Artificial Sequence
  Synthetic
ucucauuuagaugugugacgaa

SEQ ID NO: 7765 - RNA, 22 nt, Artificial Sequence
  Synthetic
cucauuuagaugugugacgaag

SEQ ID NO: 7766 - RNA, 22 nt, Artificial Sequence
  Synthetic
ucauuuagaugugugacgaaga

SEQ ID NO: 7767 - RNA, 22 nt, Artificial Sequence
  Synthetic
cauuuagaugugugacgaagau

SEQ ID NO: 7768 - RNA, 22 nt, Artificial Sequence
  Synthetic
auuuagaugugugacgaagaua

SEQ ID NO: 7769 - RNA, 22 nt, Artificial Sequence
  Synthetic
uuuagaugugugacgaagauac

SEQ ID NO: 7770 - RNA, 22 nt, Artificial Sequence
  Synthetic
uuagaugugugacgaagauacu

SEQ ID NO: 7771 - RNA, 22 nt, Artificial Sequence
  Synthetic
uagaugugugacgaagauacuc

SEQ ID NO: 7772 - RNA, 22 nt, Artificial Sequence
  Synthetic
agaugugugacgaagauacucc

SEQ ID NO: 7773 - RNA, 22 nt, Artificial Sequence
  Synthetic
gaugugugacgaagauacucca

SEQ ID NO: 7774 - RNA, 22 nt, Artificial Sequence
  Synthetic
augugugacgaagauacuccac

SEQ ID NO: 7775 - RNA, 22 nt, Artificial Sequence
  Synthetic
ugugugacgaagauacuccacc

SEQ ID NO: 7776 - RNA, 22 nt, Artificial Sequence
  Synthetic
gugugacgaagauacuccaccu

SEQ ID NO: 7777 - RNA, 22 nt, Artificial Sequence
  Synthetic
ugugacgaagauacuccaccug

SEQ ID NO: 7778 - RNA, 22 nt, Artificial Sequence
  Synthetic
gugacgaagauacuccaccugu

SEQ ID NO: 7779 - RNA, 22 nt, Artificial Sequence
  Synthetic
ugacgaagauacuccaccugua

SEQ ID NO: 7780 - RNA, 22 nt, Artificial Sequence
  Synthetic
gacgaagauacuccaccuguaa

SEQ ID NO: 7781 - RNA, 22 nt, Artificial Sequence
  Synthetic
acgaagauacuccaccuguaag

SEQ ID NO: 7782 - RNA, 22 nt, Artificial Sequence
  Synthetic
cgaagauacuccaccuguaagg

SEQ ID NO: 7783 - RNA, 22 nt, Artificial Sequence
  Synthetic
gaagauacuccaccuguaaggg

SEQ ID NO: 7784 - RNA, 22 nt, Artificial Sequence
  Synthetic
aagauacuccaccuguaagggc

SEQ ID NO: 7785 - RNA, 22 nt, Artificial Sequence
  Synthetic
agauacuccaccuguaagggca

SEQ ID NO: 7786 - RNA, 22 nt, Artificial Sequence
  Synthetic
gauacuccaccuguaagggcaa

SEQ ID NO: 7787 - RNA, 22 nt, Artificial Sequence
  Synthetic
auacuccaccuguaagggcaag

SEQ ID NO: 7788 - RNA, 22 nt, Artificial Sequence
  Synthetic
uacuccaccuguaagggcaagu

SEQ ID NO: 7789 - RNA, 22 nt, Artificial Sequence
  Synthetic
acuccaccuguaagggcaagua

SEQ ID NO: 7790 - RNA, 22 nt, Artificial Sequence
  Synthetic
cuccaccuguaagggcaaguau

SEQ ID NO: 7791 - RNA, 22 nt, Artificial Sequence
  Synthetic
uccaccuguaagggcaaguaug

SEQ ID NO: 7792 - RNA, 22 nt, Artificial Sequence
  Synthetic
ccaccuguaagggcaaguaugc

SEQ ID NO: 7793 - RNA, 22 nt, Artificial Sequence
  Synthetic
caccuguaagggcaaguaugcc

SEQ ID NO: 7794 - RNA, 22 nt, Artificial Sequence
  Synthetic
accuguaagggcaaguaugcca

SEQ ID NO: 7795 - RNA, 22 nt, Artificial Sequence
  Synthetic
ccuguaagggcaaguaugccaa

SEQ ID NO: 7796 - RNA, 22 nt, Artificial Sequence
  Synthetic
cuguaagggcaaguaugccaau

SEQ ID NO: 7797 - RNA, 22 nt, Artificial Sequence
  Synthetic
uguaagggcaaguaugccaaug

SEQ ID NO: 7798 - RNA, 22 nt, Artificial Sequence
  Synthetic
guaagggcaaguaugccaaugc

SEQ ID NO: 7799 - RNA, 22 nt, Artificial Sequence
  Synthetic
uaagggcaaguaugccaaugcc

SEQ ID NO: 7800 - RNA, 22 nt, Artificial Sequence
  Synthetic
aagggcaaguaugccaaugcca

SEQ ID NO: 7801 - RNA, 22 nt, Artificial Sequence
  Synthetic
agggcaaguaugccaaugccac

SEQ ID NO: 7802 - RNA, 22 nt, Artificial Sequence
  Synthetic
gggcaaguaugccaaugccaca

SEQ ID NO: 7803 - RNA, 22 nt, Artificial Sequence
  Synthetic
ggcaaguaugccaaugccacaa

SEQ ID NO: 7804 - RNA, 22 nt, Artificial Sequence
  Synthetic
gcaaguaugccaaugccacaag

SEQ ID NO: 7805 - RNA, 22 nt, Artificial Sequence
  Synthetic
caaguaugccaaugccacaagc

SEQ ID NO: 7806 - RNA, 22 nt, Artificial Sequence
  Synthetic
aaguaugccaaugccacaagcc

SEQ ID NO: 7807 - RNA, 22 nt, Artificial Sequence
  Synthetic
aguaugccaaugccacaagccg

SEQ ID NO: 7808 - RNA, 22 nt, Artificial Sequence
  Synthetic
guaugccaaugccacaagccgu

SEQ ID NO: 7809 - RNA, 22 nt, Artificial Sequence
  Synthetic
uaugccaaugccacaagccgug

SEQ ID NO: 7810 - RNA, 22 nt, Artificial Sequence
  Synthetic
augccaaugccacaagccgugu

SEQ ID NO: 7811 - RNA, 22 nt, Artificial Sequence
  Synthetic
ugccaaugccacaagccguguu

SEQ ID NO: 7812 - RNA, 22 nt, Artificial Sequence
  Synthetic
gccaaugccacaagccguguuu

SEQ ID NO: 7813 - RNA, 22 nt, Artificial Sequence
  Synthetic
ccaaugccacaagccguguuuu

SEQ ID NO: 7814 - RNA, 22 nt, Artificial Sequence
  Synthetic
caaugccacaagccguguuuuu

SEQ ID NO: 7815 - RNA, 22 nt, Artificial Sequence
  Synthetic
aaugccacaagccguguuuuug

SEQ ID NO: 7816 - RNA, 22 nt, Artificial Sequence
  Synthetic
augccacaagccguguuuuugc

SEQ ID NO: 7817 - RNA, 22 nt, Artificial Sequence
  Synthetic
ugccacaagccguguuuuugca

SEQ ID NO: 7818 - RNA, 22 nt, Artificial Sequence
  Synthetic
gccacaagccguguuuuugcaa

SEQ ID NO: 7819 - RNA, 22 nt, Artificial Sequence
  Synthetic
ccacaagccguguuuuugcaag

SEQ ID NO: 7820 - RNA, 22 nt, Artificial Sequence
  Synthetic
cacaagccguguuuuugcaagg

SEQ ID NO: 7821 - RNA, 22 nt, Artificial Sequence
  Synthetic
acaagccguguuuuugcaaggg

SEQ ID NO: 7822 - RNA, 22 nt, Artificial Sequence
  Synthetic
caagccguguuuuugcaagggc

SEQ ID NO: 7823 - RNA, 22 nt, Artificial Sequence
  Synthetic
aagccguguuuuugcaagggcu

SEQ ID NO: 7824 - RNA, 22 nt, Artificial Sequence
  Synthetic
agccguguuuuugcaagggcuc

SEQ ID NO: 7825 - RNA, 22 nt, Artificial Sequence
  Synthetic
gccguguuuuugcaagggcucc

SEQ ID NO: 7826 - RNA, 22 nt, Artificial Sequence
  Synthetic
ccguguuuuugcaagggcucca

SEQ ID NO: 7827 - RNA, 22 nt, Artificial Sequence
  Synthetic
cguguuuuugcaagggcuccag

SEQ ID NO: 7828 - RNA, 22 nt, Artificial Sequence
  Synthetic
guguuuuugcaagggcuccagu

SEQ ID NO: 7829 - RNA, 22 nt, Artificial Sequence
  Synthetic
uguuuuugcaagggcuccaguu

SEQ ID NO: 7830 - RNA, 22 nt, Artificial Sequence
  Synthetic
guuuuugcaagggcuccaguuu

SEQ ID NO: 7831 - RNA, 22 nt, Artificial Sequence
  Synthetic
uuuuugcaagggcuccaguuug

SEQ ID NO: 7832 - RNA, 22 nt, Artificial Sequence
  Synthetic
uuuugcaagggcuccaguuugg

SEQ ID NO: 7833 - RNA, 22 nt, Artificial Sequence
  Synthetic
uuugcaagggcuccaguuuggg

SEQ ID NO: 7834 - RNA, 22 nt, Artificial Sequence
  Synthetic
uugcaagggcuccaguuugggc

SEQ ID NO: 7835 - RNA, 22 nt, Artificial Sequence
  Synthetic
ugcaagggcuccaguuugggca

SEQ ID NO: 7836 - RNA, 22 nt, Artificial Sequence
  Synthetic
gcaagggcuccaguuugggcau

SEQ ID NO: 7837 - RNA, 22 nt, Artificial Sequence
  Synthetic
caagggcuccaguuugggcauu

SEQ ID NO: 7838 - RNA, 22 nt, Artificial Sequence
  Synthetic
aagggcuccaguuugggcauuu

SEQ ID NO: 7839 - RNA, 22 nt, Artificial Sequence
  Synthetic
agggcuccaguuugggcauuuu

SEQ ID NO: 7840 - RNA, 22 nt, Artificial Sequence
  Synthetic
gggcuccaguuugggcauuuug

SEQ ID NO: 7841 - RNA, 22 nt, Artificial Sequence
  Synthetic
ggcuccaguuugggcauuuugu

SEQ ID NO: 7842 - RNA, 22 nt, Artificial Sequence
  Synthetic
gcuccaguuugggcauuuuguc

SEQ ID NO: 7843 - RNA, 22 nt, Artificial Sequence
  Synthetic
cuccaguuugggcauuuugucc

SEQ ID NO: 7844 - RNA, 22 nt, Artificial Sequence
  Synthetic
uccaguuugggcauuuuguccg

SEQ ID NO: 7845 - RNA, 22 nt, Artificial Sequence
  Synthetic
ccaguuugggcauuuuguccgu

SEQ ID NO: 7846 - RNA, 22 nt, Artificial Sequence
  Synthetic
caguuugggcauuuuguccgug

SEQ ID NO: 7847 - RNA, 22 nt, Artificial Sequence
  Synthetic
aguuugggcauuuuguccgugu

SEQ ID NO: 7848 - RNA, 22 nt, Artificial Sequence
  Synthetic
guuugggcauuuuguccgugug

SEQ ID NO: 7849 - RNA, 22 nt, Artificial Sequence
  Synthetic
uuugggcauuuuguccgugugc

SEQ ID NO: 7850 - RNA, 22 nt, Artificial Sequence
  Synthetic
uugggcauuuuguccgugugcg

SEQ ID NO: 7851 - RNA, 22 nt, Artificial Sequence
  Synthetic
ugggcauuuuguccgugugcgc

SEQ ID NO: 7852 - RNA, 22 nt, Artificial Sequence
  Synthetic
gggcauuuuguccgugugcgcg

SEQ ID NO: 7853 - RNA, 22 nt, Artificial Sequence
  Synthetic
ggcauuuuguccgugugcgcgu

SEQ ID NO: 7854 - RNA, 22 nt, Artificial Sequence
  Synthetic
gcauuuuguccgugugcgcgua

SEQ ID NO: 7855 - RNA, 22 nt, Artificial Sequence
  Synthetic
cauuuuguccgugugcgcguaa

SEQ ID NO: 7856 - RNA, 22 nt, Artificial Sequence
  Synthetic
auuuuguccgugugcgcguaaa

SEQ ID NO: 7857 - RNA, 22 nt, Artificial Sequence
  Synthetic
uuuuguccgugugcgcguaaag

SEQ ID NO: 7858 - RNA, 22 nt, Artificial Sequence
  Synthetic
uuuguccgugugcgcguaaagc

SEQ ID NO: 7859 - RNA, 22 nt, Artificial Sequence
  Synthetic
uuguccgugugcgcguaaagcu

SEQ ID NO: 7860 - RNA, 22 nt, Artificial Sequence
  Synthetic
uguccgugugcgcguaaagcuu

SEQ ID NO: 7861 - RNA, 22 nt, Artificial Sequence
  Synthetic
guccgugugcgcguaaagcuuc

SEQ ID NO: 7862 - RNA, 22 nt, Artificial Sequence
  Synthetic
uccgugugcgcguaaagcuuca

SEQ ID NO: 7863 - RNA, 22 nt, Artificial Sequence
  Synthetic
ccgugugcgcguaaagcuucac

SEQ ID NO: 7864 - RNA, 22 nt, Artificial Sequence
  Synthetic
cgugugcgcguaaagcuucaca

SEQ ID NO: 7865 - RNA, 22 nt, Artificial Sequence
  Synthetic
gugugcgcguaaagcuucacac

SEQ ID NO: 7866 - RNA, 22 nt, Artificial Sequence
  Synthetic
ugugcgcguaaagcuucacaca

SEQ ID NO: 7867 - RNA, 22 nt, Artificial Sequence
  Synthetic
gugcgcguaaagcuucacacag

SEQ ID NO: 7868 - RNA, 22 nt, Artificial Sequence
  Synthetic
ugcgcguaaagcuucacacaga

SEQ ID NO: 7869 - RNA, 22 nt, Artificial Sequence
  Synthetic
gcgcguaaagcuucacacagag

SEQ ID NO: 7870 - RNA, 22 nt, Artificial Sequence
  Synthetic
cgcguaaagcuucacacagagg

SEQ ID NO: 7871 - RNA, 22 nt, Artificial Sequence
  Synthetic
gcguaaagcuucacacagaggu

SEQ ID NO: 7872 - RNA, 22 nt, Artificial Sequence
  Synthetic
cguaaagcuucacacagagguu

SEQ ID NO: 7873 - RNA, 22 nt, Artificial Sequence
  Synthetic
guaaagcuucacacagagguuc

SEQ ID NO: 7874 - RNA, 22 nt, Artificial Sequence
  Synthetic
uaaagcuucacacagagguucg

SEQ ID NO: 7875 - RNA, 22 nt, Artificial Sequence
  Synthetic
aaagcuucacacagagguucgg

SEQ ID NO: 7876 - RNA, 22 nt, Artificial Sequence
  Synthetic
aagcuucacacagagguucggg

SEQ ID NO: 7877 - RNA, 22 nt, Artificial Sequence
  Synthetic
agcuucacacagagguucgggc

SEQ ID NO: 7878 - RNA, 22 nt, Artificial Sequence
  Synthetic
gcuucacacagagguucgggca

SEQ ID NO: 7879 - RNA, 22 nt, Artificial Sequence
  Synthetic
cuucacacagagguucgggcag

SEQ ID NO: 7880 - RNA, 22 nt, Artificial Sequence
  Synthetic
uucacacagagguucgggcagc

SEQ ID NO: 7881 - RNA, 22 nt, Artificial Sequence
  Synthetic
ucacacagagguucgggcagcg

SEQ ID NO: 7882 - RNA, 22 nt, Artificial Sequence
  Synthetic
cacacagagguucgggcagcgg

SEQ ID NO: 7883 - RNA, 22 nt, Artificial Sequence
  Synthetic
acacagagguucgggcagcggc

SEQ ID NO: 7884 - RNA, 22 nt, Artificial Sequence
  Synthetic
cacagagguucgggcagcggcu

SEQ ID NO: 7885 - RNA, 22 nt, Artificial Sequence
  Synthetic
acagagguucgggcagcggcug

SEQ ID NO: 7886 - RNA, 22 nt, Artificial Sequence
  Synthetic
cagagguucgggcagcggcugu

SEQ ID NO: 7887 - RNA, 22 nt, Artificial Sequence
  Synthetic
agagguucgggcagcggcuguu

SEQ ID NO: 7888 - RNA, 22 nt, Artificial Sequence
  Synthetic
gagguucgggcagcggcuguuu

SEQ ID NO: 7889 - RNA, 22 nt, Artificial Sequence
  Synthetic
agguucgggcagcggcuguuuc

SEQ ID NO: 7890 - RNA, 22 nt, Artificial Sequence
  Synthetic
gguucgggcagcggcuguuucu

SEQ ID NO: 7891 - RNA, 22 nt, Artificial Sequence
  Synthetic
guucgggcagcggcuguuucug

SEQ ID NO: 7892 - RNA, 22 nt, Artificial Sequence
  Synthetic
uucgggcagcggcuguuucugu

SEQ ID NO: 7893 - RNA, 22 nt, Artificial Sequence
  Synthetic
ucgggcagcggcuguuucuguu

SEQ ID NO: 7894 - RNA, 22 nt, Artificial Sequence
  Synthetic
cgggcagcggcuguuucuguug

SEQ ID NO: 7895 - RNA, 22 nt, Artificial Sequence
  Synthetic
gggcagcggcuguuucuguugg

SEQ ID NO: 7896 - RNA, 22 nt, Artificial Sequence
  Synthetic
ggcagcggcuguuucuguugga

SEQ ID NO: 7897 - RNA, 22 nt, Artificial Sequence
  Synthetic
gcagcggcuguuucuguuggau

SEQ ID NO: 7898 - RNA, 22 nt, Artificial Sequence
  Synthetic
cagcggcuguuucuguuggaug

SEQ ID NO: 7899 - RNA, 22 nt, Artificial Sequence
  Synthetic
agcggcuguuucuguuggaugc

SEQ ID NO: 7900 - RNA, 22 nt, Artificial Sequence
  Synthetic
gcggcuguuucuguuggaugca

SEQ ID NO: 7901 - RNA, 22 nt, Artificial Sequence
  Synthetic
cggcuguuucuguuggaugcac

SEQ ID NO: 7902 - RNA, 22 nt, Artificial Sequence
  Synthetic
ggcuguuucuguuggaugcacu

SEQ ID NO: 7903 - RNA, 22 nt, Artificial Sequence
  Synthetic
gcuguuucuguuggaugcacug

SEQ ID NO: 7904 - RNA, 22 nt, Artificial Sequence
  Synthetic
cuguuucuguuggaugcacugg

SEQ ID NO: 7905 - RNA, 22 nt, Artificial Sequence
  Synthetic
uguuucuguuggaugcacuggg

SEQ ID NO: 7906 - RNA, 22 nt, Artificial Sequence
  Synthetic
guuucuguuggaugcacugggu

SEQ ID NO: 7907 - RNA, 22 nt, Artificial Sequence
  Synthetic
uuucuguuggaugcacuggguc

SEQ ID NO: 7908 - RNA, 22 nt, Artificial Sequence
  Synthetic
uucuguuggaugcacuggguca

SEQ ID NO: 7909 - RNA, 22 nt, Artificial Sequence
  Synthetic
ucuguuggaugcacugggucac

SEQ ID NO: 7910 - RNA, 22 nt, Artificial Sequence
  Synthetic
cuguuggaugcacugggucacc

SEQ ID NO: 7911 - RNA, 22 nt, Artificial Sequence
  Synthetic
uguuggaugcacugggucaccc

SEQ ID NO: 7912 - RNA, 22 nt, Artificial Sequence
  Synthetic
guuggaugcacugggucaccca

SEQ ID NO: 7913 - RNA, 22 nt, Artificial Sequence
  Synthetic
uuggaugcacugggucacccac

SEQ ID NO: 7914 - RNA, 22 nt, Artificial Sequence
  Synthetic
uggaugcacugggucacccacc

SEQ ID NO: 7915 - RNA, 22 nt, Artificial Sequence
  Synthetic
ggaugcacugggucacccacca

SEQ ID NO: 7916 - RNA, 22 nt, Artificial Sequence
  Synthetic
gaugcacugggucacccaccag

SEQ ID NO: 7917 - RNA, 22 nt, Artificial Sequence
  Synthetic
augcacugggucacccaccaga

SEQ ID NO: 7918 - RNA, 22 nt, Artificial Sequence
  Synthetic
ugcacugggucacccaccagaa

SEQ ID NO: 7919 - RNA, 22 nt, Artificial Sequence
  Synthetic
gcacugggucacccaccagaaa

SEQ ID NO: 7920 - RNA, 22 nt, Artificial Sequence
  Synthetic
cacugggucacccaccagaaaa

SEQ ID NO: 7921 - RNA, 22 nt, Artificial Sequence
  Synthetic
acugggucacccaccagaaaag

SEQ ID NO: 7922 - RNA, 22 nt, Artificial Sequence
  Synthetic
cugggucacccaccagaaaagg

SEQ ID NO: 7923 - RNA, 22 nt, Artificial Sequence
  Synthetic
ugggucacccaccagaaaaggg

SEQ ID NO: 7924 - RNA, 22 nt, Artificial Sequence
  Synthetic
gggucacccaccagaaaagggc

SEQ ID NO: 7925 - RNA, 22 nt, Artificial Sequence
  Synthetic
ggucacccaccagaaaagggcu

SEQ ID NO: 7926 - RNA, 22 nt, Artificial Sequence
  Synthetic
gucacccaccagaaaagggcuu

SEQ ID NO: 7927 - RNA, 22 nt, Artificial Sequence
  Synthetic
ucacccaccagaaaagggcuuu

SEQ ID NO: 7928 - RNA, 22 nt, Artificial Sequence
  Synthetic
cacccaccagaaaagggcuuuu

SEQ ID NO: 7929 - RNA, 22 nt, Artificial Sequence
  Synthetic
acccaccagaaaagggcuuuug

SEQ ID NO: 7930 - RNA, 22 nt, Artificial Sequence
  Synthetic
cccaccagaaaagggcuuuugg

SEQ ID NO: 7931 - RNA, 22 nt, Artificial Sequence
  Synthetic
ccaccagaaaagggcuuuugga

SEQ ID NO: 7932 - RNA, 22 nt, Artificial Sequence
  Synthetic
caccagaaaagggcuuuuggac

SEQ ID NO: 7933 - RNA, 22 nt, Artificial Sequence
  Synthetic
accagaaaagggcuuuuggaca

SEQ ID NO: 7934 - RNA, 22 nt, Artificial Sequence
  Synthetic
ccagaaaagggcuuuuggacau

SEQ ID NO: 7935 - RNA, 22 nt, Artificial Sequence
  Synthetic
cagaaaagggcuuuuggacauu

SEQ ID NO: 7936 - RNA, 22 nt, Artificial Sequence
  Synthetic
agaaaagggcuuuuggacauuu

SEQ ID NO: 7937 - RNA, 22 nt, Artificial Sequence
  Synthetic
gaaaagggcuuuuggacauuug

SEQ ID NO: 7938 - RNA, 22 nt, Artificial Sequence
  Synthetic
aaaagggcuuuuggacauuugg

SEQ ID NO: 7939 - RNA, 22 nt, Artificial Sequence
  Synthetic
aaagggcuuuuggacauuuggg

SEQ ID NO: 7940 - RNA, 22 nt, Artificial Sequence
  Synthetic
aagggcuuuuggacauuugggg

SEQ ID NO: 7941 - RNA, 22 nt, Artificial Sequence
  Synthetic
agggcuuuuggacauuuggggu

SEQ ID NO: 7942 - RNA, 22 nt, Artificial Sequence
  Synthetic
gggcuuuuggacauuugggguu

SEQ ID NO: 7943 - RNA, 22 nt, Artificial Sequence
  Synthetic
ggcuuuuggacauuugggguuu

SEQ ID NO: 7944 - RNA, 22 nt, Artificial Sequence
  Synthetic
gcuuuuggacauuugggguuuc

SEQ ID NO: 7945 - RNA, 22 nt, Artificial Sequence
  Synthetic
cuuuuggacauuugggguuucu

SEQ ID NO: 7946 - RNA, 22 nt, Artificial Sequence
  Synthetic
uuuuggacauuugggguuucua

SEQ ID NO: 7947 - RNA, 22 nt, Artificial Sequence
  Synthetic
uuuggacauuugggguuucuac

SEQ ID NO: 7948 - RNA, 22 nt, Artificial Sequence
  Synthetic
uuggacauuugggguuucuacc

SEQ ID NO: 7949 - RNA, 22 nt, Artificial Sequence
  Synthetic
uggacauuugggguuucuaccc

SEQ ID NO: 7950 - RNA, 22 nt, Artificial Sequence
  Synthetic
ggacauuugggguuucuaccca

SEQ ID NO: 7951 - RNA, 22 nt, Artificial Sequence
  Synthetic
gacauuugggguuucuacccac

SEQ ID NO: 7952 - RNA, 22 nt, Artificial Sequence
  Synthetic
acauuugggguuucuacccaca

SEQ ID NO: 7953 - RNA, 22 nt, Artificial Sequence
  Synthetic
cauuugggguuucuacccacac

SEQ ID NO: 7954 - RNA, 22 nt, Artificial Sequence
  Synthetic
auuugggguuucuacccacacu

SEQ ID NO: 7955 - RNA, 22 nt, Artificial Sequence
  Synthetic
uuugggguuucuacccacacuu

SEQ ID NO: 7956 - RNA, 22 nt, Artificial Sequence
  Synthetic
uugggguuucuacccacacuuu

SEQ ID NO: 7957 - RNA, 22 nt, Artificial Sequence
  Synthetic
ugggguuucuacccacacuuug

SEQ ID NO: 7958 - RNA, 22 nt, Artificial Sequence
  Synthetic
gggguuucuacccacacuuugg

SEQ ID NO: 7959 - RNA, 22 nt, Artificial Sequence
  Synthetic
ggguuucuacccacacuuuggu

SEQ ID NO: 7960 - RNA, 22 nt, Artificial Sequence
  Synthetic
gguuucuacccacacuuugguu

SEQ ID NO: 7961 - RNA, 22 nt, Artificial Sequence
  Synthetic
guuucuacccacacuuugguuu

SEQ ID NO: 7962 - RNA, 22 nt, Artificial Sequence
  Synthetic
uuucuacccacacuuugguuuu

SEQ ID NO: 7963 - RNA, 22 nt, Artificial Sequence
  Synthetic
uucuacccacacuuugguuuuc

SEQ ID NO: 7964 - RNA, 22 nt, Artificial Sequence
  Synthetic
ucuacccacacuuugguuuucu

SEQ ID NO: 7965 - RNA, 22 nt, Artificial Sequence
  Synthetic
cuacccacacuuugguuuucua

SEQ ID NO: 7966 - RNA, 22 nt, Artificial Sequence
  Synthetic
uacccacacuuugguuuucuaa

SEQ ID NO: 7967 - RNA, 22 nt, Artificial Sequence
  Synthetic
acccacacuuugguuuucuaaa

SEQ ID NO: 7968 - RNA, 22 nt, Artificial Sequence
  Synthetic
cccacacuuugguuuucuaaau

SEQ ID NO: 7969 - RNA, 22 nt, Artificial Sequence
  Synthetic
ccacacuuugguuuucuaaaug

SEQ ID NO: 7970 - RNA, 22 nt, Artificial Sequence
  Synthetic
cacacuuugguuuucuaaauga

SEQ ID NO: 7971 - RNA, 22 nt, Artificial Sequence
  Synthetic
acacuuugguuuucuaaaugag

SEQ ID NO: 7972 - RNA, 22 nt, Artificial Sequence
  Synthetic
cacuuugguuuucuaaaugagg

SEQ ID NO: 7973 - RNA, 22 nt, Artificial Sequence
  Synthetic
acuuugguuuucuaaaugaggu

SEQ ID NO: 7974 - RNA, 22 nt, Artificial Sequence
  Synthetic
cuuugguuuucuaaaugaggug

SEQ ID NO: 7975 - RNA, 22 nt, Artificial Sequence
  Synthetic
uuugguuuucuaaaugaggugg

SEQ ID NO: 7976 - RNA, 22 nt, Artificial Sequence
  Synthetic
uugguuuucuaaaugaggugga

SEQ ID NO: 7977 - RNA, 22 nt, Artificial Sequence
  Synthetic
ugguuuucuaaaugagguggac

SEQ ID NO: 7978 - RNA, 22 nt, Artificial Sequence
  Synthetic
gguuuucuaaaugagguggacu

SEQ ID NO: 7979 - RNA, 22 nt, Artificial Sequence
  Synthetic
guuuucuaaaugagguggacug

SEQ ID NO: 7980 - RNA, 22 nt, Artificial Sequence
  Synthetic
uuuucuaaaugagguggacugg

SEQ ID NO: 7981 - RNA, 22 nt, Artificial Sequence
  Synthetic
uuucuaaaugagguggacuggg

SEQ ID NO: 7982 - RNA, 22 nt, Artificial Sequence
  Synthetic
uucuaaaugagguggacuggga

SEQ ID NO: 7983 - RNA, 22 nt, Artificial Sequence
  Synthetic
ucuaaaugagguggacugggag

SEQ ID NO: 7984 - RNA, 22 nt, Artificial Sequence
  Synthetic
cuaaaugagguggacugggagg

SEQ ID NO: 7985 - RNA, 22 nt, Artificial Sequence
  Synthetic
uaaaugagguggacugggaggg

SEQ ID NO: 7986 - RNA, 22 nt, Artificial Sequence
  Synthetic
aaaugagguggacugggaggga

SEQ ID NO: 7987 - RNA, 22 nt, Artificial Sequence
  Synthetic
aaugagguggacugggagggag

SEQ ID NO: 7988 - RNA, 22 nt, Artificial Sequence
  Synthetic
augagguggacugggagggagg

SEQ ID NO: 7989 - RNA, 22 nt, Artificial Sequence
  Synthetic
ugagguggacugggagggaggu

SEQ ID NO: 7990 - RNA, 22 nt, Artificial Sequence
  Synthetic
gagguggacugggagggaggua

SEQ ID NO: 7991 - RNA, 22 nt, Artificial Sequence
  Synthetic
agguggacugggagggagguau

SEQ ID NO: 7992 - RNA, 22 nt, Artificial Sequence
  Synthetic
gguggacugggagggagguauc

SEQ ID NO: 7993 - RNA, 22 nt, Artificial Sequence
  Synthetic
guggacugggagggagguaucu

SEQ ID NO: 7994 - RNA, 22 nt, Artificial Sequence
  Synthetic
uggacugggagggagguaucuu

SEQ ID NO: 7995 - RNA, 22 nt, Artificial Sequence
  Synthetic
ggacugggagggagguaucuuc

SEQ ID NO: 7996 - RNA, 22 nt, Artificial Sequence
  Synthetic
gacugggagggagguaucuucu

SEQ ID NO: 7997 - RNA, 22 nt, Artificial Sequence
  Synthetic
acugggagggagguaucuucuu

SEQ ID NO: 7998 - RNA, 22 nt, Artificial Sequence
  Synthetic
cugggagggagguaucuucuuu

SEQ ID NO: 7999 - RNA, 22 nt, Artificial Sequence
  Synthetic
ugggagggagguaucuucuuuc

SEQ ID NO: 8000 - RNA, 22 nt, Artificial Sequence
  Synthetic
gggagggagguaucuucuuuca

SEQ ID NO: 8001 - RNA, 22 nt, Artificial Sequence
  Synthetic
ggagggagguaucuucuuucag

SEQ ID NO: 8002 - RNA, 22 nt, Artificial Sequence
  Synthetic
gagggagguaucuucuuucaga

SEQ ID NO: 8003 - RNA, 22 nt, Artificial Sequence
  Synthetic
agggagguaucuucuuucagau

SEQ ID NO: 8004 - RNA, 22 nt, Artificial Sequence
  Synthetic
gggagguaucuucuuucagaug

SEQ ID NO: 8005 - RNA, 22 nt, Artificial Sequence
  Synthetic
ggagguaucuucuuucagauga

SEQ ID NO: 8006 - RNA, 22 nt, Artificial Sequence
  Synthetic
gagguaucuucuuucagaugaa

SEQ ID NO: 8007 - RNA, 22 nt, Artificial Sequence
  Synthetic
agguaucuucuuucagaugaaa

SEQ ID NO: 8008 - RNA, 22 nt, Artificial Sequence
  Synthetic
gguaucuucuuucagaugaaag

SEQ ID NO: 8009 - RNA, 22 nt, Artificial Sequence
  Synthetic
guaucuucuuucagaugaaagg

SEQ ID NO: 8010 - RNA, 22 nt, Artificial Sequence
  Synthetic
uaucuucuuucagaugaaaggg

SEQ ID NO: 8011 - RNA, 22 nt, Artificial Sequence
  Synthetic
aucuucuuucagaugaaaggga

SEQ ID NO: 8012 - RNA, 22 nt, Artificial Sequence
  Synthetic
ucuucuuucagaugaaagggaa

SEQ ID NO: 8013 - RNA, 22 nt, Artificial Sequence
  Synthetic
cuucuuucagaugaaagggaag

SEQ ID NO: 8014 - RNA, 22 nt, Artificial Sequence
  Synthetic
uucuuucagaugaaagggaagg

SEQ ID NO: 8015 - RNA, 22 nt, Artificial Sequence
  Synthetic
ucuuucagaugaaagggaaggg

SEQ ID NO: 8016 - RNA, 22 nt, Artificial Sequence
  Synthetic
cuuucagaugaaagggaagggg

SEQ ID NO: 8017 - RNA, 22 nt, Artificial Sequence
  Synthetic
uuucagaugaaagggaaggggc

SEQ ID NO: 8018 - RNA, 22 nt, Artificial Sequence
  Synthetic
uucagaugaaagggaaggggcg

SEQ ID NO: 8019 - RNA, 22 nt, Artificial Sequence
  Synthetic
ucagaugaaagggaaggggcga

SEQ ID NO: 8020 - RNA, 22 nt, Artificial Sequence
  Synthetic
cagaugaaagggaaggggcgag

SEQ ID NO: 8021 - RNA, 22 nt, Artificial Sequence
  Synthetic
agaugaaagggaaggggcgaga

SEQ ID NO: 8022 - RNA, 22 nt, Artificial Sequence
  Synthetic
gaugaaagggaaggggcgagau

SEQ ID NO: 8023 - RNA, 22 nt, Artificial Sequence
  Synthetic
augaaagggaaggggcgagaug

SEQ ID NO: 8024 - RNA, 22 nt, Artificial Sequence
  Synthetic
ugaaagggaaggggcgagaugg

SEQ ID NO: 8025 - RNA, 22 nt, Artificial Sequence
  Synthetic
gaaagggaaggggcgagaugga

SEQ ID NO: 8026 - RNA, 22 nt, Artificial Sequence
  Synthetic
aaagggaaggggcgagauggag

SEQ ID NO: 8027 - RNA, 22 nt, Artificial Sequence
  Synthetic
aagggaaggggcgagauggagu

SEQ ID NO: 8028 - RNA, 22 nt, Artificial Sequence
  Synthetic
agggaaggggcgagauggaguu

SEQ ID NO: 8029 - RNA, 22 nt, Artificial Sequence
  Synthetic
gggaaggggcgagauggaguua

SEQ ID NO: 8030 - RNA, 22 nt, Artificial Sequence
  Synthetic
ggaaggggcgagauggaguuau

SEQ ID NO: 8031 - RNA, 22 nt, Artificial Sequence
  Synthetic
gaaggggcgagauggaguuauc

SEQ ID NO: 8032 - RNA, 22 nt, Artificial Sequence
  Synthetic
aaggggcgagauggaguuaucu

SEQ ID NO: 8033 - RNA, 22 nt, Artificial Sequence
  Synthetic
aggggcgagauggaguuaucuu

SEQ ID NO: 8034 - RNA, 22 nt, Artificial Sequence
  Synthetic
ggggcgagauggaguuaucuua

SEQ ID NO: 8035 - RNA, 22 nt, Artificial Sequence
  Synthetic
gggcgagauggaguuaucuuau

SEQ ID NO: 8036 - RNA, 22 nt, Artificial Sequence
  Synthetic
ggcgagauggaguuaucuuauu

SEQ ID NO: 8037 - RNA, 22 nt, Artificial Sequence
  Synthetic
gcgagauggaguuaucuuauuu

SEQ ID NO: 8038 - RNA, 22 nt, Artificial Sequence
  Synthetic
cgagauggaguuaucuuauuuc

SEQ ID NO: 8039 - RNA, 22 nt, Artificial Sequence
  Synthetic
gagauggaguuaucuuauuucu

SEQ ID NO: 8040 - RNA, 22 nt, Artificial Sequence
  Synthetic
agauggaguuaucuuauuucug

SEQ ID NO: 8041 - RNA, 22 nt, Artificial Sequence
  Synthetic
gauggaguuaucuuauuucugg

SEQ ID NO: 8042 - RNA, 22 nt, Artificial Sequence
  Synthetic
auggaguuaucuuauuucuggg

SEQ ID NO: 8043 - RNA, 22 nt, Artificial Sequence
  Synthetic
uggaguuaucuuauuucugggu

SEQ ID NO: 8044 - RNA, 22 nt, Artificial Sequence
  Synthetic
ggaguuaucuuauuucugggua

SEQ ID NO: 8045 - RNA, 22 nt, Artificial Sequence
  Synthetic
gaguuaucuuauuucuggguaa

SEQ ID NO: 8046 - RNA, 22 nt, Artificial Sequence
  Synthetic
aguuaucuuauuucuggguaaa

SEQ ID NO: 8047 - RNA, 22 nt, Artificial Sequence
  Synthetic
guuaucuuauuucuggguaaaa

SEQ ID NO: 8048 - RNA, 22 nt, Artificial Sequence
  Synthetic
uuaucuuauuucuggguaaaac

SEQ ID NO: 8049 - RNA, 22 nt, Artificial Sequence
  Synthetic
uaucuuauuucuggguaaaaca

SEQ ID NO: 8050 - RNA, 22 nt, Artificial Sequence
  Synthetic
aucuuauuucuggguaaaacaa

SEQ ID NO: 8051 - RNA, 22 nt, Artificial Sequence
  Synthetic
ucuuauuucuggguaaaacaaa

SEQ ID NO: 8052 - RNA, 22 nt, Artificial Sequence
  Synthetic
cuuauuucuggguaaaacaaaa

SEQ ID NO: 8053 - RNA, 22 nt, Artificial Sequence
  Synthetic
uuauuucuggguaaaacaaaac

SEQ ID NO: 8054 - RNA, 22 nt, Artificial Sequence
  Synthetic
uauuucuggguaaaacaaaaca

SEQ ID NO: 8055 - RNA, 22 nt, Artificial Sequence
  Synthetic
auuucuggguaaaacaaaacaa

SEQ ID NO: 8056 - RNA, 22 nt, Artificial Sequence
  Synthetic
uuucuggguaaaacaaaacaaa

SEQ ID NO: 8057 - RNA, 22 nt, Artificial Sequence
  Synthetic
uucuggguaaaacaaaacaaac

SEQ ID NO: 8058 - RNA, 22 nt, Artificial Sequence
  Synthetic
ucuggguaaaacaaaacaaaca

SEQ ID NO: 8059 - RNA, 22 nt, Artificial Sequence
  Synthetic
cuggguaaaacaaaacaaacaa

SEQ ID NO: 8060 - RNA, 22 nt, Artificial Sequence
  Synthetic
uggguaaaacaaaacaaacaaa

SEQ ID NO: 8061 - RNA, 22 nt, Artificial Sequence
  Synthetic
ggguaaaacaaaacaaacaaac

SEQ ID NO: 8062 - RNA, 22 nt, Artificial Sequence
  Synthetic
gguaaaacaaaacaaacaaaca

SEQ ID NO: 8063 - RNA, 22 nt, Artificial Sequence
  Synthetic
guaaaacaaaacaaacaaacaa

SEQ ID NO: 8064 - RNA, 22 nt, Artificial Sequence
  Synthetic
uaaaacaaaacaaacaaacaaa

SEQ ID NO: 8065 - RNA, 22 nt, Artificial Sequence
  Synthetic
aaaacaaaacaaacaaacaaaa

SEQ ID NO: 8066 - RNA, 22 nt, Artificial Sequence
  Synthetic
aaacaaaacaaacaaacaaaaa

SEQ ID NO: 8067 - RNA, 22 nt, Artificial Sequence
  Synthetic
aacaaaacaaacaaacaaaaaa

SEQ ID NO: 8068 - RNA, 22 nt, Artificial Sequence
  Synthetic
acaaaacaaacaaacaaaaaac

SEQ ID NO: 8069 - RNA, 22 nt, Artificial Sequence
  Synthetic
caaaacaaacaaacaaaaaaca

SEQ ID NO: 8070 - RNA, 22 nt, Artificial Sequence
  Synthetic
aaaacaaacaaacaaaaaacaa

SEQ ID NO: 8071 - RNA, 22 nt, Artificial Sequence
  Synthetic
aaacaaacaaacaaaaaacaaa

SEQ ID NO: 8072 - RNA, 22 nt, Artificial Sequence
  Synthetic
aacaaacaaacaaaaaacaaaa

SEQ ID NO: 8073 - RNA, 22 nt, Artificial Sequence
  Synthetic
acaaacaaacaaaaaacaaaac

SEQ ID NO: 8074 - RNA, 22 nt, Artificial Sequence
  Synthetic
caaacaaacaaaaaacaaaaca

SEQ ID NO: 8075 - RNA, 22 nt, Artificial Sequence
  Synthetic
aaacaaacaaaaaacaaaacaa

SEQ ID NO: 8076 - RNA, 22 nt, Artificial Sequence
  Synthetic
aacaaacaaaaaacaaaacaaa

SEQ ID NO: 8077 - RNA, 22 nt, Artificial Sequence
  Synthetic
acaaacaaaaaacaaaacaaaa

SEQ ID NO: 8078 - RNA, 22 nt, Artificial Sequence
  Synthetic
caaacaaaaaacaaaacaaaaa

SEQ ID NO: 8079 - RNA, 22 nt, Artificial Sequence
  Synthetic
aaacaaaaaacaaaacaaaaau

SEQ ID NO: 8080 - RNA, 22 nt, Artificial Sequence
  Synthetic
aacaaaaaacaaaacaaaaaua

SEQ ID NO: 8081 - RNA, 22 nt, Artificial Sequence
  Synthetic
acaaaaaacaaaacaaaaauac

SEQ ID NO: 8082 - RNA, 22 nt, Artificial Sequence
  Synthetic
caaaaaacaaaacaaaaauacu

SEQ ID NO: 8083 - RNA, 22 nt, Artificial Sequence
  Synthetic
aaaaaacaaaacaaaaauacug

SEQ ID NO: 8084 - RNA, 22 nt, Artificial Sequence
  Synthetic
aaaaacaaaacaaaaauacuga

SEQ ID NO: 8085 - RNA, 22 nt, Artificial Sequence
  Synthetic
aaaacaaaacaaaaauacugag

SEQ ID NO: 8086 - RNA, 22 nt, Artificial Sequence
  Synthetic
aaacaaaacaaaaauacugagc

SEQ ID NO: 8087 - RNA, 22 nt, Artificial Sequence
  Synthetic
aacaaaacaaaaauacugagcu

SEQ ID NO: 8088 - RNA, 22 nt, Artificial Sequence
  Synthetic
acaaaacaaaaauacugagcug

SEQ ID NO: 8089 - RNA, 22 nt, Artificial Sequence
  Synthetic
caaaacaaaaauacugagcugg

SEQ ID NO: 8090 - RNA, 22 nt, Artificial Sequence
  Synthetic
aaaacaaaaauacugagcugga

SEQ ID NO: 8091 - RNA, 22 nt, Artificial Sequence
  Synthetic
aaacaaaaauacugagcuggau

SEQ ID NO: 8092 - RNA, 22 nt, Artificial Sequence
  Synthetic
aacaaaaauacugagcuggauu

SEQ ID NO: 8093 - RNA, 22 nt, Artificial Sequence
  Synthetic
acaaaaauacugagcuggauua

SEQ ID NO: 8094 - RNA, 22 nt, Artificial Sequence
  Synthetic
caaaaauacugagcuggauuau

SEQ ID NO: 8095 - RNA, 22 nt, Artificial Sequence
  Synthetic
aaaaauacugagcuggauuaua

SEQ ID NO: 8096 - RNA, 22 nt, Artificial Sequence
  Synthetic
aaaauacugagcuggauuauac

SEQ ID NO: 8097 - RNA, 22 nt, Artificial Sequence
  Synthetic
aaauacugagcuggauuauacu

SEQ ID NO: 8098 - RNA, 22 nt, Artificial Sequence
  Synthetic
aauacugagcuggauuauacug

SEQ ID NO: 8099 - RNA, 22 nt, Artificial Sequence
  Synthetic
auacugagcuggauuauacugu

SEQ ID NO: 8100 - RNA, 22 nt, Artificial Sequence
  Synthetic
uacugagcuggauuauacuguu

SEQ ID NO: 8101 - RNA, 22 nt, Artificial Sequence
  Synthetic
acugagcuggauuauacuguua

SEQ ID NO: 8102 - RNA, 22 nt, Artificial Sequence
  Synthetic
cugagcuggauuauacuguuag

SEQ ID NO: 8103 - RNA, 22 nt, Artificial Sequence
  Synthetic
ugagcuggauuauacuguuagg

SEQ ID NO: 8104 - RNA, 22 nt, Artificial Sequence
  Synthetic
gagcuggauuauacuguuagga

SEQ ID NO: 8105 - RNA, 22 nt, Artificial Sequence
  Synthetic
agcuggauuauacuguuaggau

SEQ ID NO: 8106 - RNA, 22 nt, Artificial Sequence
  Synthetic
gcuggauuauacuguuaggaug

SEQ ID NO: 8107 - RNA, 22 nt, Artificial Sequence
  Synthetic
cuggauuauacuguuaggaugu

SEQ ID NO: 8108 - RNA, 22 nt, Artificial Sequence
  Synthetic
uggauuauacuguuaggaugua

SEQ ID NO: 8109 - RNA, 22 nt, Artificial Sequence
  Synthetic
ggauuauacuguuaggauguaa

SEQ ID NO: 8110 - RNA, 22 nt, Artificial Sequence
  Synthetic
gauuauacuguuaggauguaaa

SEQ ID NO: 8111 - RNA, 22 nt, Artificial Sequence
  Synthetic
auuauacuguuaggauguaaag

SEQ ID NO: 8112 - RNA, 22 nt, Artificial Sequence
  Synthetic
uuauacuguuaggauguaaagu

SEQ ID NO: 8113 - RNA, 22 nt, Artificial Sequence
  Synthetic
uauacuguuaggauguaaaguu

SEQ ID NO: 8114 - RNA, 22 nt, Artificial Sequence
  Synthetic
auacuguuaggauguaaaguuc

SEQ ID NO: 8115 - RNA, 22 nt, Artificial Sequence
  Synthetic
uacuguuaggauguaaaguucc

SEQ ID NO: 8116 - RNA, 22 nt, Artificial Sequence
  Synthetic
acuguuaggauguaaaguuccu

SEQ ID NO: 8117 - RNA, 22 nt, Artificial Sequence
  Synthetic
cuguuaggauguaaaguuccuu

SEQ ID NO: 8118 - RNA, 22 nt, Artificial Sequence
  Synthetic
uguuaggauguaaaguuccuua

SEQ ID NO: 8119 - RNA, 22 nt, Artificial Sequence
  Synthetic
guuaggauguaaaguuccuuag

SEQ ID NO: 8120 - RNA, 22 nt, Artificial Sequence
  Synthetic
uuaggauguaaaguuccuuagc

SEQ ID NO: 8121 - RNA, 22 nt, Artificial Sequence
  Synthetic
uaggauguaaaguuccuuagcu

SEQ ID NO: 8122 - RNA, 22 nt, Artificial Sequence
  Synthetic
aggauguaaaguuccuuagcua

SEQ ID NO: 8123 - RNA, 22 nt, Artificial Sequence
  Synthetic
ggauguaaaguuccuuagcuac

SEQ ID NO: 8124 - RNA, 22 nt, Artificial Sequence
  Synthetic
gauguaaaguuccuuagcuacu

SEQ ID NO: 8125 - RNA, 22 nt, Artificial Sequence
  Synthetic
auguaaaguuccuuagcuacuu

SEQ ID NO: 8126 - RNA, 22 nt, Artificial Sequence
  Synthetic
uguaaaguuccuuagcuacuuc

SEQ ID NO: 8127 - RNA, 22 nt, Artificial Sequence
  Synthetic
guaaaguuccuuagcuacuucu

SEQ ID NO: 8128 - RNA, 22 nt, Artificial Sequence
  Synthetic
uaaaguuccuuagcuacuucuu

SEQ ID NO: 8129 - RNA, 22 nt, Artificial Sequence
  Synthetic
aaaguuccuuagcuacuucuuu

SEQ ID NO: 8130 - RNA, 22 nt, Artificial Sequence
  Synthetic
aaguuccuuagcuacuucuuua

SEQ ID NO: 8131 - RNA, 22 nt, Artificial Sequence
  Synthetic
aguuccuuagcuacuucuuuaa

SEQ ID NO: 8132 - RNA, 22 nt, Artificial Sequence
  Synthetic
guuccuuagcuacuucuuuaag

SEQ ID NO: 8133 - RNA, 22 nt, Artificial Sequence
  Synthetic
uuccuuagcuacuucuuuaagg

SEQ ID NO: 8134 - RNA, 22 nt, Artificial Sequence
  Synthetic
uccuuagcuacuucuuuaaggc

SEQ ID NO: 8135 - RNA, 22 nt, Artificial Sequence
  Synthetic
ccuuagcuacuucuuuaaggcu

SEQ ID NO: 8136 - RNA, 22 nt, Artificial Sequence
  Synthetic
cuuagcuacuucuuuaaggcuc

SEQ ID NO: 8137 - RNA, 22 nt, Artificial Sequence
  Synthetic
uuagcuacuucuuuaaggcuca

SEQ ID NO: 8138 - RNA, 22 nt, Artificial Sequence
  Synthetic
uagcuacuucuuuaaggcucaa

SEQ ID NO: 8139 - RNA, 22 nt, Artificial Sequence
  Synthetic
agcuacuucuuuaaggcucaac

SEQ ID NO: 8140 - RNA, 22 nt, Artificial Sequence
  Synthetic
gcuacuucuuuaaggcucaaca

SEQ ID NO: 8141 - RNA, 22 nt, Artificial Sequence
  Synthetic
cuacuucuuuaaggcucaacac

SEQ ID NO: 8142 - RNA, 22 nt, Artificial Sequence
  Synthetic
uacuucuuuaaggcucaacacg

SEQ ID NO: 8143 - RNA, 22 nt, Artificial Sequence
  Synthetic
acuucuuuaaggcucaacacga

SEQ ID NO: 8144 - RNA, 22 nt, Artificial Sequence
  Synthetic
cuucuuuaaggcucaacacgag

SEQ ID NO: 8145 - RNA, 22 nt, Artificial Sequence
  Synthetic
uucuuuaaggcucaacacgagg

SEQ ID NO: 8146 - RNA, 22 nt, Artificial Sequence
  Synthetic
ucuuuaaggcucaacacgaggc

SEQ ID NO: 8147 - RNA, 22 nt, Artificial Sequence
  Synthetic
cuuuaaggcucaacacgaggcu

SEQ ID NO: 8148 - RNA, 22 nt, Artificial Sequence
  Synthetic
uuuaaggcucaacacgaggcug

SEQ ID NO: 8149 - RNA, 22 nt, Artificial Sequence
  Synthetic
uuaaggcucaacacgaggcuga

SEQ ID NO: 8150 - RNA, 22 nt, Artificial Sequence
  Synthetic
uaaggcucaacacgaggcugau

SEQ ID NO: 8151 - RNA, 22 nt, Artificial Sequence
  Synthetic
aaggcucaacacgaggcugaug

SEQ ID NO: 8152 - RNA, 22 nt, Artificial Sequence
  Synthetic
aggcucaacacgaggcugaugg

SEQ ID NO: 8153 - RNA, 22 nt, Artificial Sequence
  Synthetic
ggcucaacacgaggcugauggu

SEQ ID NO: 8154 - RNA, 22 nt, Artificial Sequence
  Synthetic
gcucaacacgaggcugaugguc

SEQ ID NO: 8155 - RNA, 22 nt, Artificial Sequence
  Synthetic
cucaacacgaggcugaugguca

SEQ ID NO: 8156 - RNA, 22 nt, Artificial Sequence
  Synthetic
ucaacacgaggcugauggucaa

SEQ ID NO: 8157 - RNA, 22 nt, Artificial Sequence
  Synthetic
caacacgaggcugauggucaac

SEQ ID NO: 8158 - RNA, 22 nt, Artificial Sequence
  Synthetic
aacacgaggcugauggucaaca

SEQ ID NO: 8159 - RNA, 22 nt, Artificial Sequence
  Synthetic
acacgaggcugauggucaacau

SEQ ID NO: 8160 - RNA, 22 nt, Artificial Sequence
  Synthetic
cacgaggcugauggucaacaua

SEQ ID NO: 8161 - RNA, 22 nt, Artificial Sequence
  Synthetic
acgaggcugauggucaacauaa

SEQ ID NO: 8162 - RNA, 22 nt, Artificial Sequence
  Synthetic
cgaggcugauggucaacauaaa

SEQ ID NO: 8163 - RNA, 22 nt, Artificial Sequence
  Synthetic
gaggcugauggucaacauaaaa

SEQ ID NO: 8164 - RNA, 22 nt, Artificial Sequence
  Synthetic
aggcugauggucaacauaaaaa

SEQ ID NO: 8165 - RNA, 22 nt, Artificial Sequence
  Synthetic
ggcugauggucaacauaaaaag

SEQ ID NO: 8166 - RNA, 22 nt, Artificial Sequence
  Synthetic
gcugauggucaacauaaaaagc

SEQ ID NO: 8167 - RNA, 22 nt, Artificial Sequence
  Synthetic
cugauggucaacauaaaaagca

SEQ ID NO: 8168 - RNA, 22 nt, Artificial Sequence
  Synthetic
ugauggucaacauaaaaagcaa

SEQ ID NO: 8169 - RNA, 22 nt, Artificial Sequence
  Synthetic
gauggucaacauaaaaagcaaa

SEQ ID NO: 8170 - RNA, 22 nt, Artificial Sequence
  Synthetic
auggucaacauaaaaagcaaac

SEQ ID NO: 8171 - RNA, 22 nt, Artificial Sequence
  Synthetic
uggucaacauaaaaagcaaaca

SEQ ID NO: 8172 - RNA, 22 nt, Artificial Sequence
  Synthetic
ggucaacauaaaaagcaaacaa

SEQ ID NO: 8173 - RNA, 22 nt, Artificial Sequence
  Synthetic
gucaacauaaaaagcaaacaau

SEQ ID NO: 8174 - RNA, 22 nt, Artificial Sequence
  Synthetic
ucaacauaaaaagcaaacaaua

SEQ ID NO: 8175 - RNA, 22 nt, Artificial Sequence
  Synthetic
caacauaaaaagcaaacaauac

SEQ ID NO: 8176 - RNA, 22 nt, Artificial Sequence
  Synthetic
aacauaaaaagcaaacaauacu

SEQ ID NO: 8177 - RNA, 22 nt, Artificial Sequence
  Synthetic
acauaaaaagcaaacaauacua

SEQ ID NO: 8178 - RNA, 22 nt, Artificial Sequence
  Synthetic
cauaaaaagcaaacaauacuau

SEQ ID NO: 8179 - RNA, 22 nt, Artificial Sequence
  Synthetic
auaaaaagcaaacaauacuaug

SEQ ID NO: 8180 - RNA, 22 nt, Artificial Sequence
  Synthetic
uaaaaagcaaacaauacuaugu

SEQ ID NO: 8181 - RNA, 22 nt, Artificial Sequence
  Synthetic
aaaaagcaaacaauacuaugua

SEQ ID NO: 8182 - RNA, 22 nt, Artificial Sequence
  Synthetic
aaaagcaaacaauacuauguac

SEQ ID NO: 8183 - RNA, 22 nt, Artificial Sequence
  Synthetic
aaagcaaacaauacuauguaca

SEQ ID NO: 8184 - RNA, 22 nt, Artificial Sequence
  Synthetic
aagcaaacaauacuauguacau

SEQ ID NO: 8185 - RNA, 22 nt, Artificial Sequence
  Synthetic
agcaaacaauacuauguacaua

SEQ ID NO: 8186 - RNA, 22 nt, Artificial Sequence
  Synthetic
gcaaacaauacuauguacauau

SEQ ID NO: 8187 - RNA, 22 nt, Artificial Sequence
  Synthetic
caaacaauacuauguacauaua

SEQ ID NO: 8188 - RNA, 22 nt, Artificial Sequence
  Synthetic
aaacaauacuauguacauauau

SEQ ID NO: 8189 - RNA, 22 nt, Artificial Sequence
  Synthetic
aacaauacuauguacauauaug

SEQ ID NO: 8190 - RNA, 22 nt, Artificial Sequence
  Synthetic
acaauacuauguacauauaugu

SEQ ID NO: 8191 - RNA, 22 nt, Artificial Sequence
  Synthetic
caauacuauguacauauaugua

SEQ ID NO: 8192 - RNA, 22 nt, Artificial Sequence
  Synthetic
aauacuauguacauauauguaa

SEQ ID NO: 8193 - RNA, 22 nt, Artificial Sequence
  Synthetic
auacuauguacauauauguaaa

SEQ ID NO: 8194 - RNA, 22 nt, Artificial Sequence
  Synthetic
uacuauguacauauauguaaaa

SEQ ID NO: 8195 - RNA, 22 nt, Artificial Sequence
  Synthetic
acuauguacauauauguaaaaa

SEQ ID NO: 8196 - RNA, 22 nt, Artificial Sequence
  Synthetic
cuauguacauauauguaaaaag

SEQ ID NO: 8197 - RNA, 22 nt, Artificial Sequence
  Synthetic
uauguacauauauguaaaaagu

SEQ ID NO: 8198 - RNA, 22 nt, Artificial Sequence
  Synthetic
auguacauauauguaaaaagug

SEQ ID NO: 8199 - RNA, 22 nt, Artificial Sequence
  Synthetic
uguacauauauguaaaaagugu

SEQ ID NO: 8200 - RNA, 22 nt, Artificial Sequence
  Synthetic
guacauauauguaaaaaguguu

SEQ ID NO: 8201 - RNA, 22 nt, Artificial Sequence
  Synthetic
uacauauauguaaaaaguguua

SEQ ID NO: 8202 - RNA, 22 nt, Artificial Sequence
  Synthetic
acauauauguaaaaaguguuau

SEQ ID NO: 8203 - RNA, 22 nt, Artificial Sequence
  Synthetic
cauauauguaaaaaguguuaua

SEQ ID NO: 8204 - RNA, 22 nt, Artificial Sequence
  Synthetic
auauauguaaaaaguguuauaa

SEQ ID NO: 8205 - RNA, 22 nt, Artificial Sequence
  Synthetic
uauauguaaaaaguguuauaaa

SEQ ID NO: 8206 - RNA, 22 nt, Artificial Sequence
  Synthetic
auauguaaaaaguguuauaaau

SEQ ID NO: 8207 - RNA, 22 nt, Artificial Sequence
  Synthetic
uauguaaaaaguguuauaaaua

SEQ ID NO: 8208 - RNA, 22 nt, Artificial Sequence
  Synthetic
auguaaaaaguguuauaaauag

SEQ ID NO: 8209 - RNA, 22 nt, Artificial Sequence
  Synthetic
uguaaaaaguguuauaaauagg

SEQ ID NO: 8210 - RNA, 22 nt, Artificial Sequence
  Synthetic
guaaaaaguguuauaaauaggu

SEQ ID NO: 8211 - RNA, 22 nt, Artificial Sequence
  Synthetic
uaaaaaguguuauaaauagguu

SEQ ID NO: 8212 - RNA, 22 nt, Artificial Sequence
  Synthetic
aaaaaguguuauaaauagguuu

SEQ ID NO: 8213 - RNA, 22 nt, Artificial Sequence
  Synthetic
aaaaguguuauaaauagguuuu

SEQ ID NO: 8214 - RNA, 22 nt, Artificial Sequence
  Synthetic
aaaguguuauaaauagguuuua

SEQ ID NO: 8215 - RNA, 22 nt, Artificial Sequence
  Synthetic
aaguguuauaaauagguuuuau

SEQ ID NO: 8216 - RNA, 22 nt, Artificial Sequence
  Synthetic
aguguuauaaauagguuuuaua

SEQ ID NO: 8217 - RNA, 22 nt, Artificial Sequence
  Synthetic
guguuauaaauagguuuuauaa

SEQ ID NO: 8218 - RNA, 22 nt, Artificial Sequence
  Synthetic
uguuauaaauagguuuuauaaa

SEQ ID NO: 8219 - RNA, 22 nt, Artificial Sequence
  Synthetic
guuauaaauagguuuuauaaac

SEQ ID NO: 8220 - RNA, 22 nt, Artificial Sequence
  Synthetic
uuauaaauagguuuuauaaacc

SEQ ID NO: 8221 - RNA, 22 nt, Artificial Sequence
  Synthetic
uauaaauagguuuuauaaaccg

SEQ ID NO: 8222 - RNA, 22 nt, Artificial Sequence
  Synthetic
auaaauagguuuuauaaaccgg

SEQ ID NO: 8223 - RNA, 22 nt, Artificial Sequence
  Synthetic
uaaauagguuuuauaaaccgga

SEQ ID NO: 8224 - RNA, 22 nt, Artificial Sequence
  Synthetic
aaauagguuuuauaaaccggag

SEQ ID NO: 8225 - RNA, 22 nt, Artificial Sequence
  Synthetic
aauagguuuuauaaaccggaga

SEQ ID NO: 8226 - RNA, 22 nt, Artificial Sequence
  Synthetic
auagguuuuauaaaccggagau

SEQ ID NO: 8227 - RNA, 22 nt, Artificial Sequence
  Synthetic
uagguuuuauaaaccggagaua

SEQ ID NO: 8228 - RNA, 22 nt, Artificial Sequence
  Synthetic
agguuuuauaaaccggagauau

SEQ ID NO: 8229 - RNA, 22 nt, Artificial Sequence
  Synthetic
gguuuuauaaaccggagauauu

SEQ ID NO: 8230 - RNA, 22 nt, Artificial Sequence
  Synthetic
guuuuauaaaccggagauauua

SEQ ID NO: 8231 - RNA, 22 nt, Artificial Sequence
  Synthetic
uuuuauaaaccggagauauuau

SEQ ID NO: 8232 - RNA, 22 nt, Artificial Sequence
  Synthetic
uuuauaaaccggagauauuaua

SEQ ID NO: 8233 - RNA, 22 nt, Artificial Sequence
  Synthetic
uuauaaaccggagauauuauau

SEQ ID NO: 8234 - RNA, 22 nt, Artificial Sequence
  Synthetic
uauaaaccggagauauuauaua

SEQ ID NO: 8235 - RNA, 22 nt, Artificial Sequence
  Synthetic
auaaaccggagauauuauauac

SEQ ID NO: 8236 - RNA, 22 nt, Artificial Sequence
  Synthetic
uaaaccggagauauuauauaca

SEQ ID NO: 8237 - RNA, 22 nt, Artificial Sequence
  Synthetic
aaaccggagauauuauauacau

SEQ ID NO: 8238 - RNA, 22 nt, Artificial Sequence
  Synthetic
aaccggagauauuauauacauc

SEQ ID NO: 8239 - RNA, 22 nt, Artificial Sequence
  Synthetic
accggagauauuauauacaucu

SEQ ID NO: 8240 - RNA, 22 nt, Artificial Sequence
  Synthetic
ccggagauauuauauacaucuu

SEQ ID NO: 8241 - RNA, 22 nt, Artificial Sequence
  Synthetic
cggagauauuauauacaucuuc

SEQ ID NO: 8242 - RNA, 22 nt, Artificial Sequence
  Synthetic
ggagauauuauauacaucuuca

SEQ ID NO: 8243 - RNA, 22 nt, Artificial Sequence
  Synthetic
gagauauuauauacaucuucaa

SEQ ID NO: 8244 - RNA, 22 nt, Artificial Sequence
  Synthetic
agauauuauauacaucuucaau

SEQ ID NO: 8245 - RNA, 22 nt, Artificial Sequence
  Synthetic
gauauuauauacaucuucaauc

SEQ ID NO: 8246 - RNA, 22 nt, Artificial Sequence
  Synthetic
auauuauauacaucuucaauca

SEQ ID NO: 8247 - RNA, 22 nt, Artificial Sequence
  Synthetic
uauuauauacaucuucaaucaa

SEQ ID NO: 8248 - RNA, 22 nt, Artificial Sequence
  Synthetic
auuauauacaucuucaaucaac

SEQ ID NO: 8249 - RNA, 22 nt, Artificial Sequence
  Synthetic
uuauauacaucuucaaucaaca

SEQ ID NO: 8250 - RNA, 22 nt, Artificial Sequence
  Synthetic
uauauacaucuucaaucaacag

SEQ ID NO: 8251 - RNA, 22 nt, Artificial Sequence
  Synthetic
auauacaucuucaaucaacagc

SEQ ID NO: 8252 - RNA, 22 nt, Artificial Sequence
  Synthetic
uauacaucuucaaucaacagca

SEQ ID NO: 8253 - RNA, 22 nt, Artificial Sequence
  Synthetic
auacaucuucaaucaacagcaa

SEQ ID NO: 8254 - RNA, 22 nt, Artificial Sequence
  Synthetic
uacaucuucaaucaacagcaac

SEQ ID NO: 8255 - RNA, 22 nt, Artificial Sequence
  Synthetic
acaucuucaaucaacagcaacc

SEQ ID NO: 8256 - RNA, 22 nt, Artificial Sequence
  Synthetic
caucuucaaucaacagcaaccc

SEQ ID NO: 8257 - RNA, 22 nt, Artificial Sequence
  Synthetic
aucuucaaucaacagcaacccc

SEQ ID NO: 8258 - RNA, 22 nt, Artificial Sequence
  Synthetic
ucuucaaucaacagcaaccccc

SEQ ID NO: 8259 - RNA, 22 nt, Artificial Sequence
  Synthetic
cuucaaucaacagcaaccccca

SEQ ID NO: 8260 - RNA, 22 nt, Artificial Sequence
  Synthetic
uucaaucaacagcaacccccac

SEQ ID NO: 8261 - RNA, 22 nt, Artificial Sequence
  Synthetic
ucaaucaacagcaacccccacc

SEQ ID NO: 8262 - RNA, 22 nt, Artificial Sequence
  Synthetic
caaucaacagcaacccccaccu

SEQ ID NO: 8263 - RNA, 22 nt, Artificial Sequence
  Synthetic
aaucaacagcaacccccaccuc

SEQ ID NO: 8264 - RNA, 22 nt, Artificial Sequence
  Synthetic
aucaacagcaacccccaccucc

SEQ ID NO: 8265 - RNA, 22 nt, Artificial Sequence
  Synthetic
ucaacagcaacccccaccucca

SEQ ID NO: 8266 - RNA, 22 nt, Artificial Sequence
  Synthetic
caacagcaacccccaccuccac

SEQ ID NO: 8267 - RNA, 22 nt, Artificial Sequence
  Synthetic
aacagcaacccccaccuccacu

SEQ ID NO: 8268 - RNA, 22 nt, Artificial Sequence
  Synthetic
acagcaacccccaccuccacug

SEQ ID NO: 8269 - RNA, 22 nt, Artificial Sequence
  Synthetic
cagcaacccccaccuccacugc

SEQ ID NO: 8270 - RNA, 22 nt, Artificial Sequence
  Synthetic
agcaacccccaccuccacugcu

SEQ ID NO: 8271 - RNA, 22 nt, Artificial Sequence
  Synthetic
gcaacccccaccuccacugcuu

SEQ ID NO: 8272 - RNA, 22 nt, Artificial Sequence
  Synthetic
caacccccaccuccacugcuuu

SEQ ID NO: 8273 - RNA, 22 nt, Artificial Sequence
  Synthetic
aacccccaccuccacugcuuuc

SEQ ID NO: 8274 - RNA, 22 nt, Artificial Sequence
  Synthetic
acccccaccuccacugcuuucu

SEQ ID NO: 8275 - RNA, 22 nt, Artificial Sequence
  Synthetic
cccccaccuccacugcuuucug

SEQ ID NO: 8276 - RNA, 22 nt, Artificial Sequence
  Synthetic
ccccaccuccacugcuuucugu

SEQ ID NO: 8277 - RNA, 22 nt, Artificial Sequence
  Synthetic
cccaccuccacugcuuucuguu

SEQ ID NO: 8278 - RNA, 22 nt, Artificial Sequence
  Synthetic
ccaccuccacugcuuucuguuu

SEQ ID NO: 8279 - RNA, 22 nt, Artificial Sequence
  Synthetic
caccuccacugcuuucuguuug

SEQ ID NO: 8280 - RNA, 22 nt, Artificial Sequence
  Synthetic
accuccacugcuuucuguuugg

SEQ ID NO: 8281 - RNA, 22 nt, Artificial Sequence
  Synthetic
ccuccacugcuuucuguuuggu

SEQ ID NO: 8282 - RNA, 22 nt, Artificial Sequence
  Synthetic
cuccacugcuuucuguuugguu

SEQ ID NO: 8283 - RNA, 22 nt, Artificial Sequence
  Synthetic
uccacugcuuucuguuugguuu

SEQ ID NO: 8284 - RNA, 22 nt, Artificial Sequence
  Synthetic
ccacugcuuucuguuugguuug

SEQ ID NO: 8285 - RNA, 22 nt, Artificial Sequence
  Synthetic
cacugcuuucuguuugguuugg

SEQ ID NO: 8286 - RNA, 22 nt, Artificial Sequence
  Synthetic
acugcuuucuguuugguuuggu

SEQ ID NO: 8287 - RNA, 22 nt, Artificial Sequence
  Synthetic
cugcuuucuguuugguuugguu

SEQ ID NO: 8288 - RNA, 22 nt, Artificial Sequence
  Synthetic
ugcuuucuguuugguuugguuu

SEQ ID NO: 8289 - RNA, 22 nt, Artificial Sequence
  Synthetic
gcuuucuguuugguuugguuug

SEQ ID NO: 8290 - RNA, 22 nt, Artificial Sequence
  Synthetic
cuuucuguuugguuugguuuga

SEQ ID NO: 8291 - RNA, 22 nt, Artificial Sequence
  Synthetic
uuucuguuugguuugguuugag

SEQ ID NO: 8292 - RNA, 22 nt, Artificial Sequence
  Synthetic
uucuguuugguuugguuugagu

SEQ ID NO: 8293 - RNA, 22 nt, Artificial Sequence
  Synthetic
ucuguuugguuugguuugaguu

SEQ ID NO: 8294 - RNA, 22 nt, Artificial Sequence
  Synthetic
cuguuugguuugguuugaguuu

SEQ ID NO: 8295 - RNA, 22 nt, Artificial Sequence
  Synthetic
uguuugguuugguuugaguuug

SEQ ID NO: 8296 - RNA, 22 nt, Artificial Sequence
  Synthetic
guuugguuugguuugaguuugg

SEQ ID NO: 8297 - RNA, 22 nt, Artificial Sequence
  Synthetic
uuugguuugguuugaguuuggg

SEQ ID NO: 8298 - RNA, 22 nt, Artificial Sequence
  Synthetic
uugguuugguuugaguuuggga

SEQ ID NO: 8299 - RNA, 22 nt, Artificial Sequence
  Synthetic
ugguuugguuugaguuugggau

SEQ ID NO: 8300 - RNA, 22 nt, Artificial Sequence
  Synthetic
gguuugguuugaguuugggauu

SEQ ID NO: 8301 - RNA, 22 nt, Artificial Sequence
  Synthetic
guuugguuugaguuugggauuu

SEQ ID NO: 8302 - RNA, 22 nt, Artificial Sequence
  Synthetic
uuugguuugaguuugggauuuu

SEQ ID NO: 8303 - RNA, 22 nt, Artificial Sequence
  Synthetic
uugguuugaguuugggauuuug

SEQ ID NO: 8304 - RNA, 22 nt, Artificial Sequence
  Synthetic
ugguuugaguuugggauuuugg

SEQ ID NO: 8305 - RNA, 22 nt, Artificial Sequence
  Synthetic
gguuugaguuugggauuuuggg

SEQ ID NO: 8306 - RNA, 22 nt, Artificial Sequence
  Synthetic
guuugaguuugggauuuugggc

SEQ ID NO: 8307 - RNA, 22 nt, Artificial Sequence
  Synthetic
uuugaguuugggauuuugggcu

SEQ ID NO: 8308 - RNA, 22 nt, Artificial Sequence
  Synthetic
uugaguuugggauuuugggcua

SEQ ID NO: 8309 - RNA, 22 nt, Artificial Sequence
  Synthetic
ugaguuugggauuuugggcuag

SEQ ID NO: 8310 - RNA, 22 nt, Artificial Sequence
  Synthetic
gaguuugggauuuugggcuagc

SEQ ID NO: 8311 - RNA, 22 nt, Artificial Sequence
  Synthetic
aguuugggauuuugggcuagcu

SEQ ID NO: 8312 - RNA, 22 nt, Artificial Sequence
  Synthetic
guuugggauuuugggcuagcuc

SEQ ID NO: 8313 - RNA, 22 nt, Artificial Sequence
  Synthetic
uuugggauuuugggcuagcucu

SEQ ID NO: 8314 - RNA, 22 nt, Artificial Sequence
  Synthetic
uugggauuuugggcuagcucuu

SEQ ID NO: 8315 - RNA, 22 nt, Artificial Sequence
  Synthetic
ugggauuuugggcuagcucuuu

SEQ ID NO: 8316 - RNA, 22 nt, Artificial Sequence
  Synthetic
gggauuuugggcuagcucuuuu

SEQ ID NO: 8317 - RNA, 22 nt, Artificial Sequence
  Synthetic
ggauuuugggcuagcucuuuuu

SEQ ID NO: 8318 - RNA, 22 nt, Artificial Sequence
  Synthetic
gauuuugggcuagcucuuuuuu

SEQ ID NO: 8319 - RNA, 22 nt, Artificial Sequence
  Synthetic
auuuugggcuagcucuuuuuuc

SEQ ID NO: 8320 - RNA, 22 nt, Artificial Sequence
  Synthetic
uuuugggcuagcucuuuuuucu

SEQ ID NO: 8321 - RNA, 22 nt, Artificial Sequence
  Synthetic
uuugggcuagcucuuuuuucuu

SEQ ID NO: 8322 - RNA, 22 nt, Artificial Sequence
  Synthetic
uugggcuagcucuuuuuucuuu

SEQ ID NO: 8323 - RNA, 22 nt, Artificial Sequence
  Synthetic
ugggcuagcucuuuuuucuuug

SEQ ID NO: 8324 - RNA, 22 nt, Artificial Sequence
  Synthetic
gggcuagcucuuuuuucuuugu

SEQ ID NO: 8325 - RNA, 22 nt, Artificial Sequence
  Synthetic
ggcuagcucuuuuuucuuuguc

SEQ ID NO: 8326 - RNA, 22 nt, Artificial Sequence
  Synthetic
gcuagcucuuuuuucuuugucu

SEQ ID NO: 8327 - RNA, 22 nt, Artificial Sequence
  Synthetic
cuagcucuuuuuucuuugucug

SEQ ID NO: 8328 - RNA, 22 nt, Artificial Sequence
  Synthetic
uagcucuuuuuucuuugucugc

SEQ ID NO: 8329 - RNA, 22 nt, Artificial Sequence
  Synthetic
agcucuuuuuucuuugucugcu

SEQ ID NO: 8330 - RNA, 22 nt, Artificial Sequence
  Synthetic
gcucuuuuuucuuugucugcuu

SEQ ID NO: 8331 - RNA, 22 nt, Artificial Sequence
  Synthetic
cucuuuuuucuuugucugcuuu

SEQ ID NO: 8332 - RNA, 22 nt, Artificial Sequence
  Synthetic
ucuuuuuucuuugucugcuuuc

SEQ ID NO: 8333 - RNA, 22 nt, Artificial Sequence
  Synthetic
cuuuuuucuuugucugcuuucu

SEQ ID NO: 8334 - RNA, 22 nt, Artificial Sequence
  Synthetic
uuuuuucuuugucugcuuucug

SEQ ID NO: 8335 - RNA, 22 nt, Artificial Sequence
  Synthetic
uuuuucuuugucugcuuucugu

SEQ ID NO: 8336 - RNA, 22 nt, Artificial Sequence
  Synthetic
uuuucuuugucugcuuucuguu

SEQ ID NO: 8337 - RNA, 22 nt, Artificial Sequence
  Synthetic
uuucuuugucugcuuucuguuu

SEQ ID NO: 8338 - RNA, 22 nt, Artificial Sequence
  Synthetic
uucuuugucugcuuucuguuuu

SEQ ID NO: 8339 - RNA, 22 nt, Artificial Sequence
  Synthetic
ucuuugucugcuuucuguuuuc

SEQ ID NO: 8340 - RNA, 22 nt, Artificial Sequence
  Synthetic
cuuugucugcuuucuguuuucc

SEQ ID NO: 8341 - RNA, 22 nt, Artificial Sequence
  Synthetic
uuugucugcuuucuguuuuccc

SEQ ID NO: 8342 - RNA, 22 nt, Artificial Sequence
  Synthetic
uugucugcuuucuguuuucccu

SEQ ID NO: 8343 - RNA, 22 nt, Artificial Sequence
  Synthetic
ugucugcuuucuguuuucccuu

SEQ ID NO: 8344 - RNA, 22 nt, Artificial Sequence
  Synthetic
gucugcuuucuguuuucccuuc

SEQ ID NO: 8345 - RNA, 22 nt, Artificial Sequence
  Synthetic
ucugcuuucuguuuucccuucc

SEQ ID NO: 8346 - RNA, 22 nt, Artificial Sequence
  Synthetic
cugcuuucuguuuucccuuccu

SEQ ID NO: 8347 - RNA, 22 nt, Artificial Sequence
  Synthetic
ugcuuucuguuuucccuuccuc

SEQ ID NO: 8348 - RNA, 22 nt, Artificial Sequence
  Synthetic
gcuuucuguuuucccuuccucc

SEQ ID NO: 8349 - RNA, 22 nt, Artificial Sequence
  Synthetic
cuuucuguuuucccuuccuccc

SEQ ID NO: 8350 - RNA, 22 nt, Artificial Sequence
  Synthetic
uuucuguuuucccuuccucccu

SEQ ID NO: 8351 - RNA, 22 nt, Artificial Sequence
  Synthetic
uucuguuuucccuuccucccuu

SEQ ID NO: 8352 - RNA, 22 nt, Artificial Sequence
  Synthetic
ucuguuuucccuuccucccuuc

SEQ ID NO: 8353 - RNA, 22 nt, Artificial Sequence
  Synthetic
cuguuuucccuuccucccuucc

SEQ ID NO: 8354 - RNA, 22 nt, Artificial Sequence
  Synthetic
uguuuucccuuccucccuuccc

SEQ ID NO: 8355 - RNA, 22 nt, Artificial Sequence
  Synthetic
guuuucccuuccucccuucccu

SEQ ID NO: 8356 - RNA, 22 nt, Artificial Sequence
  Synthetic
uuuucccuuccucccuucccua

SEQ ID NO: 8357 - RNA, 22 nt, Artificial Sequence
  Synthetic
uuucccuuccucccuucccuau

SEQ ID NO: 8358 - RNA, 22 nt, Artificial Sequence
  Synthetic
uucccuuccucccuucccuaug

SEQ ID NO: 8359 - RNA, 22 nt, Artificial Sequence
  Synthetic
ucccuuccucccuucccuaugu

SEQ ID NO: 8360 - RNA, 22 nt, Artificial Sequence
  Synthetic
cccuuccucccuucccuaugua

SEQ ID NO: 8361 - RNA, 22 nt, Artificial Sequence
  Synthetic
ccuuccucccuucccuauguac

SEQ ID NO: 8362 - RNA, 22 nt, Artificial Sequence
  Synthetic
cuuccucccuucccuauguacg

SEQ ID NO: 8363 - RNA, 22 nt, Artificial Sequence
  Synthetic
uuccucccuucccuauguacgc

SEQ ID NO: 8364 - RNA, 22 nt, Artificial Sequence
  Synthetic
uccucccuucccuauguacgcu

SEQ ID NO: 8365 - RNA, 22 nt, Artificial Sequence
  Synthetic
ccucccuucccuauguacgcuc

SEQ ID NO: 8366 - RNA, 22 nt, Artificial Sequence
  Synthetic
cucccuucccuauguacgcuca

SEQ ID NO: 8367 - RNA, 22 nt, Artificial Sequence
  Synthetic
ucccuucccuauguacgcucag

SEQ ID NO: 8368 - RNA, 22 nt, Artificial Sequence
  Synthetic
cccuucccuauguacgcucaga

SEQ ID NO: 8369 - RNA, 22 nt, Artificial Sequence
  Synthetic
ccuucccuauguacgcucagag

SEQ ID NO: 8370 - RNA, 22 nt, Artificial Sequence
  Synthetic
cuucccuauguacgcucagagc

SEQ ID NO: 8371 - RNA, 22 nt, Artificial Sequence
  Synthetic
uucccuauguacgcucagagcc

SEQ ID NO: 8372 - RNA, 22 nt, Artificial Sequence
  Synthetic
ucccuauguacgcucagagccu

SEQ ID NO: 8373 - RNA, 22 nt, Artificial Sequence
  Synthetic
cccuauguacgcucagagccuc

SEQ ID NO: 8374 - RNA, 22 nt, Artificial Sequence
  Synthetic
ccuauguacgcucagagccuca

SEQ ID NO: 8375 - RNA, 22 nt, Artificial Sequence
  Synthetic
cuauguacgcucagagccucag

SEQ ID NO: 8376 - RNA, 22 nt, Artificial Sequence
  Synthetic
uauguacgcucagagccucaga

SEQ ID NO: 8377 - RNA, 22 nt, Artificial Sequence
  Synthetic
auguacgcucagagccucagac

SEQ ID NO: 8378 - RNA, 22 nt, Artificial Sequence
  Synthetic
uguacgcucagagccucagaca

SEQ ID NO: 8379 - RNA, 22 nt, Artificial Sequence
  Synthetic
guacgcucagagccucagacag

SEQ ID NO: 8380 - RNA, 22 nt, Artificial Sequence
  Synthetic
uacgcucagagccucagacaga

SEQ ID NO: 8381 - RNA, 22 nt, Artificial Sequence
  Synthetic
acgcucagagccucagacagac

SEQ ID NO: 8382 - RNA, 22 nt, Artificial Sequence
  Synthetic
cgcucagagccucagacagacc

SEQ ID NO: 8383 - RNA, 22 nt, Artificial Sequence
  Synthetic
gcucagagccucagacagaccg

SEQ ID NO: 8384 - RNA, 22 nt, Artificial Sequence
  Synthetic
cucagagccucagacagaccgu

SEQ ID NO: 8385 - RNA, 22 nt, Artificial Sequence
  Synthetic
ucagagccucagacagaccguc

SEQ ID NO: 8386 - RNA, 22 nt, Artificial Sequence
  Synthetic
cagagccucagacagaccgucu

SEQ ID NO: 8387 - RNA, 22 nt, Artificial Sequence
  Synthetic
agagccucagacagaccgucug

SEQ ID NO: 8388 - RNA, 22 nt, Artificial Sequence
  Synthetic
gagccucagacagaccgucugg

SEQ ID NO: 8389 - RNA, 22 nt, Artificial Sequence
  Synthetic
agccucagacagaccgucuggg

SEQ ID NO: 8390 - RNA, 22 nt, Artificial Sequence
  Synthetic
gccucagacagaccgucugggc

SEQ ID NO: 8391 - RNA, 22 nt, Artificial Sequence
  Synthetic
ccucagacagaccgucugggcg

SEQ ID NO: 8392 - RNA, 22 nt, Artificial Sequence
  Synthetic
cucagacagaccgucugggcgc

SEQ ID NO: 8393 - RNA, 22 nt, Artificial Sequence
  Synthetic
ucagacagaccgucugggcgcc

SEQ ID NO: 8394 - RNA, 22 nt, Artificial Sequence
  Synthetic
cagacagaccgucugggcgccu

SEQ ID NO: 8395 - RNA, 22 nt, Artificial Sequence
  Synthetic
agacagaccgucugggcgccuc

SEQ ID NO: 8396 - RNA, 22 nt, Artificial Sequence
  Synthetic
gacagaccgucugggcgccuca

SEQ ID NO: 8397 - RNA, 22 nt, Artificial Sequence
  Synthetic
acagaccgucugggcgccucau

SEQ ID NO: 8398 - RNA, 22 nt, Artificial Sequence
  Synthetic
cagaccgucugggcgccucauu

SEQ ID NO: 8399 - RNA, 22 nt, Artificial Sequence
  Synthetic
agaccgucugggcgccucauuc

SEQ ID NO: 8400 - RNA, 22 nt, Artificial Sequence
  Synthetic
gaccgucugggcgccucauucg

SEQ ID NO: 8401 - RNA, 22 nt, Artificial Sequence
  Synthetic
accgucugggcgccucauucgc

SEQ ID NO: 8402 - RNA, 22 nt, Artificial Sequence
  Synthetic
ccgucugggcgccucauucgcg

SEQ ID NO: 8403 - RNA, 22 nt, Artificial Sequence
  Synthetic
cgucugggcgccucauucgcgu

SEQ ID NO: 8404 - RNA, 22 nt, Artificial Sequence
  Synthetic
gucugggcgccucauucgcguu

SEQ ID NO: 8405 - RNA, 22 nt, Artificial Sequence
  Synthetic
ucugggcgccucauucgcguuu

SEQ ID NO: 8406 - RNA, 22 nt, Artificial Sequence
  Synthetic
cugggcgccucauucgcguuuc

SEQ ID NO: 8407 - RNA, 22 nt, Artificial Sequence
  Synthetic
ugggcgccucauucgcguuucc

SEQ ID NO: 8408 - RNA, 22 nt, Artificial Sequence
  Synthetic
gggcgccucauucgcguuuccg

SEQ ID NO: 8409 - RNA, 22 nt, Artificial Sequence
  Synthetic
ggcgccucauucgcguuuccgc

SEQ ID NO: 8410 - RNA, 22 nt, Artificial Sequence
  Synthetic
gcgccucauucgcguuuccgca

SEQ ID NO: 8411 - RNA, 22 nt, Artificial Sequence
  Synthetic
cgccucauucgcguuuccgcaa

SEQ ID NO: 8412 - RNA, 22 nt, Artificial Sequence
  Synthetic
gccucauucgcguuuccgcaag

SEQ ID NO: 8413 - RNA, 22 nt, Artificial Sequence
  Synthetic
ccucauucgcguuuccgcaaga

SEQ ID NO: 8414 - RNA, 22 nt, Artificial Sequence
  Synthetic
cucauucgcguuuccgcaagau

SEQ ID NO: 8415 - RNA, 22 nt, Artificial Sequence
  Synthetic
ucauucgcguuuccgcaagauc

SEQ ID NO: 8416 - RNA, 22 nt, Artificial Sequence
  Synthetic
cauucgcguuuccgcaagauca

SEQ ID NO: 8417 - RNA, 22 nt, Artificial Sequence
  Synthetic
auucgcguuuccgcaagaucac

SEQ ID NO: 8418 - RNA, 22 nt, Artificial Sequence
  Synthetic
uucgcguuuccgcaagaucaca

SEQ ID NO: 8419 - RNA, 22 nt, Artificial Sequence
  Synthetic
ucgcguuuccgcaagaucacau

SEQ ID NO: 8420 - RNA, 22 nt, Artificial Sequence
  Synthetic
cgcguuuccgcaagaucacaua

SEQ ID NO: 8421 - RNA, 22 nt, Artificial Sequence
  Synthetic
gcguuuccgcaagaucacauag

SEQ ID NO: 8422 - RNA, 22 nt, Artificial Sequence
  Synthetic
cguuuccgcaagaucacauaga

SEQ ID NO: 8423 - RNA, 22 nt, Artificial Sequence
  Synthetic
guuuccgcaagaucacauagau

SEQ ID NO: 8424 - RNA, 22 nt, Artificial Sequence
  Synthetic
uuuccgcaagaucacauagaug

SEQ ID NO: 8425 - RNA, 22 nt, Artificial Sequence
  Synthetic
uuccgcaagaucacauagauga

SEQ ID NO: 8426 - RNA, 22 nt, Artificial Sequence
  Synthetic
uccgcaagaucacauagaugac

SEQ ID NO: 8427 - RNA, 22 nt, Artificial Sequence
  Synthetic
ccgcaagaucacauagaugaca

SEQ ID NO: 8428 - RNA, 22 nt, Artificial Sequence
  Synthetic
cgcaagaucacauagaugacac

SEQ ID NO: 8429 - RNA, 22 nt, Artificial Sequence
  Synthetic
gcaagaucacauagaugacacc

SEQ ID NO: 8430 - RNA, 22 nt, Artificial Sequence
  Synthetic
caagaucacauagaugacaccg

SEQ ID NO: 8431 - RNA, 22 nt, Artificial Sequence
  Synthetic
aagaucacauagaugacaccgc

SEQ ID NO: 8432 - RNA, 22 nt, Artificial Sequence
  Synthetic
agaucacauagaugacaccgcu

SEQ ID NO: 8433 - RNA, 22 nt, Artificial Sequence
  Synthetic
gaucacauagaugacaccgcug

SEQ ID NO: 8434 - RNA, 22 nt, Artificial Sequence
  Synthetic
aucacauagaugacaccgcuga

SEQ ID NO: 8435 - RNA, 22 nt, Artificial Sequence
  Synthetic
ucacauagaugacaccgcugag

SEQ ID NO: 8436 - RNA, 22 nt, Artificial Sequence
  Synthetic
cacauagaugacaccgcugaga

SEQ ID NO: 8437 - RNA, 22 nt, Artificial Sequence
  Synthetic
acauagaugacaccgcugagaa

SEQ ID NO: 8438 - RNA, 22 nt, Artificial Sequence
  Synthetic
cauagaugacaccgcugagaag

SEQ ID NO: 8439 - RNA, 22 nt, Artificial Sequence
  Synthetic
auagaugacaccgcugagaagg

SEQ ID NO: 8440 - RNA, 22 nt, Artificial Sequence
  Synthetic
uagaugacaccgcugagaaggg

SEQ ID NO: 8441 - RNA, 22 nt, Artificial Sequence
  Synthetic
agaugacaccgcugagaagggc

SEQ ID NO: 8442 - RNA, 22 nt, Artificial Sequence
  Synthetic
gaugacaccgcugagaagggcc

SEQ ID NO: 8443 - RNA, 22 nt, Artificial Sequence
  Synthetic
augacaccgcugagaagggcca

SEQ ID NO: 8444 - RNA, 22 nt, Artificial Sequence
  Synthetic
ugacaccgcugagaagggccag

SEQ ID NO: 8445 - RNA, 22 nt, Artificial Sequence
  Synthetic
gacaccgcugagaagggccagg

SEQ ID NO: 8446 - RNA, 22 nt, Artificial Sequence
  Synthetic
acaccgcugagaagggccaggg

SEQ ID NO: 8447 - RNA, 22 nt, Artificial Sequence
  Synthetic
caccgcugagaagggccagggg

SEQ ID NO: 8448 - RNA, 22 nt, Artificial Sequence
  Synthetic
accgcugagaagggccaggggg

SEQ ID NO: 8449 - RNA, 22 nt, Artificial Sequence
  Synthetic
ccgcugagaagggccaggggga

SEQ ID NO: 8450 - RNA, 22 nt, Artificial Sequence
  Synthetic
cgcugagaagggccagggggaa

SEQ ID NO: 8451 - RNA, 22 nt, Artificial Sequence
  Synthetic
gcugagaagggccagggggaag

SEQ ID NO: 8452 - RNA, 22 nt, Artificial Sequence
  Synthetic
cugagaagggccagggggaagg

SEQ ID NO: 8453 - RNA, 22 nt, Artificial Sequence
  Synthetic
ugagaagggccagggggaaggc

SEQ ID NO: 8454 - RNA, 22 nt, Artificial Sequence
  Synthetic
gagaagggccagggggaaggcc

SEQ ID NO: 8455 - RNA, 22 nt, Artificial Sequence
  Synthetic
agaagggccagggggaaggcca

SEQ ID NO: 8456 - RNA, 22 nt, Artificial Sequence
  Synthetic
gaagggccagggggaaggccac

SEQ ID NO: 8457 - RNA, 22 nt, Artificial Sequence
  Synthetic
aagggccagggggaaggccacc

SEQ ID NO: 8458 - RNA, 22 nt, Artificial Sequence
  Synthetic
agggccagggggaaggccaccc

SEQ ID NO: 8459 - RNA, 22 nt, Artificial Sequence
  Synthetic
gggccagggggaaggccaccca

SEQ ID NO: 8460 - RNA, 22 nt, Artificial Sequence
  Synthetic
ggccagggggaaggccacccag

SEQ ID NO: 8461 - RNA, 22 nt, Artificial Sequence
  Synthetic
gccagggggaaggccacccagg

SEQ ID NO: 8462 - RNA, 22 nt, Artificial Sequence
  Synthetic
ccagggggaaggccacccaggc

SEQ ID NO: 8463 - RNA, 22 nt, Artificial Sequence
  Synthetic
cagggggaaggccacccaggcc

SEQ ID NO: 8464 - RNA, 22 nt, Artificial Sequence
  Synthetic
agggggaaggccacccaggcca

SEQ ID NO: 8465 - RNA, 22 nt, Artificial Sequence
  Synthetic
gggggaaggccacccaggccag

SEQ ID NO: 8466 - RNA, 22 nt, Artificial Sequence
  Synthetic
ggggaaggccacccaggccagg

SEQ ID NO: 8467 - RNA, 22 nt, Artificial Sequence
  Synthetic
gggaaggccacccaggccagga

SEQ ID NO: 8468 - RNA, 22 nt, Artificial Sequence
  Synthetic
ggaaggccacccaggccaggau

SEQ ID NO: 8469 - RNA, 22 nt, Artificial Sequence
  Synthetic
gaaggccacccaggccaggaug

SEQ ID NO: 8470 - RNA, 22 nt, Artificial Sequence
  Synthetic
aaggccacccaggccaggaugu

SEQ ID NO: 8471 - RNA, 22 nt, Artificial Sequence
  Synthetic
aggccacccaggccaggaugua

SEQ ID NO: 8472 - RNA, 22 nt, Artificial Sequence
  Synthetic
ggccacccaggccaggauguag

SEQ ID NO: 8473 - RNA, 22 nt, Artificial Sequence
  Synthetic
gccacccaggccaggauguagg

SEQ ID NO: 8474 - RNA, 22 nt, Artificial Sequence
  Synthetic
ccacccaggccaggauguaggc

SEQ ID NO: 8475 - RNA, 22 nt, Artificial Sequence
  Synthetic
cacccaggccaggauguaggcg

SEQ ID NO: 8476 - RNA, 22 nt, Artificial Sequence
  Synthetic
acccaggccaggauguaggcga

SEQ ID NO: 8477 - RNA, 22 nt, Artificial Sequence
  Synthetic
cccaggccaggauguaggcgaa

SEQ ID NO: 8478 - RNA, 22 nt, Artificial Sequence
  Synthetic
ccaggccaggauguaggcgaaa

SEQ ID NO: 8479 - RNA, 22 nt, Artificial Sequence
  Synthetic
caggccaggauguaggcgaaac

SEQ ID NO: 8480 - RNA, 22 nt, Artificial Sequence
  Synthetic
aggccaggauguaggcgaaacc

SEQ ID NO: 8481 - RNA, 22 nt, Artificial Sequence
  Synthetic
ggccaggauguaggcgaaaccg

SEQ ID NO: 8482 - RNA, 22 nt, Artificial Sequence
  Synthetic
gccaggauguaggcgaaaccgu

SEQ ID NO: 8483 - RNA, 22 nt, Artificial Sequence
  Synthetic
ccaggauguaggcgaaaccgua

SEQ ID NO: 8484 - RNA, 22 nt, Artificial Sequence
  Synthetic
caggauguaggcgaaaccguag

SEQ ID NO: 8485 - RNA, 22 nt, Artificial Sequence
  Synthetic
aggauguaggcgaaaccguagg

SEQ ID NO: 8486 - RNA, 22 nt, Artificial Sequence
  Synthetic
ggauguaggcgaaaccguagga

SEQ ID NO: 8487 - RNA, 22 nt, Artificial Sequence
  Synthetic
gauguaggcgaaaccguaggag

SEQ ID NO: 8488 - RNA, 22 nt, Artificial Sequence
  Synthetic
auguaggcgaaaccguaggagu

SEQ ID NO: 8489 - RNA, 22 nt, Artificial Sequence
  Synthetic
uguaggcgaaaccguaggagua

SEQ ID NO: 8490 - RNA, 22 nt, Artificial Sequence
  Synthetic
guaggcgaaaccguaggaguaa

SEQ ID NO: 8491 - RNA, 22 nt, Artificial Sequence
  Synthetic
uaggcgaaaccguaggaguaau

SEQ ID NO: 8492 - RNA, 22 nt, Artificial Sequence
  Synthetic
aggcgaaaccguaggaguaauc

SEQ ID NO: 8493 - RNA, 22 nt, Artificial Sequence
  Synthetic
ggcgaaaccguaggaguaaucc

SEQ ID NO: 8494 - RNA, 22 nt, Artificial Sequence
  Synthetic
gcgaaaccguaggaguaauccg

SEQ ID NO: 8495 - RNA, 22 nt, Artificial Sequence
  Synthetic
cgaaaccguaggaguaauccga

SEQ ID NO: 8496 - RNA, 22 nt, Artificial Sequence
  Synthetic
gaaaccguaggaguaauccgag

SEQ ID NO: 8497 - RNA, 22 nt, Artificial Sequence
  Synthetic
aaaccguaggaguaauccgagu

SEQ ID NO: 8498 - RNA, 22 nt, Artificial Sequence
  Synthetic
aaccguaggaguaauccgaguu

SEQ ID NO: 8499 - RNA, 22 nt, Artificial Sequence
  Synthetic
accguaggaguaauccgaguug

SEQ ID NO: 8500 - RNA, 22 nt, Artificial Sequence
  Synthetic
ccguaggaguaauccgaguuga

SEQ ID NO: 8501 - RNA, 22 nt, Artificial Sequence
  Synthetic
cguaggaguaauccgaguugag

SEQ ID NO: 8502 - RNA, 22 nt, Artificial Sequence
  Synthetic
guaggaguaauccgaguugaga

SEQ ID NO: 8503 - RNA, 22 nt, Artificial Sequence
  Synthetic
uaggaguaauccgaguugagau

SEQ ID NO: 8504 - RNA, 22 nt, Artificial Sequence
  Synthetic
aggaguaauccgaguugagaug

SEQ ID NO: 8505 - RNA, 22 nt, Artificial Sequence
  Synthetic
ggaguaauccgaguugagaugc

SEQ ID NO: 8506 - RNA, 22 nt, Artificial Sequence
  Synthetic
gaguaauccgaguugagaugcc

SEQ ID NO: 8507 - RNA, 22 nt, Artificial Sequence
  Synthetic
aguaauccgaguugagaugcca

SEQ ID NO: 8508 - RNA, 22 nt, Artificial Sequence
  Synthetic
guaauccgaguugagaugccac

SEQ ID NO: 8509 - RNA, 22 nt, Artificial Sequence
  Synthetic
uaauccgaguugagaugccacu

SEQ ID NO: 8510 - RNA, 22 nt, Artificial Sequence
  Synthetic
aauccgaguugagaugccacuc

SEQ ID NO: 8511 - RNA, 22 nt, Artificial Sequence
  Synthetic
auccgaguugagaugccacucc

SEQ ID NO: 8512 - RNA, 22 nt, Artificial Sequence
  Synthetic
uccgaguugagaugccacuccg

SEQ ID NO: 8513 - RNA, 22 nt, Artificial Sequence
  Synthetic
ccgaguugagaugccacuccgg

SEQ ID NO: 8514 - RNA, 22 nt, Artificial Sequence
  Synthetic
cgaguugagaugccacuccggg

SEQ ID NO: 8515 - RNA, 22 nt, Artificial Sequence
  Synthetic
gaguugagaugccacuccgggu

SEQ ID NO: 8516 - RNA, 22 nt, Artificial Sequence
  Synthetic
aguugagaugccacuccgggug

SEQ ID NO: 8517 - RNA, 22 nt, Artificial Sequence
  Synthetic
guugagaugccacuccgggugc

SEQ ID NO: 8518 - RNA, 22 nt, Artificial Sequence
  Synthetic
uugagaugccacuccgggugcc

SEQ ID NO: 8519 - RNA, 22 nt, Artificial Sequence
  Synthetic
ugagaugccacuccgggugccu

SEQ ID NO: 8520 - RNA, 22 nt, Artificial Sequence
  Synthetic
gagaugccacuccgggugccuc

SEQ ID NO: 8521 - RNA, 22 nt, Artificial Sequence
  Synthetic
agaugccacuccgggugccuca

SEQ ID NO: 8522 - RNA, 22 nt, Artificial Sequence
  Synthetic
gaugccacuccgggugccucac

SEQ ID NO: 8523 - RNA, 22 nt, Artificial Sequence
  Synthetic
augccacuccgggugccucacc

SEQ ID NO: 8524 - RNA, 22 nt, Artificial Sequence
  Synthetic
ugccacuccgggugccucaccg

SEQ ID NO: 8525 - RNA, 22 nt, Artificial Sequence
  Synthetic
gccacuccgggugccucaccgu

SEQ ID NO: 8526 - RNA, 22 nt, Artificial Sequence
  Synthetic
ccacuccgggugccucaccgug

SEQ ID NO: 8527 - RNA, 22 nt, Artificial Sequence
  Synthetic
cacuccgggugccucaccgugu

SEQ ID NO: 8528 - RNA, 22 nt, Artificial Sequence
  Synthetic
acuccgggugccucaccgugua

SEQ ID NO: 8529 - RNA, 22 nt, Artificial Sequence
  Synthetic
cuccgggugccucaccguguag

SEQ ID NO: 8530 - RNA, 22 nt, Artificial Sequence
  Synthetic
uccgggugccucaccguguaga

SEQ ID NO: 8531 - RNA, 22 nt, Artificial Sequence
  Synthetic
ccgggugccucaccguguagau

SEQ ID NO: 8532 - RNA, 22 nt, Artificial Sequence
  Synthetic
cgggugccucaccguguagaug

SEQ ID NO: 8533 - RNA, 22 nt, Artificial Sequence
  Synthetic
gggugccucaccguguagaugg

SEQ ID NO: 8534 - RNA, 22 nt, Artificial Sequence
  Synthetic
ggugccucaccguguagauggc

SEQ ID NO: 8535 - RNA, 22 nt, Artificial Sequence
  Synthetic
gugccucaccguguagauggcc

SEQ ID NO: 8536 - RNA, 22 nt, Artificial Sequence
  Synthetic
ugccucaccguguagauggccg

SEQ ID NO: 8537 - RNA, 22 nt, Artificial Sequence
  Synthetic
gccucaccguguagauggccgc

SEQ ID NO: 8538 - RNA, 22 nt, Artificial Sequence
  Synthetic
ccucaccguguagauggccgca

SEQ ID NO: 8539 - RNA, 22 nt, Artificial Sequence
  Synthetic
cucaccguguagauggccgcag

SEQ ID NO: 8540 - RNA, 22 nt, Artificial Sequence
  Synthetic
ucaccguguagauggccgcagc

SEQ ID NO: 8541 - RNA, 22 nt, Artificial Sequence
  Synthetic
caccguguagauggccgcagca

SEQ ID NO: 8542 - RNA, 22 nt, Artificial Sequence
  Synthetic
accguguagauggccgcagcac

SEQ ID NO: 8543 - RNA, 22 nt, Artificial Sequence
  Synthetic
ccguguagauggccgcagcacu

SEQ ID NO: 8544 - RNA, 22 nt, Artificial Sequence
  Synthetic
cguguagauggccgcagcacuc

SEQ ID NO: 8545 - RNA, 22 nt, Artificial Sequence
  Synthetic
guguagauggccgcagcacuca

SEQ ID NO: 8546 - RNA, 22 nt, Artificial Sequence
  Synthetic
uguagauggccgcagcacucau

SEQ ID NO: 8547 - RNA, 22 nt, Artificial Sequence
  Synthetic
guagauggccgcagcacucauc

SEQ ID NO: 8548 - RNA, 22 nt, Artificial Sequence
  Synthetic
uagauggccgcagcacucauca

SEQ ID NO: 8549 - RNA, 22 nt, Artificial Sequence
  Synthetic
agauggccgcagcacucaucac

SEQ ID NO: 8550 - RNA, 22 nt, Artificial Sequence
  Synthetic
gauggccgcagcacucaucacg

SEQ ID NO: 8551 - RNA, 22 nt, Artificial Sequence
  Synthetic
auggccgcagcacucaucacgc

SEQ ID NO: 8552 - RNA, 22 nt, Artificial Sequence
  Synthetic
uggccgcagcacucaucacgca

SEQ ID NO: 8553 - RNA, 22 nt, Artificial Sequence
  Synthetic
ggccgcagcacucaucacgcac

SEQ ID NO: 8554 - RNA, 22 nt, Artificial Sequence
  Synthetic
gccgcagcacucaucacgcaca

SEQ ID NO: 8555 - RNA, 22 nt, Artificial Sequence
  Synthetic
ccgcagcacucaucacgcacag

SEQ ID NO: 8556 - RNA, 22 nt, Artificial Sequence
  Synthetic
cgcagcacucaucacgcacaga

SEQ ID NO: 8557 - RNA, 22 nt, Artificial Sequence
  Synthetic
gcagcacucaucacgcacagac

SEQ ID NO: 8558 - RNA, 22 nt, Artificial Sequence
  Synthetic
cagcacucaucacgcacagacc

SEQ ID NO: 8559 - RNA, 22 nt, Artificial Sequence
  Synthetic
agcacucaucacgcacagacca

SEQ ID NO: 8560 - RNA, 22 nt, Artificial Sequence
  Synthetic
gcacucaucacgcacagaccag

SEQ ID NO: 8561 - RNA, 22 nt, Artificial Sequence
  Synthetic
cacucaucacgcacagaccagc

SEQ ID NO: 8562 - RNA, 22 nt, Artificial Sequence
  Synthetic
acucaucacgcacagaccagca

SEQ ID NO: 8563 - RNA, 22 nt, Artificial Sequence
  Synthetic
cucaucacgcacagaccagcaa

SEQ ID NO: 8564 - RNA, 22 nt, Artificial Sequence
  Synthetic
ucaucacgcacagaccagcaag

SEQ ID NO: 8565 - RNA, 22 nt, Artificial Sequence
  Synthetic
caucacgcacagaccagcaaga

SEQ ID NO: 8566 - RNA, 22 nt, Artificial Sequence
  Synthetic
aucacgcacagaccagcaagaa

SEQ ID NO: 8567 - RNA, 22 nt, Artificial Sequence
  Synthetic
ucacgcacagaccagcaagaau

SEQ ID NO: 8568 - RNA, 22 nt, Artificial Sequence
  Synthetic
cacgcacagaccagcaagaauu

SEQ ID NO: 8569 - RNA, 22 nt, Artificial Sequence
  Synthetic
acgcacagaccagcaagaauuu

SEQ ID NO: 8570 - RNA, 22 nt, Artificial Sequence
  Synthetic
cgcacagaccagcaagaauuug

SEQ ID NO: 8571 - RNA, 22 nt, Artificial Sequence
  Synthetic
gcacagaccagcaagaauuugg

SEQ ID NO: 8572 - RNA, 22 nt, Artificial Sequence
  Synthetic
cacagaccagcaagaauuugga

SEQ ID NO: 8573 - RNA, 22 nt, Artificial Sequence
  Synthetic
acagaccagcaagaauuuggaa

SEQ ID NO: 8574 - RNA, 22 nt, Artificial Sequence
  Synthetic
cagaccagcaagaauuuggaag

SEQ ID NO: 8575 - RNA, 22 nt, Artificial Sequence
  Synthetic
agaccagcaagaauuuggaaga

SEQ ID NO: 8576 - RNA, 22 nt, Artificial Sequence
  Synthetic
gaccagcaagaauuuggaagau

SEQ ID NO: 8577 - RNA, 22 nt, Artificial Sequence
  Synthetic
accagcaagaauuuggaagauu

SEQ ID NO: 8578 - RNA, 22 nt, Artificial Sequence
  Synthetic
ccagcaagaauuuggaagauuc

SEQ ID NO: 8579 - RNA, 22 nt, Artificial Sequence
  Synthetic
cagcaagaauuuggaagauucc

SEQ ID NO: 8580 - RNA, 22 nt, Artificial Sequence
  Synthetic
agcaagaauuuggaagauucca

SEQ ID NO: 8581 - RNA, 22 nt, Artificial Sequence
  Synthetic
gcaagaauuuggaagauuccag

SEQ ID NO: 8582 - RNA, 22 nt, Artificial Sequence
  Synthetic
caagaauuuggaagauuccagu

SEQ ID NO: 8583 - RNA, 22 nt, Artificial Sequence
  Synthetic
aagaauuuggaagauuccagug

SEQ ID NO: 8584 - RNA, 22 nt, Artificial Sequence
  Synthetic
agaauuuggaagauuccaguga

SEQ ID NO: 8585 - RNA, 22 nt, Artificial Sequence
  Synthetic
gaauuuggaagauuccagugau

SEQ ID NO: 8586 - RNA, 22 nt, Artificial Sequence
  Synthetic
aauuuggaagauuccagugaug

SEQ ID NO: 8587 - RNA, 22 nt, Artificial Sequence
  Synthetic
auuuggaagauuccagugaugu

SEQ ID NO: 8588 - RNA, 22 nt, Artificial Sequence
  Synthetic
uuuggaagauuccagugaugua

SEQ ID NO: 8589 - RNA, 22 nt, Artificial Sequence
  Synthetic
uuggaagauuccagugauguaa

SEQ ID NO: 8590 - RNA, 22 nt, Artificial Sequence
  Synthetic
uggaagauuccagugauguaaa

SEQ ID NO: 8591 - RNA, 22 nt, Artificial Sequence
  Synthetic
ggaagauuccagugauguaaaa

SEQ ID NO: 8592 - RNA, 22 nt, Artificial Sequence
  Synthetic
gaagauuccagugauguaaaac

SEQ ID NO: 8593 - RNA, 22 nt, Artificial Sequence
  Synthetic
aagauuccagugauguaaaacc

SEQ ID NO: 8594 - RNA, 22 nt, Artificial Sequence
  Synthetic
agauuccagugauguaaaaccu

SEQ ID NO: 8595 - RNA, 22 nt, Artificial Sequence
  Synthetic
gauuccagugauguaaaaccug

SEQ ID NO: 8596 - RNA, 22 nt, Artificial Sequence
  Synthetic
auuccagugauguaaaaccugc

SEQ ID NO: 8597 - RNA, 22 nt, Artificial Sequence
  Synthetic
uuccagugauguaaaaccugcc

SEQ ID NO: 8598 - RNA, 22 nt, Artificial Sequence
  Synthetic
uccagugauguaaaaccugccc

SEQ ID NO: 8599 - RNA, 22 nt, Artificial Sequence
  Synthetic
ccagugauguaaaaccugcccc

SEQ ID NO: 8600 - RNA, 22 nt, Artificial Sequence
  Synthetic
cagugauguaaaaccugccccc

SEQ ID NO: 8601 - RNA, 22 nt, Artificial Sequence
  Synthetic
agugauguaaaaccugcccccc

SEQ ID NO: 8602 - RNA, 22 nt, Artificial Sequence
  Synthetic
gugauguaaaaccugccccccu

SEQ ID NO: 8603 - RNA, 22 nt, Artificial Sequence
  Synthetic
ugauguaaaaccugccccccuu

SEQ ID NO: 8604 - RNA, 22 nt, Artificial Sequence
  Synthetic
gauguaaaaccugccccccuug

SEQ ID NO: 8605 - RNA, 22 nt, Artificial Sequence
  Synthetic
auguaaaaccugccccccuugg

SEQ ID NO: 8606 - RNA, 22 nt, Artificial Sequence
  Synthetic
uguaaaaccugccccccuuggu

SEQ ID NO: 8607 - RNA, 22 nt, Artificial Sequence
  Synthetic
guaaaaccugccccccuuggug

SEQ ID NO: 8608 - RNA, 22 nt, Artificial Sequence
  Synthetic
uaaaaccugccccccuugguga

SEQ ID NO: 8609 - RNA, 22 nt, Artificial Sequence
  Synthetic
aaaaccugccccccuuggugag

SEQ ID NO: 8610 - RNA, 22 nt, Artificial Sequence
  Synthetic
aaaccugccccccuuggugagg

SEQ ID NO: 8611 - RNA, 22 nt, Artificial Sequence
  Synthetic
aaccugccccccuuggugaggg

SEQ ID NO: 8612 - RNA, 22 nt, Artificial Sequence
  Synthetic
accugccccccuuggugagggu

SEQ ID NO: 8613 - RNA, 22 nt, Artificial Sequence
  Synthetic
ccugccccccuuggugagggug

SEQ ID NO: 8614 - RNA, 22 nt, Artificial Sequence
  Synthetic
cugccccccuuggugaggguga

SEQ ID NO: 8615 - RNA, 22 nt, Artificial Sequence
  Synthetic
ugccccccuuggugagggugaa

SEQ ID NO: 8616 - RNA, 22 nt, Artificial Sequence
  Synthetic
gccccccuuggugagggugaag

SEQ ID NO: 8617 - RNA, 22 nt, Artificial Sequence
  Synthetic
ccccccuuggugagggugaaga

SEQ ID NO: 8618 - RNA, 22 nt, Artificial Sequence
  Synthetic
cccccuuggugagggugaagag

SEQ ID NO: 8619 - RNA, 22 nt, Artificial Sequence
  Synthetic
ccccuuggugagggugaagagu

SEQ ID NO: 8620 - RNA, 22 nt, Artificial Sequence
  Synthetic
cccuuggugagggugaagaguu

SEQ ID NO: 8621 - RNA, 22 nt, Artificial Sequence
  Synthetic
ccuuggugagggugaagaguug

SEQ ID NO: 8622 - RNA, 22 nt, Artificial Sequence
  Synthetic
cuuggugagggugaagaguugg

SEQ ID NO: 8623 - RNA, 22 nt, Artificial Sequence
  Synthetic
uuggugagggugaagaguuggc

SEQ ID NO: 8624 - RNA, 22 nt, Artificial Sequence
  Synthetic
uggugagggugaagaguuggca

SEQ ID NO: 8625 - RNA, 22 nt, Artificial Sequence
  Synthetic
ggugagggugaagaguuggcag

SEQ ID NO: 8626 - RNA, 22 nt, Artificial Sequence
  Synthetic
gugagggugaagaguuggcaga

SEQ ID NO: 8627 - RNA, 22 nt, Artificial Sequence
  Synthetic
ugagggugaagaguuggcagaa

SEQ ID NO: 8628 - RNA, 22 nt, Artificial Sequence
  Synthetic
gagggugaagaguuggcagaag

SEQ ID NO: 8629 - RNA, 22 nt, Artificial Sequence
  Synthetic
agggugaagaguuggcagaaga

SEQ ID NO: 8630 - RNA, 22 nt, Artificial Sequence
  Synthetic
gggugaagaguuggcagaagaa

SEQ ID NO: 8631 - RNA, 22 nt, Artificial Sequence
  Synthetic
ggugaagaguuggcagaagaac

SEQ ID NO: 8632 - RNA, 22 nt, Artificial Sequence
  Synthetic
gugaagaguuggcagaagaaca

SEQ ID NO: 8633 - RNA, 22 nt, Artificial Sequence
  Synthetic
ugaagaguuggcagaagaacag

SEQ ID NO: 8634 - RNA, 22 nt, Artificial Sequence
  Synthetic
gaagaguuggcagaagaacagg

SEQ ID NO: 8635 - RNA, 22 nt, Artificial Sequence
  Synthetic
aagaguuggcagaagaacagga

SEQ ID NO: 8636 - RNA, 22 nt, Artificial Sequence
  Synthetic
agaguuggcagaagaacaggaa

SEQ ID NO: 8637 - RNA, 22 nt, Artificial Sequence
  Synthetic
gaguuggcagaagaacaggaac

SEQ ID NO: 8638 - RNA, 22 nt, Artificial Sequence
  Synthetic
aguuggcagaagaacaggaaca

SEQ ID NO: 8639 - RNA, 22 nt, Artificial Sequence
  Synthetic
guuggcagaagaacaggaacag

SEQ ID NO: 8640 - RNA, 22 nt, Artificial Sequence
  Synthetic
uuggcagaagaacaggaacaga

SEQ ID NO: 8641 - RNA, 22 nt, Artificial Sequence
  Synthetic
uggcagaagaacaggaacagag

SEQ ID NO: 8642 - RNA, 22 nt, Artificial Sequence
  Synthetic
ggcagaagaacaggaacagaga

SEQ ID NO: 8643 - RNA, 22 nt, Artificial Sequence
  Synthetic
gcagaagaacaggaacagagac

SEQ ID NO: 8644 - RNA, 22 nt, Artificial Sequence
  Synthetic
cagaagaacaggaacagagaca

SEQ ID NO: 8645 - RNA, 22 nt, Artificial Sequence
  Synthetic
agaagaacaggaacagagacag

SEQ ID NO: 8646 - RNA, 22 nt, Artificial Sequence
  Synthetic
gaagaacaggaacagagacaga

SEQ ID NO: 8647 - RNA, 22 nt, Artificial Sequence
  Synthetic
aagaacaggaacagagacagaa

SEQ ID NO: 8648 - RNA, 22 nt, Artificial Sequence
  Synthetic
agaacaggaacagagacagaau

SEQ ID NO: 8649 - RNA, 22 nt, Artificial Sequence
  Synthetic
gaacaggaacagagacagaaug

SEQ ID NO: 8650 - RNA, 22 nt, Artificial Sequence
  Synthetic
aacaggaacagagacagaaugc

SEQ ID NO: 8651 - RNA, 22 nt, Artificial Sequence
  Synthetic
acaggaacagagacagaaugcu

SEQ ID NO: 8652 - RNA, 22 nt, Artificial Sequence
  Synthetic
caggaacagagacagaaugcug

SEQ ID NO: 8653 - RNA, 22 nt, Artificial Sequence
  Synthetic
aggaacagagacagaaugcuga

SEQ ID NO: 8654 - RNA, 22 nt, Artificial Sequence
  Synthetic
ggaacagagacagaaugcugaa

SEQ ID NO: 8655 - RNA, 22 nt, Artificial Sequence
  Synthetic
gaacagagacagaaugcugaag

SEQ ID NO: 8656 - RNA, 22 nt, Artificial Sequence
  Synthetic
aacagagacagaaugcugaaga

SEQ ID NO: 8657 - RNA, 22 nt, Artificial Sequence
  Synthetic
acagagacagaaugcugaagau

SEQ ID NO: 8658 - RNA, 22 nt, Artificial Sequence
  Synthetic
cagagacagaaugcugaagaug

SEQ ID NO: 8659 - RNA, 22 nt, Artificial Sequence
  Synthetic
agagacagaaugcugaagauga

SEQ ID NO: 8660 - RNA, 22 nt, Artificial Sequence
  Synthetic
gagacagaaugcugaagaugau

SEQ ID NO: 8661 - RNA, 22 nt, Artificial Sequence
  Synthetic
agacagaaugcugaagaugauc

SEQ ID NO: 8662 - RNA, 22 nt, Artificial Sequence
  Synthetic
gacagaaugcugaagaugaucg

SEQ ID NO: 8663 - RNA, 22 nt, Artificial Sequence
  Synthetic
acagaaugcugaagaugaucga

SEQ ID NO: 8664 - RNA, 22 nt, Artificial Sequence
  Synthetic
cagaaugcugaagaugaucgac

SEQ ID NO: 8665 - RNA, 22 nt, Artificial Sequence
  Synthetic
agaaugcugaagaugaucgaca

SEQ ID NO: 8666 - RNA, 22 nt, Artificial Sequence
  Synthetic
gaaugcugaagaugaucgacag

SEQ ID NO: 8667 - RNA, 22 nt, Artificial Sequence
  Synthetic
aaugcugaagaugaucgacagg

SEQ ID NO: 8668 - RNA, 22 nt, Artificial Sequence
  Synthetic
augcugaagaugaucgacagga

SEQ ID NO: 8669 - RNA, 22 nt, Artificial Sequence
  Synthetic
ugcugaagaugaucgacaggau

SEQ ID NO: 8670 - RNA, 22 nt, Artificial Sequence
  Synthetic
gcugaagaugaucgacaggauc

SEQ ID NO: 8671 - RNA, 22 nt, Artificial Sequence
  Synthetic
cugaagaugaucgacaggauca

SEQ ID NO: 8672 - RNA, 22 nt, Artificial Sequence
  Synthetic
ugaagaugaucgacaggaucau

SEQ ID NO: 8673 - RNA, 22 nt, Artificial Sequence
  Synthetic
gaagaugaucgacaggaucaug

SEQ ID NO: 8674 - RNA, 22 nt, Artificial Sequence
  Synthetic
aagaugaucgacaggaucaugg

SEQ ID NO: 8675 - RNA, 22 nt, Artificial Sequence
  Synthetic
agaugaucgacaggaucauggu

SEQ ID NO: 8676 - RNA, 22 nt, Artificial Sequence
  Synthetic
gaugaucgacaggaucauggug

SEQ ID NO: 8677 - RNA, 22 nt, Artificial Sequence
  Synthetic
augaucgacaggaucauggugg

SEQ ID NO: 8678 - RNA, 22 nt, Artificial Sequence
  Synthetic
ugaucgacaggaucaugguggc

SEQ ID NO: 8679 - RNA, 22 nt, Artificial Sequence
  Synthetic
gaucgacaggaucaugguggcc

SEQ ID NO: 8680 - RNA, 22 nt, Artificial Sequence
  Synthetic
aucgacaggaucaugguggccu

SEQ ID NO: 8681 - RNA, 22 nt, Artificial Sequence
  Synthetic
ucgacaggaucaugguggccug

SEQ ID NO: 8682 - RNA, 22 nt, Artificial Sequence
  Synthetic
cgacaggaucaugguggccugg

SEQ ID NO: 8683 - RNA, 22 nt, Artificial Sequence
  Synthetic
gacaggaucaugguggccugga

SEQ ID NO: 8684 - RNA, 22 nt, Artificial Sequence
  Synthetic
acaggaucaugguggccuggac

SEQ ID NO: 8685 - RNA, 22 nt, Artificial Sequence
  Synthetic
caggaucaugguggccuggaca

SEQ ID NO: 8686 - RNA, 22 nt, Artificial Sequence
  Synthetic
aggaucaugguggccuggacag

SEQ ID NO: 8687 - RNA, 22 nt, Artificial Sequence
  Synthetic
ggaucaugguggccuggacaga

SEQ ID NO: 8688 - RNA, 22 nt, Artificial Sequence
  Synthetic
gaucaugguggccuggacagac

SEQ ID NO: 8689 - RNA, 22 nt, Artificial Sequence
  Synthetic
aucaugguggccuggacagacu

SEQ ID NO: 8690 - RNA, 22 nt, Artificial Sequence
  Synthetic
ucaugguggccuggacagacug

SEQ ID NO: 8691 - RNA, 22 nt, Artificial Sequence
  Synthetic
caugguggccuggacagacugc

SEQ ID NO: 8692 - RNA, 22 nt, Artificial Sequence
  Synthetic
augguggccuggacagacugca

SEQ ID NO: 8693 - RNA, 22 nt, Artificial Sequence
  Synthetic
ugguggccuggacagacugcag

SEQ ID NO: 8694 - RNA, 22 nt, Artificial Sequence
  Synthetic
gguggccuggacagacugcagc

SEQ ID NO: 8695 - RNA, 22 nt, Artificial Sequence
  Synthetic
guggccuggacagacugcagcc

SEQ ID NO: 8696 - RNA, 22 nt, Artificial Sequence
  Synthetic
uggccuggacagacugcagcca

SEQ ID NO: 8697 - RNA, 22 nt, Artificial Sequence
  Synthetic
ggccuggacagacugcagccau

SEQ ID NO: 8698 - RNA, 22 nt, Artificial Sequence
  Synthetic
gccuggacagacugcagccauu

SEQ ID NO: 8699 - RNA, 22 nt, Artificial Sequence
  Synthetic
ccuggacagacugcagccauuc

SEQ ID NO: 8700 - RNA, 22 nt, Artificial Sequence
  Synthetic
cuggacagacugcagccauucg

SEQ ID NO: 8701 - RNA, 22 nt, Artificial Sequence
  Synthetic
uggacagacugcagccauucgu

SEQ ID NO: 8702 - RNA, 22 nt, Artificial Sequence
  Synthetic
ggacagacugcagccauucguu

SEQ ID NO: 8703 - RNA, 22 nt, Artificial Sequence
  Synthetic
gacagacugcagccauucguuu

SEQ ID NO: 8704 - RNA, 22 nt, Artificial Sequence
  Synthetic
acagacugcagccauucguuug

SEQ ID NO: 8705 - RNA, 22 nt, Artificial Sequence
  Synthetic
cagacugcagccauucguuugg

SEQ ID NO: 8706 - RNA, 22 nt, Artificial Sequence
  Synthetic
agacugcagccauucguuuggu

SEQ ID NO: 8707 - RNA, 22 nt, Artificial Sequence
  Synthetic
gacugcagccauucguuuggug

SEQ ID NO: 8708 - RNA, 22 nt, Artificial Sequence
  Synthetic
acugcagccauucguuugguga

SEQ ID NO: 8709 - RNA, 22 nt, Artificial Sequence
  Synthetic
cugcagccauucguuuggugau

SEQ ID NO: 8710 - RNA, 22 nt, Artificial Sequence
  Synthetic
ugcagccauucguuuggugaug

SEQ ID NO: 8711 - RNA, 22 nt, Artificial Sequence
  Synthetic
gcagccauucguuuggugauga

SEQ ID NO: 8712 - RNA, 22 nt, Artificial Sequence
  Synthetic
cagccauucguuuggugaugau

SEQ ID NO: 8713 - RNA, 22 nt, Artificial Sequence
  Synthetic
agccauucguuuggugaugaug

SEQ ID NO: 8714 - RNA, 22 nt, Artificial Sequence
  Synthetic
gccauucguuuggugaugauga

SEQ ID NO: 8715 - RNA, 22 nt, Artificial Sequence
  Synthetic
ccauucguuuggugaugaugag

SEQ ID NO: 8716 - RNA, 22 nt, Artificial Sequence
  Synthetic
cauucguuuggugaugaugaga

SEQ ID NO: 8717 - RNA, 22 nt, Artificial Sequence
  Synthetic
auucguuuggugaugaugagaa

SEQ ID NO: 8718 - RNA, 22 nt, Artificial Sequence
  Synthetic
uucguuuggugaugaugagaaa

SEQ ID NO: 8719 - RNA, 22 nt, Artificial Sequence
  Synthetic
ucguuuggugaugaugagaaac

SEQ ID NO: 8720 - RNA, 22 nt, Artificial Sequence
  Synthetic
cguuuggugaugaugagaaaca

SEQ ID NO: 8721 - RNA, 22 nt, Artificial Sequence
  Synthetic
guuuggugaugaugagaaacag

SEQ ID NO: 8722 - RNA, 22 nt, Artificial Sequence
  Synthetic
uuuggugaugaugagaaacagu

SEQ ID NO: 8723 - RNA, 22 nt, Artificial Sequence
  Synthetic
uuggugaugaugagaaacagug

SEQ ID NO: 8724 - RNA, 22 nt, Artificial Sequence
  Synthetic
uggugaugaugagaaacagugg

SEQ ID NO: 8725 - RNA, 22 nt, Artificial Sequence
  Synthetic
ggugaugaugagaaacaguggu

SEQ ID NO: 8726 - RNA, 22 nt, Artificial Sequence
  Synthetic
gugaugaugagaaacaguggug

SEQ ID NO: 8727 - RNA, 22 nt, Artificial Sequence
  Synthetic
ugaugaugagaaacaguggugg

SEQ ID NO: 8728 - RNA, 22 nt, Artificial Sequence
  Synthetic
gaugaugagaaacaguggugga

SEQ ID NO: 8729 - RNA, 22 nt, Artificial Sequence
  Synthetic
augaugagaaacagugguggac

SEQ ID NO: 8730 - RNA, 22 nt, Artificial Sequence
  Synthetic
ugaugagaaacagugguggaca

SEQ ID NO: 8731 - RNA, 22 nt, Artificial Sequence
  Synthetic
gaugagaaacagugguggacau

SEQ ID NO: 8732 - RNA, 22 nt, Artificial Sequence
  Synthetic
augagaaacagugguggacauu

SEQ ID NO: 8733 - RNA, 22 nt, Artificial Sequence
  Synthetic
ugagaaacagugguggacauuu

SEQ ID NO: 8734 - RNA, 22 nt, Artificial Sequence
  Synthetic
gagaaacagugguggacauuuc

SEQ ID NO: 8735 - RNA, 22 nt, Artificial Sequence
  Synthetic
agaaacagugguggacauuucc

SEQ ID NO: 8736 - RNA, 22 nt, Artificial Sequence
  Synthetic
gaaacagugguggacauuuccu

SEQ ID NO: 8737 - RNA, 22 nt, Artificial Sequence
  Synthetic
aaacagugguggacauuuccug

SEQ ID NO: 8738 - RNA, 22 nt, Artificial Sequence
  Synthetic
aacagugguggacauuuccuga

SEQ ID NO: 8739 - RNA, 22 nt, Artificial Sequence
  Synthetic
acagugguggacauuuccugag

SEQ ID NO: 8740 - RNA, 22 nt, Artificial Sequence
  Synthetic
cagugguggacauuuccugagg

SEQ ID NO: 8741 - RNA, 22 nt, Artificial Sequence
  Synthetic
agugguggacauuuccugagga

SEQ ID NO: 8742 - RNA, 22 nt, Artificial Sequence
  Synthetic
gugguggacauuuccugaggaa

SEQ ID NO: 8743 - RNA, 22 nt, Artificial Sequence
  Synthetic
ugguggacauuuccugaggaag

SEQ ID NO: 8744 - RNA, 22 nt, Artificial Sequence
  Synthetic
gguggacauuuccugaggaaga

SEQ ID NO: 8745 - RNA, 22 nt, Artificial Sequence
  Synthetic
guggacauuuccugaggaagag

SEQ ID NO: 8746 - RNA, 22 nt, Artificial Sequence
  Synthetic
uggacauuuccugaggaagagg

SEQ ID NO: 8747 - RNA, 22 nt, Artificial Sequence
  Synthetic
ggacauuuccugaggaagaggu

SEQ ID NO: 8748 - RNA, 22 nt, Artificial Sequence
  Synthetic
gacauuuccugaggaagaggug

SEQ ID NO: 8749 - RNA, 22 nt, Artificial Sequence
  Synthetic
acauuuccugaggaagaggugc

SEQ ID NO: 8750 - RNA, 22 nt, Artificial Sequence
  Synthetic
cauuuccugaggaagaggugcu

SEQ ID NO: 8751 - RNA, 22 nt, Artificial Sequence
  Synthetic
auuuccugaggaagaggugcua

SEQ ID NO: 8752 - RNA, 22 nt, Artificial Sequence
  Synthetic
uuuccugaggaagaggugcuac

SEQ ID NO: 8753 - RNA, 22 nt, Artificial Sequence
  Synthetic
uuccugaggaagaggugcuaca

SEQ ID NO: 8754 - RNA, 22 nt, Artificial Sequence
  Synthetic
uccugaggaagaggugcuacag

SEQ ID NO: 8755 - RNA, 22 nt, Artificial Sequence
  Synthetic
ccugaggaagaggugcuacagu

SEQ ID NO: 8756 - RNA, 22 nt, Artificial Sequence
  Synthetic
cugaggaagaggugcuacaguu

SEQ ID NO: 8757 - RNA, 22 nt, Artificial Sequence
  Synthetic
ugaggaagaggugcuacaguuc

SEQ ID NO: 8758 - RNA, 22 nt, Artificial Sequence
  Synthetic
gaggaagaggugcuacaguucu

SEQ ID NO: 8759 - RNA, 22 nt, Artificial Sequence
  Synthetic
aggaagaggugcuacaguucug

SEQ ID NO: 8760 - RNA, 22 nt, Artificial Sequence
  Synthetic
ggaagaggugcuacaguucugc

SEQ ID NO: 8761 - RNA, 22 nt, Artificial Sequence
  Synthetic
gaagaggugcuacaguucugcc

SEQ ID NO: 8762 - RNA, 22 nt, Artificial Sequence
  Synthetic
aagaggugcuacaguucugcca

SEQ ID NO: 8763 - RNA, 22 nt, Artificial Sequence
  Synthetic
agaggugcuacaguucugccag

SEQ ID NO: 8764 - RNA, 22 nt, Artificial Sequence
  Synthetic
gaggugcuacaguucugccaga

SEQ ID NO: 8765 - RNA, 22 nt, Artificial Sequence
  Synthetic
aggugcuacaguucugccagag

SEQ ID NO: 8766 - RNA, 22 nt, Artificial Sequence
  Synthetic
ggugcuacaguucugccagaga

SEQ ID NO: 8767 - RNA, 22 nt, Artificial Sequence
  Synthetic
gugcuacaguucugccagagau

SEQ ID NO: 8768 - RNA, 22 nt, Artificial Sequence
  Synthetic
ugcuacaguucugccagagauc

SEQ ID NO: 8769 - RNA, 22 nt, Artificial Sequence
  Synthetic
gcuacaguucugccagagauca

SEQ ID NO: 8770 - RNA, 22 nt, Artificial Sequence
  Synthetic
cuacaguucugccagagaucag

SEQ ID NO: 8771 - RNA, 22 nt, Artificial Sequence
  Synthetic
uacaguucugccagagaucagu

SEQ ID NO: 8772 - RNA, 22 nt, Artificial Sequence
  Synthetic
acaguucugccagagaucaguu

SEQ ID NO: 8773 - RNA, 22 nt, Artificial Sequence
  Synthetic
caguucugccagagaucaguug

SEQ ID NO: 8774 - RNA, 22 nt, Artificial Sequence
  Synthetic
aguucugccagagaucaguugc

SEQ ID NO: 8775 - RNA, 22 nt, Artificial Sequence
  Synthetic
guucugccagagaucaguugcg

SEQ ID NO: 8776 - RNA, 22 nt, Artificial Sequence
  Synthetic
uucugccagagaucaguugcgu

SEQ ID NO: 8777 - RNA, 22 nt, Artificial Sequence
  Synthetic
ucugccagagaucaguugcgug

SEQ ID NO: 8778 - RNA, 22 nt, Artificial Sequence
  Synthetic
cugccagagaucaguugcgugu

SEQ ID NO: 8779 - RNA, 22 nt, Artificial Sequence
  Synthetic
ugccagagaucaguugcguguc

SEQ ID NO: 8780 - RNA, 22 nt, Artificial Sequence
  Synthetic
gccagagaucaguugcgugucc

SEQ ID NO: 8781 - RNA, 22 nt, Artificial Sequence
  Synthetic
ccagagaucaguugcgugucca

SEQ ID NO: 8782 - RNA, 22 nt, Artificial Sequence
  Synthetic
cagagaucaguugcguguccau

SEQ ID NO: 8783 - RNA, 22 nt, Artificial Sequence
  Synthetic
agagaucaguugcguguccauu

SEQ ID NO: 8784 - RNA, 22 nt, Artificial Sequence
  Synthetic
gagaucaguugcguguccauug

SEQ ID NO: 8785 - RNA, 22 nt, Artificial Sequence
  Synthetic
agaucaguugcguguccauugc

SEQ ID NO: 8786 - RNA, 22 nt, Artificial Sequence
  Synthetic
gaucaguugcguguccauugcc

SEQ ID NO: 8787 - RNA, 22 nt, Artificial Sequence
  Synthetic
aucaguugcguguccauugccc

SEQ ID NO: 8788 - RNA, 22 nt, Artificial Sequence
  Synthetic
ucaguugcguguccauugccca

SEQ ID NO: 8789 - RNA, 22 nt, Artificial Sequence
  Synthetic
caguugcguguccauugcccac

SEQ ID NO: 8790 - RNA, 22 nt, Artificial Sequence
  Synthetic
aguugcguguccauugcccacg

SEQ ID NO: 8791 - RNA, 22 nt, Artificial Sequence
  Synthetic
guugcguguccauugcccacga

SEQ ID NO: 8792 - RNA, 22 nt, Artificial Sequence
  Synthetic
uugcguguccauugcccacgau

SEQ ID NO: 8793 - RNA, 22 nt, Artificial Sequence
  Synthetic
ugcguguccauugcccacgauc

SEQ ID NO: 8794 - RNA, 22 nt, Artificial Sequence
  Synthetic
gcguguccauugcccacgaucc

SEQ ID NO: 8795 - RNA, 22 nt, Artificial Sequence
  Synthetic
cguguccauugcccacgaucca

SEQ ID NO: 8796 - RNA, 22 nt, Artificial Sequence
  Synthetic
guguccauugcccacgauccau

SEQ ID NO: 8797 - RNA, 22 nt, Artificial Sequence
  Synthetic
uguccauugcccacgauccauu

SEQ ID NO: 8798 - RNA, 22 nt, Artificial Sequence
  Synthetic
guccauugcccacgauccauug

SEQ ID NO: 8799 - RNA, 22 nt, Artificial Sequence
  Synthetic
uccauugcccacgauccauugg

SEQ ID NO: 8800 - RNA, 22 nt, Artificial Sequence
  Synthetic
ccauugcccacgauccauuggc

SEQ ID NO: 8801 - RNA, 22 nt, Artificial Sequence
  Synthetic
cauugcccacgauccauuggcu

SEQ ID NO: 8802 - RNA, 22 nt, Artificial Sequence
  Synthetic
auugcccacgauccauuggcug

SEQ ID NO: 8803 - RNA, 22 nt, Artificial Sequence
  Synthetic
uugcccacgauccauuggcuga

SEQ ID NO: 8804 - RNA, 22 nt, Artificial Sequence
  Synthetic
ugcccacgauccauuggcugac

SEQ ID NO: 8805 - RNA, 22 nt, Artificial Sequence
  Synthetic
gcccacgauccauuggcugacg

SEQ ID NO: 8806 - RNA, 22 nt, Artificial Sequence
  Synthetic
cccacgauccauuggcugacga

SEQ ID NO: 8807 - RNA, 22 nt, Artificial Sequence
  Synthetic
ccacgauccauuggcugacgau

SEQ ID NO: 8808 - RNA, 22 nt, Artificial Sequence
  Synthetic
cacgauccauuggcugacgauc

SEQ ID NO: 8809 - RNA, 22 nt, Artificial Sequence
  Synthetic
acgauccauuggcugacgaucg

SEQ ID NO: 8810 - RNA, 22 nt, Artificial Sequence
  Synthetic
cgauccauuggcugacgaucgu

SEQ ID NO: 8811 - RNA, 22 nt, Artificial Sequence
  Synthetic
gauccauuggcugacgaucgug

SEQ ID NO: 8812 - RNA, 22 nt, Artificial Sequence
  Synthetic
auccauuggcugacgaucgugg

SEQ ID NO: 8813 - RNA, 22 nt, Artificial Sequence
  Synthetic
uccauuggcugacgaucgugga

SEQ ID NO: 8814 - RNA, 22 nt, Artificial Sequence
  Synthetic
ccauuggcugacgaucguggag

SEQ ID NO: 8815 - RNA, 22 nt, Artificial Sequence
  Synthetic
cauuggcugacgaucguggaga

SEQ ID NO: 8816 - RNA, 22 nt, Artificial Sequence
  Synthetic
auuggcugacgaucguggagac

SEQ ID NO: 8817 - RNA, 22 nt, Artificial Sequence
  Synthetic
uuggcugacgaucguggagacg

SEQ ID NO: 8818 - RNA, 22 nt, Artificial Sequence
  Synthetic
uggcugacgaucguggagacga

SEQ ID NO: 8819 - RNA, 22 nt, Artificial Sequence
  Synthetic
ggcugacgaucguggagacgaa

SEQ ID NO: 8820 - RNA, 22 nt, Artificial Sequence
  Synthetic
gcugacgaucguggagacgaac

SEQ ID NO: 8821 - RNA, 22 nt, Artificial Sequence
  Synthetic
cugacgaucguggagacgaaca

SEQ ID NO: 8822 - RNA, 22 nt, Artificial Sequence
  Synthetic
ugacgaucguggagacgaacag

SEQ ID NO: 8823 - RNA, 22 nt, Artificial Sequence
  Synthetic
gacgaucguggagacgaacagc

SEQ ID NO: 8824 - RNA, 22 nt, Artificial Sequence
  Synthetic
acgaucguggagacgaacagca

SEQ ID NO: 8825 - RNA, 22 nt, Artificial Sequence
  Synthetic
cgaucguggagacgaacagcag

SEQ ID NO: 8826 - RNA, 22 nt, Artificial Sequence
  Synthetic
gaucguggagacgaacagcagc

SEQ ID NO: 8827 - RNA, 22 nt, Artificial Sequence
  Synthetic
aucguggagacgaacagcagca

SEQ ID NO: 8828 - RNA, 22 nt, Artificial Sequence
  Synthetic
ucguggagacgaacagcagcac

SEQ ID NO: 8829 - RNA, 22 nt, Artificial Sequence
  Synthetic
cguggagacgaacagcagcacc

SEQ ID NO: 8830 - RNA, 22 nt, Artificial Sequence
  Synthetic
guggagacgaacagcagcacca

SEQ ID NO: 8831 - RNA, 22 nt, Artificial Sequence
  Synthetic
uggagacgaacagcagcaccag

SEQ ID NO: 8832 - RNA, 22 nt, Artificial Sequence
  Synthetic
ggagacgaacagcagcaccagc

SEQ ID NO: 8833 - RNA, 22 nt, Artificial Sequence
  Synthetic
gagacgaacagcagcaccagca

SEQ ID NO: 8834 - RNA, 22 nt, Artificial Sequence
  Synthetic
agacgaacagcagcaccagcac

SEQ ID NO: 8835 - RNA, 22 nt, Artificial Sequence
  Synthetic
gacgaacagcagcaccagcacc

SEQ ID NO: 8836 - RNA, 22 nt, Artificial Sequence
  Synthetic
acgaacagcagcaccagcaccg

SEQ ID NO: 8837 - RNA, 22 nt, Artificial Sequence
  Synthetic
cgaacagcagcaccagcaccgc

SEQ ID NO: 8838 - RNA, 22 nt, Artificial Sequence
  Synthetic
gaacagcagcaccagcaccgcg

SEQ ID NO: 8839 - RNA, 22 nt, Artificial Sequence
  Synthetic
aacagcagcaccagcaccgcga

SEQ ID NO: 8840 - RNA, 22 nt, Artificial Sequence
  Synthetic
acagcagcaccagcaccgcgac

SEQ ID NO: 8841 - RNA, 22 nt, Artificial Sequence
  Synthetic
cagcagcaccagcaccgcgacg

SEQ ID NO: 8842 - RNA, 22 nt, Artificial Sequence
  Synthetic
agcagcaccagcaccgcgacgu

SEQ ID NO: 8843 - RNA, 22 nt, Artificial Sequence
  Synthetic
gcagcaccagcaccgcgacgug

SEQ ID NO: 8844 - RNA, 22 nt, Artificial Sequence
  Synthetic
cagcaccagcaccgcgacgugg

SEQ ID NO: 8845 - RNA, 22 nt, Artificial Sequence
  Synthetic
agcaccagcaccgcgacgugga

SEQ ID NO: 8846 - RNA, 22 nt, Artificial Sequence
  Synthetic
gcaccagcaccgcgacguggag

SEQ ID NO: 8847 - RNA, 22 nt, Artificial Sequence
  Synthetic
caccagcaccgcgacguggagg

SEQ ID NO: 8848 - RNA, 22 nt, Artificial Sequence
  Synthetic
accagcaccgcgacguggagga

SEQ ID NO: 8849 - RNA, 22 nt, Artificial Sequence
  Synthetic
ccagcaccgcgacguggaggac

SEQ ID NO: 8850 - RNA, 22 nt, Artificial Sequence
  Synthetic
cagcaccgcgacguggaggacg

SEQ ID NO: 8851 - RNA, 22 nt, Artificial Sequence
  Synthetic
agcaccgcgacguggaggacga

SEQ ID NO: 8852 - RNA, 22 nt, Artificial Sequence
  Synthetic
gcaccgcgacguggaggacgau

SEQ ID NO: 8853 - RNA, 22 nt, Artificial Sequence
  Synthetic
caccgcgacguggaggacgaug

SEQ ID NO: 8854 - RNA, 22 nt, Artificial Sequence
  Synthetic
accgcgacguggaggacgauga

SEQ ID NO: 8855 - RNA, 22 nt, Artificial Sequence
  Synthetic
ccgcgacguggaggacgaugau

SEQ ID NO: 8856 - RNA, 22 nt, Artificial Sequence
  Synthetic
cgcgacguggaggacgaugaua

SEQ ID NO: 8857 - RNA, 22 nt, Artificial Sequence
  Synthetic
gcgacguggaggacgaugauac

SEQ ID NO: 8858 - RNA, 22 nt, Artificial Sequence
  Synthetic
cgacguggaggacgaugauacu

SEQ ID NO: 8859 - RNA, 22 nt, Artificial Sequence
  Synthetic
gacguggaggacgaugauacuc

SEQ ID NO: 8860 - RNA, 22 nt, Artificial Sequence
  Synthetic
acguggaggacgaugauacuca

SEQ ID NO: 8861 - RNA, 22 nt, Artificial Sequence
  Synthetic
cguggaggacgaugauacucag

SEQ ID NO: 8862 - RNA, 22 nt, Artificial Sequence
  Synthetic
guggaggacgaugauacucagc

SEQ ID NO: 8863 - RNA, 22 nt, Artificial Sequence
  Synthetic
uggaggacgaugauacucagca

SEQ ID NO: 8864 - RNA, 22 nt, Artificial Sequence
  Synthetic
ggaggacgaugauacucagcaa

SEQ ID NO: 8865 - RNA, 22 nt, Artificial Sequence
  Synthetic
gaggacgaugauacucagcaac

SEQ ID NO: 8866 - RNA, 22 nt, Artificial Sequence
  Synthetic
aggacgaugauacucagcaaca

SEQ ID NO: 8867 - RNA, 22 nt, Artificial Sequence
  Synthetic
ggacgaugauacucagcaacag

SEQ ID NO: 8868 - RNA, 22 nt, Artificial Sequence
  Synthetic
gacgaugauacucagcaacagg

SEQ ID NO: 8869 - RNA, 22 nt, Artificial Sequence
  Synthetic
acgaugauacucagcaacagga

SEQ ID NO: 8870 - RNA, 22 nt, Artificial Sequence
  Synthetic
cgaugauacucagcaacaggag

SEQ ID NO: 8871 - RNA, 22 nt, Artificial Sequence
  Synthetic
gaugauacucagcaacaggagg

SEQ ID NO: 8872 - RNA, 22 nt, Artificial Sequence
  Synthetic
augauacucagcaacaggagga

SEQ ID NO: 8873 - RNA, 22 nt, Artificial Sequence
  Synthetic
ugauacucagcaacaggaggag

SEQ ID NO: 8874 - RNA, 22 nt, Artificial Sequence
  Synthetic
gauacucagcaacaggaggagc

SEQ ID NO: 8875 - RNA, 22 nt, Artificial Sequence
  Synthetic
auacucagcaacaggaggagca

SEQ ID NO: 8876 - RNA, 22 nt, Artificial Sequence
  Synthetic
uacucagcaacaggaggagcau

SEQ ID NO: 8877 - RNA, 22 nt, Artificial Sequence
  Synthetic
acucagcaacaggaggagcauu

SEQ ID NO: 8878 - RNA, 22 nt, Artificial Sequence
  Synthetic
cucagcaacaggaggagcauuc

SEQ ID NO: 8879 - RNA, 22 nt, Artificial Sequence
  Synthetic
ucagcaacaggaggagcauucu

SEQ ID NO: 8880 - RNA, 22 nt, Artificial Sequence
  Synthetic
cagcaacaggaggagcauucug

SEQ ID NO: 8881 - RNA, 22 nt, Artificial Sequence
  Synthetic
agcaacaggaggagcauucugg

SEQ ID NO: 8882 - RNA, 22 nt, Artificial Sequence
  Synthetic
gcaacaggaggagcauucuggc

SEQ ID NO: 8883 - RNA, 22 nt, Artificial Sequence
  Synthetic
caacaggaggagcauucuggcg

SEQ ID NO: 8884 - RNA, 22 nt, Artificial Sequence
  Synthetic
aacaggaggagcauucuggcgg

SEQ ID NO: 8885 - RNA, 22 nt, Artificial Sequence
  Synthetic
acaggaggagcauucuggcggc

SEQ ID NO: 8886 - RNA, 22 nt, Artificial Sequence
  Synthetic
caggaggagcauucuggcggca

SEQ ID NO: 8887 - RNA, 22 nt, Artificial Sequence
  Synthetic
aggaggagcauucuggcggcaa

SEQ ID NO: 8888 - RNA, 22 nt, Artificial Sequence
  Synthetic
ggaggagcauucuggcggcaag

SEQ ID NO: 8889 - RNA, 22 nt, Artificial Sequence
  Synthetic
gaggagcauucuggcggcaagu

SEQ ID NO: 8890 - RNA, 22 nt, Artificial Sequence
  Synthetic
aggagcauucuggcggcaaguu

SEQ ID NO: 8891 - RNA, 22 nt, Artificial Sequence
  Synthetic
ggagcauucuggcggcaaguuc

SEQ ID NO: 8892 - RNA, 22 nt, Artificial Sequence
  Synthetic
gagcauucuggcggcaaguucu

SEQ ID NO: 8893 - RNA, 22 nt, Artificial Sequence
  Synthetic
agcauucuggcggcaaguucug

SEQ ID NO: 8894 - RNA, 22 nt, Artificial Sequence
  Synthetic
gcauucuggcggcaaguucugc

SEQ ID NO: 8895 - RNA, 22 nt, Artificial Sequence
  Synthetic
cauucuggcggcaaguucugcu

SEQ ID NO: 8896 - RNA, 22 nt, Artificial Sequence
  Synthetic
auucuggcggcaaguucugcuc

SEQ ID NO: 8897 - RNA, 22 nt, Artificial Sequence
  Synthetic
uucuggcggcaaguucugcuca

SEQ ID NO: 8898 - RNA, 22 nt, Artificial Sequence
  Synthetic
ucuggcggcaaguucugcucag

SEQ ID NO: 8899 - RNA, 22 nt, Artificial Sequence
  Synthetic
cuggcggcaaguucugcucagc

SEQ ID NO: 8900 - RNA, 22 nt, Artificial Sequence
  Synthetic
uggcggcaaguucugcucagcg

SEQ ID NO: 8901 - RNA, 22 nt, Artificial Sequence
  Synthetic
ggcggcaaguucugcucagcgg

SEQ ID NO: 8902 - RNA, 22 nt, Artificial Sequence
  Synthetic
gcggcaaguucugcucagcgga

SEQ ID NO: 8903 - RNA, 22 nt, Artificial Sequence
  Synthetic
cggcaaguucugcucagcggag

SEQ ID NO: 8904 - RNA, 22 nt, Artificial Sequence
  Synthetic
ggcaaguucugcucagcggagu

SEQ ID NO: 8905 - RNA, 22 nt, Artificial Sequence
  Synthetic
gcaaguucugcucagcggaguu

SEQ ID NO: 8906 - RNA, 22 nt, Artificial Sequence
  Synthetic
caaguucugcucagcggaguuu

SEQ ID NO: 8907 - RNA, 22 nt, Artificial Sequence
  Synthetic
aaguucugcucagcggaguuuc

SEQ ID NO: 8908 - RNA, 22 nt, Artificial Sequence
  Synthetic
aguucugcucagcggaguuucu

SEQ ID NO: 8909 - RNA, 22 nt, Artificial Sequence
  Synthetic
guucugcucagcggaguuucug

SEQ ID NO: 8910 - RNA, 22 nt, Artificial Sequence
  Synthetic
uucugcucagcggaguuucugc

SEQ ID NO: 8911 - RNA, 22 nt, Artificial Sequence
  Synthetic
ucugcucagcggaguuucugca

SEQ ID NO: 8912 - RNA, 22 nt, Artificial Sequence
  Synthetic
cugcucagcggaguuucugcag

SEQ ID NO: 8913 - RNA, 22 nt, Artificial Sequence
  Synthetic
ugcucagcggaguuucugcagc

SEQ ID NO: 8914 - RNA, 22 nt, Artificial Sequence
  Synthetic
gcucagcggaguuucugcagcc

SEQ ID NO: 8915 - RNA, 22 nt, Artificial Sequence
  Synthetic
cucagcggaguuucugcagccc

SEQ ID NO: 8916 - RNA, 22 nt, Artificial Sequence
  Synthetic
ucagcggaguuucugcagccca

SEQ ID NO: 8917 - RNA, 22 nt, Artificial Sequence
  Synthetic
cagcggaguuucugcagcccaa

SEQ ID NO: 8918 - RNA, 22 nt, Artificial Sequence
  Synthetic
agcggaguuucugcagcccaaa

SEQ ID NO: 8919 - RNA, 22 nt, Artificial Sequence
  Synthetic
gcggaguuucugcagcccaaag

SEQ ID NO: 8920 - RNA, 22 nt, Artificial Sequence
  Synthetic
cggaguuucugcagcccaaagg

SEQ ID NO: 8921 - RNA, 22 nt, Artificial Sequence
  Synthetic
ggaguuucugcagcccaaagga

SEQ ID NO: 8922 - RNA, 22 nt, Artificial Sequence
  Synthetic
gaguuucugcagcccaaaggaa

SEQ ID NO: 8923 - RNA, 22 nt, Artificial Sequence
  Synthetic
aguuucugcagcccaaaggaac

SEQ ID NO: 8924 - RNA, 22 nt, Artificial Sequence
  Synthetic
guuucugcagcccaaaggaaca

SEQ ID NO: 8925 - RNA, 22 nt, Artificial Sequence
  Synthetic
uuucugcagcccaaaggaacag

SEQ ID NO: 8926 - RNA, 22 nt, Artificial Sequence
  Synthetic
uucugcagcccaaaggaacagc

SEQ ID NO: 8927 - RNA, 22 nt, Artificial Sequence
  Synthetic
ucugcagcccaaaggaacagcu

SEQ ID NO: 8928 - RNA, 22 nt, Artificial Sequence
  Synthetic
cugcagcccaaaggaacagcug

SEQ ID NO: 8929 - RNA, 22 nt, Artificial Sequence
  Synthetic
ugcagcccaaaggaacagcugu

SEQ ID NO: 8930 - RNA, 22 nt, Artificial Sequence
  Synthetic
gcagcccaaaggaacagcuguc

SEQ ID NO: 8931 - RNA, 22 nt, Artificial Sequence
  Synthetic
cagcccaaaggaacagcugucc

SEQ ID NO: 8932 - RNA, 22 nt, Artificial Sequence
  Synthetic
agcccaaaggaacagcuguccc

SEQ ID NO: 8933 - RNA, 22 nt, Artificial Sequence
  Synthetic
gcccaaaggaacagcugucccg

SEQ ID NO: 8934 - RNA, 22 nt, Artificial Sequence
  Synthetic
cccaaaggaacagcugucccga

SEQ ID NO: 8935 - RNA, 22 nt, Artificial Sequence
  Synthetic
ccaaaggaacagcugucccgau

SEQ ID NO: 8936 - RNA, 22 nt, Artificial Sequence
  Synthetic
caaaggaacagcugucccgauc

SEQ ID NO: 8937 - RNA, 22 nt, Artificial Sequence
  Synthetic
aaaggaacagcugucccgaucc

SEQ ID NO: 8938 - RNA, 22 nt, Artificial Sequence
  Synthetic
aaggaacagcugucccgauccu

SEQ ID NO: 8939 - RNA, 22 nt, Artificial Sequence
  Synthetic
aggaacagcugucccgauccuc

SEQ ID NO: 8940 - RNA, 22 nt, Artificial Sequence
  Synthetic
ggaacagcugucccgauccuca

SEQ ID NO: 8941 - RNA, 22 nt, Artificial Sequence
  Synthetic
gaacagcugucccgauccucag

SEQ ID NO: 8942 - RNA, 22 nt, Artificial Sequence
  Synthetic
aacagcugucccgauccucagg

SEQ ID NO: 8943 - RNA, 22 nt, Artificial Sequence
  Synthetic
acagcugucccgauccucaggg

SEQ ID NO: 8944 - RNA, 22 nt, Artificial Sequence
  Synthetic
cagcugucccgauccucagggu

SEQ ID NO: 8945 - RNA, 22 nt, Artificial Sequence
  Synthetic
agcugucccgauccucagggug

SEQ ID NO: 8946 - RNA, 22 nt, Artificial Sequence
  Synthetic
gcugucccgauccucagggugg

SEQ ID NO: 8947 - RNA, 22 nt, Artificial Sequence
  Synthetic
cugucccgauccucaggguggc

SEQ ID NO: 8948 - RNA, 22 nt, Artificial Sequence
  Synthetic
ugucccgauccucaggguggcc

SEQ ID NO: 8949 - RNA, 22 nt, Artificial Sequence
  Synthetic
gucccgauccucaggguggccu

SEQ ID NO: 8950 - RNA, 22 nt, Artificial Sequence
  Synthetic
ucccgauccucaggguggccuc

SEQ ID NO: 8951 - RNA, 22 nt, Artificial Sequence
  Synthetic
cccgauccucaggguggccuca

SEQ ID NO: 8952 - RNA, 22 nt, Artificial Sequence
  Synthetic
ccgauccucaggguggccucaa

SEQ ID NO: 8953 - RNA, 22 nt, Artificial Sequence
  Synthetic
cgauccucaggguggccucaaa

SEQ ID NO: 8954 - RNA, 22 nt, Artificial Sequence
  Synthetic
gauccucaggguggccucaaac

SEQ ID NO: 8955 - RNA, 22 nt, Artificial Sequence
  Synthetic
auccucaggguggccucaaaca

SEQ ID NO: 8956 - RNA, 22 nt, Artificial Sequence
  Synthetic
uccucaggguggccucaaacac

SEQ ID NO: 8957 - RNA, 22 nt, Artificial Sequence
  Synthetic
ccucaggguggccucaaacaca

SEQ ID NO: 8958 - RNA, 22 nt, Artificial Sequence
  Synthetic
cucaggguggccucaaacacaa

SEQ ID NO: 8959 - RNA, 22 nt, Artificial Sequence
  Synthetic
ucaggguggccucaaacacaaa

SEQ ID NO: 8960 - RNA, 22 nt, Artificial Sequence
  Synthetic
caggguggccucaaacacaaac

SEQ ID NO: 8961 - RNA, 22 nt, Artificial Sequence
  Synthetic
aggguggccucaaacacaaacu

SEQ ID NO: 8962 - RNA, 22 nt, Artificial Sequence
  Synthetic
ggguggccucaaacacaaacuc

SEQ ID NO: 8963 - RNA, 22 nt, Artificial Sequence
  Synthetic
gguggccucaaacacaaacucg

SEQ ID NO: 8964 - RNA, 22 nt, Artificial Sequence
  Synthetic
guggccucaaacacaaacucgg

SEQ ID NO: 8965 - RNA, 22 nt, Artificial Sequence
  Synthetic
uggccucaaacacaaacucggg

SEQ ID NO: 8966 - RNA, 22 nt, Artificial Sequence
  Synthetic
ggccucaaacacaaacucgggu

SEQ ID NO: 8967 - RNA, 22 nt, Artificial Sequence
  Synthetic
gccucaaacacaaacucgggug

SEQ ID NO: 8968 - RNA, 22 nt, Artificial Sequence
  Synthetic
ccucaaacacaaacucgggugc

SEQ ID NO: 8969 - RNA, 22 nt, Artificial Sequence
  Synthetic
cucaaacacaaacucgggugcg

SEQ ID NO: 8970 - RNA, 22 nt, Artificial Sequence
  Synthetic
ucaaacacaaacucgggugcgu

SEQ ID NO: 8971 - RNA, 22 nt, Artificial Sequence
  Synthetic
caaacacaaacucgggugcguu

SEQ ID NO: 8972 - RNA, 22 nt, Artificial Sequence
  Synthetic
aaacacaaacucgggugcguug

SEQ ID NO: 8973 - RNA, 22 nt, Artificial Sequence
  Synthetic
aacacaaacucgggugcguugg

SEQ ID NO: 8974 - RNA, 22 nt, Artificial Sequence
  Synthetic
acacaaacucgggugcguuggc

SEQ ID NO: 8975 - RNA, 22 nt, Artificial Sequence
  Synthetic
cacaaacucgggugcguuggcu

SEQ ID NO: 8976 - RNA, 22 nt, Artificial Sequence
  Synthetic
acaaacucgggugcguuggcuc

SEQ ID NO: 8977 - RNA, 22 nt, Artificial Sequence
  Synthetic
caaacucgggugcguuggcucc

SEQ ID NO: 8978 - RNA, 22 nt, Artificial Sequence
  Synthetic
aaacucgggugcguuggcuccg

SEQ ID NO: 8979 - RNA, 22 nt, Artificial Sequence
  Synthetic
aacucgggugcguuggcuccgc

SEQ ID NO: 8980 - RNA, 22 nt, Artificial Sequence
  Synthetic
acucgggugcguuggcuccgcu

SEQ ID NO: 8981 - RNA, 22 nt, Artificial Sequence
  Synthetic
cucgggugcguuggcuccgcug

SEQ ID NO: 8982 - RNA, 22 nt, Artificial Sequence
  Synthetic
ucgggugcguuggcuccgcugc

SEQ ID NO: 8983 - RNA, 22 nt, Artificial Sequence
  Synthetic
cgggugcguuggcuccgcugcu

SEQ ID NO: 8984 - RNA, 22 nt, Artificial Sequence
  Synthetic
gggugcguuggcuccgcugcug

SEQ ID NO: 8985 - RNA, 22 nt, Artificial Sequence
  Synthetic
ggugcguuggcuccgcugcugg

SEQ ID NO: 8986 - RNA, 22 nt, Artificial Sequence
  Synthetic
gugcguuggcuccgcugcuggc

SEQ ID NO: 8987 - RNA, 22 nt, Artificial Sequence
  Synthetic
ugcguuggcuccgcugcuggcg

SEQ ID NO: 8988 - RNA, 22 nt, Artificial Sequence
  Synthetic
gcguuggcuccgcugcuggcgc

SEQ ID NO: 8989 - RNA, 22 nt, Artificial Sequence
  Synthetic
cguuggcuccgcugcuggcgcc

SEQ ID NO: 8990 - RNA, 22 nt, Artificial Sequence
  Synthetic
guuggcuccgcugcuggcgccg

SEQ ID NO: 8991 - RNA, 22 nt, Artificial Sequence
  Synthetic
uuggcuccgcugcuggcgccgc

SEQ ID NO: 8992 - RNA, 22 nt, Artificial Sequence
  Synthetic
uggcuccgcugcuggcgccgcc

SEQ ID NO: 8993 - RNA, 22 nt, Artificial Sequence
  Synthetic
ggcuccgcugcuggcgccgcca

SEQ ID NO: 8994 - RNA, 22 nt, Artificial Sequence
  Synthetic
gcuccgcugcuggcgccgccaa

SEQ ID NO: 8995 - RNA, 22 nt, Artificial Sequence
  Synthetic
cuccgcugcuggcgccgccaaa

SEQ ID NO: 8996 - RNA, 22 nt, Artificial Sequence
  Synthetic
uccgcugcuggcgccgccaaag

SEQ ID NO: 8997 - RNA, 22 nt, Artificial Sequence
  Synthetic
ccgcugcuggcgccgccaaagc

SEQ ID NO: 8998 - RNA, 22 nt, Artificial Sequence
  Synthetic
cgcugcuggcgccgccaaagcu

SEQ ID NO: 8999 - RNA, 22 nt, Artificial Sequence
  Synthetic
gcugcuggcgccgccaaagcug

SEQ ID NO: 9000 - RNA, 22 nt, Artificial Sequence
  Synthetic
cugcuggcgccgccaaagcugc

SEQ ID NO: 9001 - RNA, 22 nt, Artificial Sequence
  Synthetic
ugcuggcgccgccaaagcugcg

SEQ ID NO: 9002 - RNA, 22 nt, Artificial Sequence
  Synthetic
gcuggcgccgccaaagcugcgc

SEQ ID NO: 9003 - RNA, 22 nt, Artificial Sequence
  Synthetic
cuggcgccgccaaagcugcgcu

SEQ ID NO: 9004 - RNA, 22 nt, Artificial Sequence
  Synthetic
uggcgccgccaaagcugcgcug

SEQ ID NO: 9005 - RNA, 22 nt, Artificial Sequence
  Synthetic
ggcgccgccaaagcugcgcugc

SEQ ID NO: 9006 - RNA, 22 nt, Artificial Sequence
  Synthetic
gcgccgccaaagcugcgcugcg

SEQ ID NO: 9007 - RNA, 22 nt, Artificial Sequence
  Synthetic
cgccgccaaagcugcgcugcgg

SEQ ID NO: 9008 - RNA, 22 nt, Artificial Sequence
  Synthetic
gccgccaaagcugcgcugcggg

SEQ ID NO: 9009 - RNA, 22 nt, Artificial Sequence
  Synthetic
ccgccaaagcugcgcugcgggg

SEQ ID NO: 9010 - RNA, 22 nt, Artificial Sequence
  Synthetic
cgccaaagcugcgcugcggggc

SEQ ID NO: 9011 - RNA, 22 nt, Artificial Sequence
  Synthetic
gccaaagcugcgcugcggggcu

SEQ ID NO: 9012 - RNA, 22 nt, Artificial Sequence
  Synthetic
ccaaagcugcgcugcggggcug

SEQ ID NO: 9013 - RNA, 22 nt, Artificial Sequence
  Synthetic
caaagcugcgcugcggggcugc

SEQ ID NO: 9014 - RNA, 22 nt, Artificial Sequence
  Synthetic
aaagcugcgcugcggggcugcg

SEQ ID NO: 9015 - RNA, 22 nt, Artificial Sequence
  Synthetic
aagcugcgcugcggggcugcgc

SEQ ID NO: 9016 - RNA, 22 nt, Artificial Sequence
  Synthetic
agcugcgcugcggggcugcgcg

SEQ ID NO: 9017 - RNA, 22 nt, Artificial Sequence
  Synthetic
gcugcgcugcggggcugcgcgc

SEQ ID NO: 9018 - RNA, 22 nt, Artificial Sequence
  Synthetic
cugcgcugcggggcugcgcgcg

SEQ ID NO: 9019 - RNA, 22 nt, Artificial Sequence
  Synthetic
ugcgcugcggggcugcgcgcgc

SEQ ID NO: 9020 - RNA, 22 nt, Artificial Sequence
  Synthetic
gcgcugcggggcugcgcgcgcg

SEQ ID NO: 9021 - RNA, 22 nt, Artificial Sequence
  Synthetic
cgcugcggggcugcgcgcgcgc

SEQ ID NO: 9022 - RNA, 22 nt, Artificial Sequence
  Synthetic
gcugcggggcugcgcgcgcgcg

SEQ ID NO: 9023 - RNA, 22 nt, Artificial Sequence
  Synthetic
cugcggggcugcgcgcgcgcga

SEQ ID NO: 9024 - RNA, 22 nt, Artificial Sequence
  Synthetic
ugcggggcugcgcgcgcgcgaa

SEQ ID NO: 9025 - RNA, 22 nt, Artificial Sequence
  Synthetic
gcggggcugcgcgcgcgcgaag

SEQ ID NO: 9026 - RNA, 22 nt, Artificial Sequence
  Synthetic
cggggcugcgcgcgcgcgaagc

SEQ ID NO: 9027 - RNA, 22 nt, Artificial Sequence
  Synthetic
ggggcugcgcgcgcgcgaagca

SEQ ID NO: 9028 - RNA, 22 nt, Artificial Sequence
  Synthetic
gggcugcgcgcgcgcgaagcaa

SEQ ID NO: 9029 - RNA, 22 nt, Artificial Sequence
  Synthetic
ggcugcgcgcgcgcgaagcaag

SEQ ID NO: 9030 - RNA, 22 nt, Artificial Sequence
  Synthetic
gcugcgcgcgcgcgaagcaagg

SEQ ID NO: 9031 - RNA, 22 nt, Artificial Sequence
  Synthetic
cugcgcgcgcgcgaagcaaggg

SEQ ID NO: 9032 - RNA, 22 nt, Artificial Sequence
  Synthetic
ugcgcgcgcgcgaagcaagggg

SEQ ID NO: 9033 - RNA, 22 nt, Artificial Sequence
  Synthetic
gcgcgcgcgcgaagcaaggggg

SEQ ID NO: 9034 - RNA, 22 nt, Artificial Sequence
  Synthetic
cgcgcgcgcgaagcaagggggc

SEQ ID NO: 9035 - RNA, 22 nt, Artificial Sequence
  Synthetic
gcgcgcgcgaagcaagggggca

SEQ ID NO: 9036 - RNA, 22 nt, Artificial Sequence
  Synthetic
cgcgcgcgaagcaagggggcag

SEQ ID NO: 9037 - RNA, 22 nt, Artificial Sequence
  Synthetic
gcgcgcgaagcaagggggcagu

SEQ ID NO: 9038 - RNA, 22 nt, Artificial Sequence
  Synthetic
cgcgcgaagcaagggggcagug

SEQ ID NO: 9039 - RNA, 22 nt, Artificial Sequence
  Synthetic
gcgcgaagcaagggggcagugg

SEQ ID NO: 9040 - RNA, 22 nt, Artificial Sequence
  Synthetic
cgcgaagcaagggggcaguggg

SEQ ID NO: 9041 - RNA, 22 nt, Artificial Sequence
  Synthetic
gcgaagcaagggggcaguggga

SEQ ID NO: 9042 - RNA, 22 nt, Artificial Sequence
  Synthetic
cgaagcaagggggcagugggag

SEQ ID NO: 9043 - RNA, 22 nt, Artificial Sequence
  Synthetic
gaagcaagggggcagugggagg

SEQ ID NO: 9044 - RNA, 22 nt, Artificial Sequence
  Synthetic
aagcaagggggcagugggaggc

SEQ ID NO: 9045 - RNA, 22 nt, Artificial Sequence
  Synthetic
agcaagggggcagugggaggcu

SEQ ID NO: 9046 - RNA, 22 nt, Artificial Sequence
  Synthetic
gcaagggggcagugggaggcuc

SEQ ID NO: 9047 - RNA, 22 nt, Artificial Sequence
  Synthetic
caagggggcagugggaggcucc

SEQ ID NO: 9048 - RNA, 22 nt, Artificial Sequence
  Synthetic
aagggggcagugggaggcuccu

SEQ ID NO: 9049 - RNA, 22 nt, Artificial Sequence
  Synthetic
agggggcagugggaggcuccug

SEQ ID NO: 9050 - RNA, 22 nt, Artificial Sequence
  Synthetic
gggggcagugggaggcuccugg

SEQ ID NO: 9051 - RNA, 22 nt, Artificial Sequence
  Synthetic
ggggcagugggaggcuccuggc

SEQ ID NO: 9052 - RNA, 22 nt, Artificial Sequence
  Synthetic
gggcagugggaggcuccuggcg

SEQ ID NO: 9053 - RNA, 22 nt, Artificial Sequence
  Synthetic
ggcagugggaggcuccuggcgu

SEQ ID NO: 9054 - RNA, 22 nt, Artificial Sequence
  Synthetic
gcagugggaggcuccuggcguu

SEQ ID NO: 9055 - RNA, 22 nt, Artificial Sequence
  Synthetic
cagugggaggcuccuggcguuc

SEQ ID NO: 9056 - RNA, 22 nt, Artificial Sequence
  Synthetic
agugggaggcuccuggcguucc

SEQ ID NO: 9057 - RNA, 22 nt, Artificial Sequence
  Synthetic
gugggaggcuccuggcguuccc

SEQ ID NO: 9058 - RNA, 22 nt, Artificial Sequence
  Synthetic
ugggaggcuccuggcguucccc

SEQ ID NO: 9059 - RNA, 22 nt, Artificial Sequence
  Synthetic
gggaggcuccuggcguuccccu

SEQ ID NO: 9060 - RNA, 22 nt, Artificial Sequence
  Synthetic
ggaggcuccuggcguuccccuu

SEQ ID NO: 9061 - RNA, 22 nt, Artificial Sequence
  Synthetic
gaggcuccuggcguuccccuuu

SEQ ID NO: 9062 - RNA, 22 nt, Artificial Sequence
  Synthetic
aggcuccuggcguuccccuuua

SEQ ID NO: 9063 - RNA, 22 nt, Artificial Sequence
  Synthetic
ggcuccuggcguuccccuuuaa

SEQ ID NO: 9064 - RNA, 22 nt, Artificial Sequence
  Synthetic
gcuccuggcguuccccuuuaac

SEQ ID NO: 9065 - RNA, 22 nt, Artificial Sequence
  Synthetic
cuccuggcguuccccuuuaacg

SEQ ID NO: 9066 - RNA, 22 nt, Artificial Sequence
  Synthetic
uccuggcguuccccuuuaacgg

SEQ ID NO: 9067 - RNA, 22 nt, Artificial Sequence
  Synthetic
ccuggcguuccccuuuaacggg

SEQ ID NO: 9068 - RNA, 22 nt, Artificial Sequence
  Synthetic
cuggcguuccccuuuaacggga

SEQ ID NO: 9069 - RNA, 22 nt, Artificial Sequence
  Synthetic
uggcguuccccuuuaacgggaa

SEQ ID NO: 9070 - RNA, 22 nt, Artificial Sequence
  Synthetic
ggcguuccccuuuaacgggaac

SEQ ID NO: 9071 - RNA, 22 nt, Artificial Sequence
  Synthetic
gcguuccccuuuaacgggaaca

SEQ ID NO: 9072 - RNA, 22 nt, Artificial Sequence
  Synthetic
cguuccccuuuaacgggaacaa

SEQ ID NO: 9073 - RNA, 22 nt, Artificial Sequence
  Synthetic
guuccccuuuaacgggaacaac

SEQ ID NO: 9074 - RNA, 22 nt, Artificial Sequence
  Synthetic
uuccccuuuaacgggaacaacg

SEQ ID NO: 9075 - RNA, 22 nt, Artificial Sequence
  Synthetic
uccccuuuaacgggaacaacgc

SEQ ID NO: 9076 - RNA, 22 nt, Artificial Sequence
  Synthetic
ccccuuuaacgggaacaacgcc

SEQ ID NO: 9077 - RNA, 22 nt, Artificial Sequence
  Synthetic
cccuuuaacgggaacaacgccc

SEQ ID NO: 9078 - RNA, 22 nt, Artificial Sequence
  Synthetic
ccuuuaacgggaacaacgcccu

SEQ ID NO: 9079 - RNA, 22 nt, Artificial Sequence
  Synthetic
cuuuaacgggaacaacgcccug

SEQ ID NO: 9080 - RNA, 22 nt, Artificial Sequence
  Synthetic
uuuaacgggaacaacgcccugu

SEQ ID NO: 9081 - RNA, 22 nt, Artificial Sequence
  Synthetic
uuaacgggaacaacgcccuguu

SEQ ID NO: 9082 - RNA, 22 nt, Artificial Sequence
  Synthetic
uaacgggaacaacgcccuguuu

SEQ ID NO: 9083 - RNA, 22 nt, Artificial Sequence
  Synthetic
aacgggaacaacgcccuguuug

SEQ ID NO: 9084 - RNA, 22 nt, Artificial Sequence
  Synthetic
acgggaacaacgcccuguuugc

SEQ ID NO: 9085 - RNA, 22 nt, Artificial Sequence
  Synthetic
cgggaacaacgcccuguuugcg

SEQ ID NO: 9086 - RNA, 22 nt, Artificial Sequence
  Synthetic
gggaacaacgcccuguuugcgu

SEQ ID NO: 9087 - RNA, 22 nt, Artificial Sequence
  Synthetic
ggaacaacgcccuguuugcguc

SEQ ID NO: 9088 - RNA, 22 nt, Artificial Sequence
  Synthetic
gaacaacgcccuguuugcgucg

SEQ ID NO: 9089 - RNA, 22 nt, Artificial Sequence
  Synthetic
aacaacgcccuguuugcgucgc

SEQ ID NO: 9090 - RNA, 22 nt, Artificial Sequence
  Synthetic
acaacgcccuguuugcgucgcu

SEQ ID NO: 9091 - RNA, 22 nt, Artificial Sequence
  Synthetic
caacgcccuguuugcgucgcug

SEQ ID NO: 9092 - RNA, 22 nt, Artificial Sequence
  Synthetic
aacgcccuguuugcgucgcugc

SEQ ID NO: 9093 - RNA, 22 nt, Artificial Sequence
  Synthetic
acgcccuguuugcgucgcugca

SEQ ID NO: 9094 - RNA, 22 nt, Artificial Sequence
  Synthetic
cgcccuguuugcgucgcugcag

SEQ ID NO: 9095 - RNA, 22 nt, Artificial Sequence
  Synthetic
gcccuguuugcgucgcugcagu

SEQ ID NO: 9096 - RNA, 22 nt, Artificial Sequence
  Synthetic
cccuguuugcgucgcugcagua

SEQ ID NO: 9097 - RNA, 22 nt, Artificial Sequence
  Synthetic
ccuguuugcgucgcugcaguag

SEQ ID NO: 9098 - RNA, 22 nt, Artificial Sequence
  Synthetic
cuguuugcgucgcugcaguagg

SEQ ID NO: 9099 - RNA, 22 nt, Artificial Sequence
  Synthetic
uguuugcgucgcugcaguaggg

SEQ ID NO: 9100 - RNA, 22 nt, Artificial Sequence
  Synthetic
guuugcgucgcugcaguagggu

SEQ ID NO: 9101 - RNA, 22 nt, Artificial Sequence
  Synthetic
uuugcgucgcugcaguagggug

SEQ ID NO: 9102 - RNA, 22 nt, Artificial Sequence
  Synthetic
uugcgucgcugcaguagggugu

SEQ ID NO: 9103 - RNA, 22 nt, Artificial Sequence
  Synthetic
ugcgucgcugcaguagggugug

SEQ ID NO: 9104 - RNA, 22 nt, Artificial Sequence
  Synthetic
gcgucgcugcaguagggugugu

SEQ ID NO: 9105 - RNA, 22 nt, Artificial Sequence
  Synthetic
cgucgcugcaguaggguguguc

SEQ ID NO: 9106 - RNA, 22 nt, Artificial Sequence
  Synthetic
gucgcugcaguagggugugucc

SEQ ID NO: 9107 - RNA, 22 nt, Artificial Sequence
  Synthetic
ucgcugcaguaggguguguccc

SEQ ID NO: 9108 - RNA, 22 nt, Artificial Sequence
  Synthetic
cgcugcaguagggugugucccu

SEQ ID NO: 9109 - RNA, 22 nt, Artificial Sequence
  Synthetic
gcugcaguagggugugucccug

SEQ ID NO: 9110 - RNA, 22 nt, Artificial Sequence
  Synthetic
cugcaguagggugugucccugg

SEQ ID NO: 9111 - RNA, 22 nt, Artificial Sequence
  Synthetic
ugcaguagggugugucccuggg

SEQ ID NO: 9112 - RNA, 22 nt, Artificial Sequence
  Synthetic
gcaguagggugugucccugggu

SEQ ID NO: 9113 - RNA, 22 nt, Artificial Sequence
  Synthetic
caguagggugugucccuggguc

SEQ ID NO: 9114 - RNA, 22 nt, Artificial Sequence
  Synthetic
aguagggugugucccuggguca

SEQ ID NO: 9115 - RNA, 22 nt, Artificial Sequence
  Synthetic
guagggugugucccugggucag

SEQ ID NO: 9116 - RNA, 22 nt, Artificial Sequence
  Synthetic
uagggugugucccugggucagc

SEQ ID NO: 9117 - RNA, 22 nt, Artificial Sequence
  Synthetic
agggugugucccugggucagcg

SEQ ID NO: 9118 - RNA, 22 nt, Artificial Sequence
  Synthetic
gggugugucccugggucagcgu

SEQ ID NO: 9119 - RNA, 22 nt, Artificial Sequence
  Synthetic
ggugugucccugggucagcgug

SEQ ID NO: 9120 - RNA, 22 nt, Artificial Sequence
  Synthetic
gugugucccugggucagcgugu

SEQ ID NO: 9121 - RNA, 22 nt, Artificial Sequence
  Synthetic
ugugucccugggucagcgugug

SEQ ID NO: 9122 - RNA, 22 nt, Artificial Sequence
  Synthetic
gugucccugggucagcgugugc

SEQ ID NO: 9123 - RNA, 22 nt, Artificial Sequence
  Synthetic
ugucccugggucagcgugugcg

SEQ ID NO: 9124 - RNA, 22 nt, Artificial Sequence
  Synthetic
gucccugggucagcgugugcgg

SEQ ID NO: 9125 - RNA, 22 nt, Artificial Sequence
  Synthetic
ucccugggucagcgugugcggg

SEQ ID NO: 9126 - RNA, 22 nt, Artificial Sequence
  Synthetic
cccugggucagcgugugcggga

SEQ ID NO: 9127 - RNA, 22 nt, Artificial Sequence
  Synthetic
ccugggucagcgugugcgggag

SEQ ID NO: 9128 - RNA, 22 nt, Artificial Sequence
  Synthetic
cugggucagcgugugcgggagg

SEQ ID NO: 9129 - RNA, 22 nt, Artificial Sequence
  Synthetic
ugggucagcgugugcgggaggg

SEQ ID NO: 9130 - RNA, 22 nt, Artificial Sequence
  Synthetic
gggucagcgugugcgggagggc

SEQ ID NO: 9131 - RNA, 22 nt, Artificial Sequence
  Synthetic
ggucagcgugugcgggagggcg

SEQ ID NO: 9132 - RNA, 22 nt, Artificial Sequence
  Synthetic
gucagcgugugcgggagggcgg

SEQ ID NO: 9133 - RNA, 22 nt, Artificial Sequence
  Synthetic
ucagcgugugcgggagggcggg

SEQ ID NO: 9134 - RNA, 22 nt, Artificial Sequence
  Synthetic
cagcgugugcgggagggcggga

SEQ ID NO: 9135 - RNA, 22 nt, Artificial Sequence
  Synthetic
agcgugugcgggagggcgggac

SEQ ID NO: 9136 - RNA, 22 nt, Artificial Sequence
  Synthetic
gcgugugcgggagggcgggacu

SEQ ID NO: 9137 - RNA, 22 nt, Artificial Sequence
  Synthetic
cgugugcgggagggcgggacuc

SEQ ID NO: 9138 - RNA, 22 nt, Artificial Sequence
  Synthetic
gugugcgggagggcgggacuca

SEQ ID NO: 9139 - RNA, 22 nt, Artificial Sequence
  Synthetic
ugugcgggagggcgggacucag

SEQ ID NO: 9140 - RNA, 22 nt, Artificial Sequence
  Synthetic
gugcgggagggcgggacucagg

SEQ ID NO: 9141 - RNA, 22 nt, Artificial Sequence
  Synthetic
ugcgggagggcgggacucaggg

SEQ ID NO: 9142 - RNA, 22 nt, Artificial Sequence
  Synthetic
gcgggagggcgggacucaggga

SEQ ID NO: 9143 - RNA, 22 nt, Artificial Sequence
  Synthetic
cgggagggcgggacucagggag

SEQ ID NO: 9144 - RNA, 22 nt, Artificial Sequence
  Synthetic
gggagggcgggacucagggagg

SEQ ID NO: 9145 - RNA, 22 nt, Artificial Sequence
  Synthetic
ggagggcgggacucagggagga

SEQ ID NO: 9146 - RNA, 22 nt, Artificial Sequence
  Synthetic
gagggcgggacucagggaggag

SEQ ID NO: 9147 - RNA, 22 nt, Artificial Sequence
  Synthetic
agggcgggacucagggaggaga

SEQ ID NO: 9148 - RNA, 22 nt, Artificial Sequence
  Synthetic
gggcgggacucagggaggagag

SEQ ID NO: 9149 - RNA, 22 nt, Artificial Sequence
  Synthetic
ggcgggacucagggaggagagg

SEQ ID NO: 9150 - RNA, 22 nt, Artificial Sequence
  Synthetic
gcgggacucagggaggagaggg

SEQ ID NO: 9151 - RNA, 22 nt, Artificial Sequence
  Synthetic
cgggacucagggaggagagggg

SEQ ID NO: 9152 - RNA, 22 nt, Artificial Sequence
  Synthetic
gggacucagggaggagaggggg

SEQ ID NO: 9153 - RNA, 22 nt, Artificial Sequence
  Synthetic
ggacucagggaggagagggggc

SEQ ID NO: 9154 - RNA, 22 nt, Artificial Sequence
  Synthetic
gacucagggaggagagggggca

SEQ ID NO: 9155 - RNA, 22 nt, Artificial Sequence
  Synthetic
acucagggaggagagggggcag

SEQ ID NO: 9156 - RNA, 22 nt, Artificial Sequence
  Synthetic
cucagggaggagagggggcagg

SEQ ID NO: 9157 - RNA, 22 nt, Artificial Sequence
  Synthetic
ucagggaggagagggggcagga

SEQ ID NO: 9158 - RNA, 22 nt, Artificial Sequence
  Synthetic
cagggaggagagggggcaggag

SEQ ID NO: 9159 - RNA, 22 nt, Artificial Sequence
  Synthetic
agggaggagagggggcaggaga

SEQ ID NO: 9160 - RNA, 22 nt, Artificial Sequence
  Synthetic
gggaggagagggggcaggagag

SEQ ID NO: 9161 - RNA, 22 nt, Artificial Sequence
  Synthetic
ggaggagagggggcaggagaga

SEQ ID NO: 9162 - RNA, 22 nt, Artificial Sequence
  Synthetic
gaggagagggggcaggagagag

SEQ ID NO: 9163 - RNA, 22 nt, Artificial Sequence
  Synthetic
aggagagggggcaggagagagg

SEQ ID NO: 9164 - RNA, 22 nt, Artificial Sequence
  Synthetic
ggagagggggcaggagagaggg

SEQ ID NO: 9165 - RNA, 22 nt, Artificial Sequence
  Synthetic
gagagggggcaggagagaggga

SEQ ID NO: 9166 - RNA, 22 nt, Artificial Sequence
  Synthetic
agagggggcaggagagagggag

SEQ ID NO: 9167 - RNA, 22 nt, Artificial Sequence
  Synthetic
gagggggcaggagagagggagg

SEQ ID NO: 9168 - RNA, 22 nt, Artificial Sequence
  Synthetic
agggggcaggagagagggaggg

SEQ ID NO: 9169 - RNA, 22 nt, Artificial Sequence
  Synthetic
gggggcaggagagagggagggc

SEQ ID NO: 9170 - RNA, 22 nt, Artificial Sequence
  Synthetic
ggggcaggagagagggagggca

SEQ ID NO: 9171 - RNA, 22 nt, Artificial Sequence
  Synthetic
gggcaggagagagggagggcag

SEQ ID NO: 9172 - RNA, 22 nt, Artificial Sequence
  Synthetic
ggcaggagagagggagggcagg

SEQ ID NO: 9173 - RNA, 22 nt, Artificial Sequence
  Synthetic
gcaggagagagggagggcagga

SEQ ID NO: 9174 - RNA, 22 nt, Artificial Sequence
  Synthetic
caggagagagggagggcaggag

SEQ ID NO: 9175 - RNA, 22 nt, Artificial Sequence
  Synthetic
aggagagagggagggcaggaga

SEQ ID NO: 9176 - RNA, 22 nt, Artificial Sequence
  Synthetic
ggagagagggagggcaggagac

SEQ ID NO: 9177 - RNA, 22 nt, Artificial Sequence
  Synthetic
gagagagggagggcaggagaca

SEQ ID NO: 9178 - RNA, 22 nt, Artificial Sequence
  Synthetic
agagagggagggcaggagacag

SEQ ID NO: 9179 - RNA, 22 nt, Artificial Sequence
  Synthetic
gagagggagggcaggagacagu

SEQ ID NO: 9180 - RNA, 22 nt, Artificial Sequence
  Synthetic
agagggagggcaggagacaguc

SEQ ID NO: 9181 - RNA, 22 nt, Artificial Sequence
  Synthetic
gagggagggcaggagacaguca

SEQ ID NO: 9182 - RNA, 22 nt, Artificial Sequence
  Synthetic
agggagggcaggagacagucac

SEQ ID NO: 9183 - RNA, 22 nt, Artificial Sequence
  Synthetic
gggagggcaggagacagucacu

SEQ ID NO: 9184 - RNA, 22 nt, Artificial Sequence
  Synthetic
ggagggcaggagacagucacuu

SEQ ID NO: 9185 - RNA, 22 nt, Artificial Sequence
  Synthetic
gagggcaggagacagucacuug

SEQ ID NO: 9186 - RNA, 22 nt, Artificial Sequence
  Synthetic
agggcaggagacagucacuugg

SEQ ID NO: 9187 - RNA, 22 nt, Artificial Sequence
  Synthetic
gggcaggagacagucacuuggc

SEQ ID NO: 9188 - RNA, 22 nt, Artificial Sequence
  Synthetic
ggcaggagacagucacuuggcc

SEQ ID NO: 9189 - RNA, 22 nt, Artificial Sequence
  Synthetic
gcaggagacagucacuuggccu

SEQ ID NO: 9190 - RNA, 22 nt, Artificial Sequence
  Synthetic
caggagacagucacuuggccuu

SEQ ID NO: 9191 - RNA, 22 nt, Artificial Sequence
  Synthetic
aggagacagucacuuggccuua

SEQ ID NO: 9192 - RNA, 22 nt, Artificial Sequence
  Synthetic
ggagacagucacuuggccuuaa

SEQ ID NO: 9193 - RNA, 22 nt, Artificial Sequence
  Synthetic
gagacagucacuuggccuuaaa

SEQ ID NO: 9194 - RNA, 22 nt, Artificial Sequence
  Synthetic
agacagucacuuggccuuaaau

SEQ ID NO: 9195 - RNA, 22 nt, Artificial Sequence
  Synthetic
gacagucacuuggccuuaaaug

SEQ ID NO: 9196 - RNA, 22 nt, Artificial Sequence
  Synthetic
acagucacuuggccuuaaaugc

SEQ ID NO: 9197 - RNA, 22 nt, Artificial Sequence
  Synthetic
cagucacuuggccuuaaaugcg

SEQ ID NO: 9198 - RNA, 22 nt, Artificial Sequence
  Synthetic
agucacuuggccuuaaaugcgc

SEQ ID NO: 9199 - RNA, 22 nt, Artificial Sequence
  Synthetic
gucacuuggccuuaaaugcgcc

SEQ ID NO: 9200 - RNA, 22 nt, Artificial Sequence
  Synthetic
ucacuuggccuuaaaugcgccu

SEQ ID NO: 9201 - RNA, 22 nt, Artificial Sequence
  Synthetic
cacuuggccuuaaaugcgccuc

SEQ ID NO: 9202 - RNA, 22 nt, Artificial Sequence
  Synthetic
acuuggccuuaaaugcgccuca

SEQ ID NO: 9203 - RNA, 22 nt, Artificial Sequence
  Synthetic
cuuggccuuaaaugcgccucaa

SEQ ID NO: 9204 - RNA, 22 nt, Artificial Sequence
  Synthetic
uuggccuuaaaugcgccucaag

SEQ ID NO: 9205 - RNA, 22 nt, Artificial Sequence
  Synthetic
uggccuuaaaugcgccucaaga

SEQ ID NO: 9206 - RNA, 22 nt, Artificial Sequence
  Synthetic
ggccuuaaaugcgccucaagaa

SEQ ID NO: 9207 - RNA, 22 nt, Artificial Sequence
  Synthetic
gccuuaaaugcgccucaagaaa

SEQ ID NO: 9208 - RNA, 22 nt, Artificial Sequence
  Synthetic
ccuuaaaugcgccucaagaaaa

SEQ ID NO: 9209 - RNA, 22 nt, Artificial Sequence
  Synthetic
cuuaaaugcgccucaagaaaaa

SEQ ID NO: 9210 - RNA, 22 nt, Artificial Sequence
  Synthetic
uuaaaugcgccucaagaaaaag

SEQ ID NO: 9211 - RNA, 22 nt, Artificial Sequence
  Synthetic
uaaaugcgccucaagaaaaagu

SEQ ID NO: 9212 - RNA, 22 nt, Artificial Sequence
  Synthetic
aaaugcgccucaagaaaaaguc

SEQ ID NO: 9213 - RNA, 22 nt, Artificial Sequence
  Synthetic
aaugcgccucaagaaaaagucg

SEQ ID NO: 9214 - RNA, 22 nt, Artificial Sequence
  Synthetic
augcgccucaagaaaaagucgg

SEQ ID NO: 9215 - RNA, 22 nt, Artificial Sequence
  Synthetic
ugcgccucaagaaaaagucggu

SEQ ID NO: 9216 - RNA, 22 nt, Artificial Sequence
  Synthetic
gcgccucaagaaaaagucgguc

SEQ ID NO: 9217 - RNA, 22 nt, Artificial Sequence
  Synthetic
cgccucaagaaaaagucggucc

SEQ ID NO: 9218 - RNA, 22 nt, Artificial Sequence
  Synthetic
gccucaagaaaaagucgguccc

SEQ ID NO: 9219 - RNA, 22 nt, Artificial Sequence
  Synthetic
ccucaagaaaaagucggucccu

SEQ ID NO: 9220 - RNA, 22 nt, Artificial Sequence
  Synthetic
cucaagaaaaagucggucccug

SEQ ID NO: 9221 - RNA, 22 nt, Artificial Sequence
  Synthetic
ucaagaaaaagucggucccugc

SEQ ID NO: 9222 - RNA, 22 nt, Artificial Sequence
  Synthetic
caagaaaaagucggucccugca

SEQ ID NO: 9223 - RNA, 22 nt, Artificial Sequence
  Synthetic
aagaaaaagucggucccugcaa

SEQ ID NO: 9224 - RNA, 22 nt, Artificial Sequence
  Synthetic
agaaaaagucggucccugcaaa

SEQ ID NO: 9225 - RNA, 22 nt, Artificial Sequence
  Synthetic
gaaaaagucggucccugcaaaa

SEQ ID NO: 9226 - RNA, 22 nt, Artificial Sequence
  Synthetic
aaaaagucggucccugcaaaac

SEQ ID NO: 9227 - RNA, 22 nt, Artificial Sequence
  Synthetic
aaaagucggucccugcaaaacc

SEQ ID NO: 9228 - RNA, 22 nt, Artificial Sequence
  Synthetic
aaagucggucccugcaaaaccg

SEQ ID NO: 9229 - RNA, 22 nt, Artificial Sequence
  Synthetic
aagucggucccugcaaaaccgc

SEQ ID NO: 9230 - RNA, 22 nt, Artificial Sequence
  Synthetic
agucggucccugcaaaaccgcg

SEQ ID NO: 9231 - RNA, 22 nt, Artificial Sequence
  Synthetic
gucggucccugcaaaaccgcgg

SEQ ID NO: 9232 - RNA, 22 nt, Artificial Sequence
  Synthetic
ucggucccugcaaaaccgcggc

SEQ ID NO: 9233 - RNA, 22 nt, Artificial Sequence
  Synthetic
cggucccugcaaaaccgcggcg

SEQ ID NO: 9234 - RNA, 22 nt, Artificial Sequence
  Synthetic
ggucccugcaaaaccgcggcga

SEQ ID NO: 9235 - RNA, 22 nt, Artificial Sequence
  Synthetic
gucccugcaaaaccgcggcgac

SEQ ID NO: 9236 - RNA, 22 nt, Artificial Sequence
  Synthetic
ucccugcaaaaccgcggcgacu

SEQ ID NO: 9237 - RNA, 22 nt, Artificial Sequence
  Synthetic
cccugcaaaaccgcggcgacuu

SEQ ID NO: 9238 - RNA, 22 nt, Artificial Sequence
  Synthetic
ccugcaaaaccgcggcgacuuu

SEQ ID NO: 9239 - RNA, 22 nt, Artificial Sequence
  Synthetic
cugcaaaaccgcggcgacuuuu

SEQ ID NO: 9240 - RNA, 22 nt, Artificial Sequence
  Synthetic
ugcaaaaccgcggcgacuuuua

SEQ ID NO: 9241 - RNA, 22 nt, Artificial Sequence
  Synthetic
gcaaaaccgcggcgacuuuuac

SEQ ID NO: 9242 - RNA, 22 nt, Artificial Sequence
  Synthetic
caaaaccgcggcgacuuuuacu

SEQ ID NO: 9243 - RNA, 22 nt, Artificial Sequence
  Synthetic
aaaaccgcggcgacuuuuacuc

SEQ ID NO: 9244 - RNA, 22 nt, Artificial Sequence
  Synthetic
aaaccgcggcgacuuuuacucg

SEQ ID NO: 9245 - RNA, 22 nt, Artificial Sequence
  Synthetic
aaccgcggcgacuuuuacucga

SEQ ID NO: 9246 - RNA, 22 nt, Artificial Sequence
  Synthetic
accgcggcgacuuuuacucgaa

SEQ ID NO: 9247 - RNA, 22 nt, Artificial Sequence
  Synthetic
ccgcggcgacuuuuacucgaaa

SEQ ID NO: 9248 - RNA, 22 nt, Artificial Sequence
  Synthetic
cgcggcgacuuuuacucgaaac

SEQ ID NO: 9249 - RNA, 22 nt, Artificial Sequence
  Synthetic
gcggcgacuuuuacucgaaacc

SEQ ID NO: 9250 - RNA, 22 nt, Artificial Sequence
  Synthetic
cggcgacuuuuacucgaaacca

SEQ ID NO: 9251 - RNA, 22 nt, Artificial Sequence
  Synthetic
ggcgacuuuuacucgaaaccag

SEQ ID NO: 9252 - RNA, 22 nt, Artificial Sequence
  Synthetic
gcgacuuuuacucgaaaccaga

SEQ ID NO: 9253 - RNA, 22 nt, Artificial Sequence
  Synthetic
cgacuuuuacucgaaaccagag

SEQ ID NO: 9254 - RNA, 22 nt, Artificial Sequence
  Synthetic
gacuuuuacucgaaaccagagg

SEQ ID NO: 9255 - RNA, 22 nt, Artificial Sequence
  Synthetic
acuuuuacucgaaaccagaggc

SEQ ID NO: 9256 - RNA, 22 nt, Artificial Sequence
  Synthetic
cuuuuacucgaaaccagaggcg

SEQ ID NO: 9257 - RNA, 22 nt, Artificial Sequence
  Synthetic
uuuuacucgaaaccagaggcgg

SEQ ID NO: 9258 - RNA, 22 nt, Artificial Sequence
  Synthetic
uuuacucgaaaccagaggcggc

SEQ ID NO: 9259 - RNA, 22 nt, Artificial Sequence
  Synthetic
uuacucgaaaccagaggcggcu

SEQ ID NO: 9260 - RNA, 22 nt, Artificial Sequence
  Synthetic
uacucgaaaccagaggcggcug

SEQ ID NO: 9261 - RNA, 22 nt, Artificial Sequence
  Synthetic
acucgaaaccagaggcggcuga

SEQ ID NO: 9262 - RNA, 22 nt, Artificial Sequence
  Synthetic
cucgaaaccagaggcggcugag

SEQ ID NO: 9263 - RNA, 22 nt, Artificial Sequence
  Synthetic
ucgaaaccagaggcggcugagc

SEQ ID NO: 9264 - RNA, 22 nt, Artificial Sequence
  Synthetic
cgaaaccagaggcggcugagcu

SEQ ID NO: 9265 - RNA, 22 nt, Artificial Sequence
  Synthetic
gaaaccagaggcggcugagcuu

SEQ ID NO: 9266 - RNA, 22 nt, Artificial Sequence
  Synthetic
aaaccagaggcggcugagcuuu

SEQ ID NO: 9267 - RNA, 22 nt, Artificial Sequence
  Synthetic
aaccagaggcggcugagcuuuc

SEQ ID NO: 9268 - RNA, 22 nt, Artificial Sequence
  Synthetic
accagaggcggcugagcuuucu

SEQ ID NO: 9269 - RNA, 22 nt, Artificial Sequence
  Synthetic
ccagaggcggcugagcuuucuc

SEQ ID NO: 9270 - RNA, 22 nt, Artificial Sequence
  Synthetic
cagaggcggcugagcuuucuca

SEQ ID NO: 9271 - RNA, 22 nt, Artificial Sequence
  Synthetic
agaggcggcugagcuuucucac

SEQ ID NO: 9272 - RNA, 22 nt, Artificial Sequence
  Synthetic
gaggcggcugagcuuucucacc

SEQ ID NO: 9273 - RNA, 22 nt, Artificial Sequence
  Synthetic
aggcggcugagcuuucucaccu

SEQ ID NO: 9274 - RNA, 22 nt, Artificial Sequence
  Synthetic
ggcggcugagcuuucucaccuc

SEQ ID NO: 9275 - RNA, 22 nt, Artificial Sequence
  Synthetic
gcggcugagcuuucucaccucc

SEQ ID NO: 9276 - RNA, 22 nt, Artificial Sequence
  Synthetic
cggcugagcuuucucaccuccc

SEQ ID NO: 9277 - RNA, 22 nt, Artificial Sequence
  Synthetic
ggcugagcuuucucaccuccca

SEQ ID NO: 9278 - RNA, 22 nt, Artificial Sequence
  Synthetic
gcugagcuuucucaccucccac

SEQ ID NO: 9279 - RNA, 22 nt, Artificial Sequence
  Synthetic
cugagcuuucucaccucccacc

SEQ ID NO: 9280 - RNA, 22 nt, Artificial Sequence
  Synthetic
ugagcuuucucaccucccaccu

SEQ ID NO: 9281 - RNA, 22 nt, Artificial Sequence
  Synthetic
gagcuuucucaccucccaccuc

SEQ ID NO: 9282 - RNA, 22 nt, Artificial Sequence
  Synthetic
agcuuucucaccucccaccucc

SEQ ID NO: 9283 - RNA, 22 nt, Artificial Sequence
  Synthetic
gcuuucucaccucccaccuccc

SEQ ID NO: 9284 - RNA, 22 nt, Artificial Sequence
  Synthetic
cuuucucaccucccaccucccu

SEQ ID NO: 9285 - RNA, 22 nt, Artificial Sequence
  Synthetic
uuucucaccucccaccucccuu

SEQ ID NO: 9286 - RNA, 22 nt, Artificial Sequence
  Synthetic
uucucaccucccaccucccuuc

SEQ ID NO: 9287 - RNA, 22 nt, Artificial Sequence
  Synthetic
ucucaccucccaccucccuucu

SEQ ID NO: 9288 - RNA, 22 nt, Artificial Sequence
  Synthetic
cucaccucccaccucccuucuc

SEQ ID NO: 9289 - RNA, 22 nt, Artificial Sequence
  Synthetic
ucaccucccaccucccuucucc

SEQ ID NO: 9290 - RNA, 22 nt, Artificial Sequence
  Synthetic
caccucccaccucccuucuccc

SEQ ID NO: 9291 - RNA, 22 nt, Artificial Sequence
  Synthetic
accucccaccucccuucucccc

SEQ ID NO: 9292 - RNA, 22 nt, Artificial Sequence
  Synthetic
ccucccaccucccuucuccccu

SEQ ID NO: 9293 - RNA, 22 nt, Artificial Sequence
  Synthetic
cucccaccucccuucuccccug

SEQ ID NO: 9294 - RNA, 22 nt, Artificial Sequence
  Synthetic
ucccaccucccuucuccccugg

SEQ ID NO: 9295 - RNA, 22 nt, Artificial Sequence
  Synthetic
cccaccucccuucuccccuggc

SEQ ID NO: 9296 - RNA, 22 nt, Artificial Sequence
  Synthetic
ccaccucccuucuccccuggcc

SEQ ID NO: 9297 - RNA, 22 nt, Artificial Sequence
  Synthetic
caccucccuucuccccuggccc

SEQ ID NO: 9298 - RNA, 22 nt, Artificial Sequence
  Synthetic
accucccuucuccccuggcccc

SEQ ID NO: 9299 - RNA, 22 nt, Artificial Sequence
  Synthetic
ccucccuucuccccuggccccg

SEQ ID NO: 9300 - RNA, 22 nt, Artificial Sequence
  Synthetic
cucccuucuccccuggccccgu

SEQ ID NO: 9301 - RNA, 22 nt, Artificial Sequence
  Synthetic
ucccuucuccccuggccccgug

SEQ ID NO: 9302 - RNA, 22 nt, Artificial Sequence
  Synthetic
cccuucuccccuggccccgugg

SEQ ID NO: 9303 - RNA, 22 nt, Artificial Sequence
  Synthetic
ccuucuccccuggccccgugga

SEQ ID NO: 9304 - RNA, 22 nt, Artificial Sequence
  Synthetic
cuucuccccuggccccguggag

SEQ ID NO: 9305 - RNA, 22 nt, Artificial Sequence
  Synthetic
uucuccccuggccccguggaga

SEQ ID NO: 9306 - RNA, 22 nt, Artificial Sequence
  Synthetic
ucuccccuggccccguggagac

SEQ ID NO: 9307 - RNA, 22 nt, Artificial Sequence
  Synthetic
cuccccuggccccguggagacc

SEQ ID NO: 9308 - RNA, 22 nt, Artificial Sequence
  Synthetic
uccccuggccccguggagaccu

SEQ ID NO: 9309 - RNA, 22 nt, Artificial Sequence
  Synthetic
ccccuggccccguggagaccua

SEQ ID NO: 9310 - RNA, 22 nt, Artificial Sequence
  Synthetic
cccuggccccguggagaccuag

SEQ ID NO: 9311 - RNA, 22 nt, Artificial Sequence
  Synthetic
ccuggccccguggagaccuagu

SEQ ID NO: 9312 - RNA, 22 nt, Artificial Sequence
  Synthetic
cuggccccguggagaccuagug

SEQ ID NO: 9313 - RNA, 22 nt, Artificial Sequence
  Synthetic
uggccccguggagaccuagugu

SEQ ID NO: 9314 - RNA, 22 nt, Artificial Sequence
  Synthetic
ggccccguggagaccuaguguu

SEQ ID NO: 9315 - RNA, 22 nt, Artificial Sequence
  Synthetic
gccccguggagaccuaguguug

SEQ ID NO: 9316 - RNA, 22 nt, Artificial Sequence
  Synthetic
ccccguggagaccuaguguuga

SEQ ID NO: 9317 - RNA, 22 nt, Artificial Sequence
  Synthetic
cccguggagaccuaguguugac

SEQ ID NO: 9318 - RNA, 22 nt, Artificial Sequence
  Synthetic
ccguggagaccuaguguugacc

SEQ ID NO: 9319 - RNA, 22 nt, Artificial Sequence
  Synthetic
cguggagaccuaguguugaccg

SEQ ID NO: 9320 - RNA, 22 nt, Artificial Sequence
  Synthetic
guggagaccuaguguugaccga

SEQ ID NO: 9321 - RNA, 22 nt, Artificial Sequence
  Synthetic
uggagaccuaguguugaccgag

SEQ ID NO: 9322 - RNA, 22 nt, Artificial Sequence
  Synthetic
ggagaccuaguguugaccgaga

SEQ ID NO: 9323 - RNA, 22 nt, Artificial Sequence
  Synthetic
gagaccuaguguugaccgagaa

SEQ ID NO: 9324 - RNA, 22 nt, Artificial Sequence
  Synthetic
agaccuaguguugaccgagaaa

SEQ ID NO: 9325 - RNA, 22 nt, Artificial Sequence
  Synthetic
gaccuaguguugaccgagaaac

SEQ ID NO: 9326 - RNA, 22 nt, Artificial Sequence
  Synthetic
accuaguguugaccgagaaacu

SEQ ID NO: 9327 - RNA, 22 nt, Artificial Sequence
  Synthetic
ccuaguguugaccgagaaacug

SEQ ID NO: 9328 - RNA, 22 nt, Artificial Sequence
  Synthetic
cuaguguugaccgagaaacugg

SEQ ID NO: 9329 - RNA, 22 nt, Artificial Sequence
  Synthetic
uaguguugaccgagaaacuggc

SEQ ID NO: 9330 - RNA, 22 nt, Artificial Sequence
  Synthetic
aguguugaccgagaaacuggcu

SEQ ID NO: 9331 - RNA, 22 nt, Artificial Sequence
  Synthetic
guguugaccgagaaacuggcuc

SEQ ID NO: 9332 - RNA, 22 nt, Artificial Sequence
  Synthetic
uguugaccgagaaacuggcucc

SEQ ID NO: 9333 - RNA, 22 nt, Artificial Sequence
  Synthetic
guugaccgagaaacuggcuccu

SEQ ID NO: 9334 - RNA, 22 nt, Artificial Sequence
  Synthetic
uugaccgagaaacuggcuccuc

SEQ ID NO: 9335 - RNA, 22 nt, Artificial Sequence
  Synthetic
ugaccgagaaacuggcuccuca

SEQ ID NO: 9336 - RNA, 22 nt, Artificial Sequence
  Synthetic
gaccgagaaacuggcuccucag

SEQ ID NO: 9337 - RNA, 22 nt, Artificial Sequence
  Synthetic
accgagaaacuggcuccucagc

SEQ ID NO: 9338 - RNA, 22 nt, Artificial Sequence
  Synthetic
ccgagaaacuggcuccucagcc

SEQ ID NO: 9339 - RNA, 22 nt, Artificial Sequence
  Synthetic
cgagaaacuggcuccucagccc

SEQ ID NO: 9340 - RNA, 22 nt, Artificial Sequence
  Synthetic
gagaaacuggcuccucagccca

SEQ ID NO: 9341 - RNA, 22 nt, Artificial Sequence
  Synthetic
agaaacuggcuccucagcccac

SEQ ID NO: 9342 - RNA, 22 nt, Artificial Sequence
  Synthetic
gaaacuggcuccucagcccacu

SEQ ID NO: 9343 - RNA, 22 nt, Artificial Sequence
  Synthetic
aaacuggcuccucagcccacuc

SEQ ID NO: 9344 - RNA, 22 nt, Artificial Sequence
  Synthetic
aacuggcuccucagcccacucu

SEQ ID NO: 9345 - RNA, 22 nt, Artificial Sequence
  Synthetic
acuggcuccucagcccacucug

SEQ ID NO: 9346 - RNA, 22 nt, Artificial Sequence
  Synthetic
cuggcuccucagcccacucugg

SEQ ID NO: 9347 - RNA, 22 nt, Artificial Sequence
  Synthetic
uggcuccucagcccacucuggg

SEQ ID NO: 9348 - RNA, 22 nt, Artificial Sequence
  Synthetic
ggcuccucagcccacucuggga

SEQ ID NO: 9349 - RNA, 22 nt, Artificial Sequence
  Synthetic
gcuccucagcccacucugggaa

SEQ ID NO: 9350 - RNA, 22 nt, Artificial Sequence
  Synthetic
cuccucagcccacucugggaag

SEQ ID NO: 9351 - RNA, 22 nt, Artificial Sequence
  Synthetic
uccucagcccacucugggaaga

SEQ ID NO: 9352 - RNA, 22 nt, Artificial Sequence
  Synthetic
ccucagcccacucugggaagac

SEQ ID NO: 9353 - RNA, 22 nt, Artificial Sequence
  Synthetic
cucagcccacucugggaagacc

SEQ ID NO: 9354 - RNA, 22 nt, Artificial Sequence
  Synthetic
ucagcccacucugggaagaccc

SEQ ID NO: 9355 - RNA, 22 nt, Artificial Sequence
  Synthetic
cagcccacucugggaagaccca

SEQ ID NO: 9356 - RNA, 22 nt, Artificial Sequence
  Synthetic
agcccacucugggaagacccag

SEQ ID NO: 9357 - RNA, 22 nt, Artificial Sequence
  Synthetic
gcccacucugggaagacccagc

SEQ ID NO: 9358 - RNA, 22 nt, Artificial Sequence
  Synthetic
cccacucugggaagacccagcc

SEQ ID NO: 9359 - RNA, 22 nt, Artificial Sequence
  Synthetic
ccacucugggaagacccagcca

SEQ ID NO: 9360 - RNA, 22 nt, Artificial Sequence
  Synthetic
cacucugggaagacccagccaa

SEQ ID NO: 9361 - RNA, 22 nt, Artificial Sequence
  Synthetic
acucugggaagacccagccaaa

SEQ ID NO: 9362 - RNA, 22 nt, Artificial Sequence
  Synthetic
cucugggaagacccagccaaau

SEQ ID NO: 9363 - RNA, 22 nt, Artificial Sequence
  Synthetic
ucugggaagacccagccaaaug

SEQ ID NO: 9364 - RNA, 22 nt, Artificial Sequence
  Synthetic
cugggaagacccagccaaaugu

SEQ ID NO: 9365 - RNA, 22 nt, Artificial Sequence
  Synthetic
ugggaagacccagccaaaugua

SEQ ID NO: 9366 - RNA, 22 nt, Artificial Sequence
  Synthetic
gggaagacccagccaaauguag

SEQ ID NO: 9367 - RNA, 22 nt, Artificial Sequence
  Synthetic
ggaagacccagccaaauguagc

SEQ ID NO: 9368 - RNA, 22 nt, Artificial Sequence
  Synthetic
gaagacccagccaaauguagcu

SEQ ID NO: 9369 - RNA, 22 nt, Artificial Sequence
  Synthetic
aagacccagccaaauguagcuc

SEQ ID NO: 9370 - RNA, 22 nt, Artificial Sequence
  Synthetic
agacccagccaaauguagcuca

SEQ ID NO: 9371 - RNA, 22 nt, Artificial Sequence
  Synthetic
gacccagccaaauguagcucag

SEQ ID NO: 9372 - RNA, 22 nt, Artificial Sequence
  Synthetic
acccagccaaauguagcucagc

SEQ ID NO: 9373 - RNA, 22 nt, Artificial Sequence
  Synthetic
cccagccaaauguagcucagcg

SEQ ID NO: 9374 - RNA, 22 nt, Artificial Sequence
  Synthetic
ccagccaaauguagcucagcgg

SEQ ID NO: 9375 - RNA, 22 nt, Artificial Sequence
  Synthetic
cagccaaauguagcucagcgga

SEQ ID NO: 9376 - RNA, 22 nt, Artificial Sequence
  Synthetic
agccaaauguagcucagcggau

SEQ ID NO: 9377 - RNA, 22 nt, Artificial Sequence
  Synthetic
gccaaauguagcucagcggaug

SEQ ID NO: 9378 - RNA, 22 nt, Artificial Sequence
  Synthetic
ccaaauguagcucagcggaugc

SEQ ID NO: 9379 - RNA, 22 nt, Artificial Sequence
  Synthetic
caaauguagcucagcggaugcc

SEQ ID NO: 9380 - RNA, 22 nt, Artificial Sequence
  Synthetic
aaauguagcucagcggaugccc

SEQ ID NO: 9381 - RNA, 22 nt, Artificial Sequence
  Synthetic
aauguagcucagcggaugccca

SEQ ID NO: 9382 - RNA, 22 nt, Artificial Sequence
  Synthetic
auguagcucagcggaugcccag

SEQ ID NO: 9383 - RNA, 22 nt, Artificial Sequence
  Synthetic
uguagcucagcggaugcccagg

SEQ ID NO: 9384 - RNA, 22 nt, Artificial Sequence
  Synthetic
guagcucagcggaugcccaggg

SEQ ID NO: 9385 - RNA, 22 nt, Artificial Sequence
  Synthetic
uagcucagcggaugcccagggc

SEQ ID NO: 9386 - RNA, 22 nt, Artificial Sequence
  Synthetic
agcucagcggaugcccagggcu

SEQ ID NO: 9387 - RNA, 22 nt, Artificial Sequence
  Synthetic
gcucagcggaugcccagggcug

SEQ ID NO: 9388 - RNA, 22 nt, Artificial Sequence
  Synthetic
cucagcggaugcccagggcugg

SEQ ID NO: 9389 - RNA, 22 nt, Artificial Sequence
  Synthetic
ucagcggaugcccagggcuggg

SEQ ID NO: 9390 - RNA, 22 nt, Artificial Sequence
  Synthetic
cagcggaugcccagggcugggc

SEQ ID NO: 9391 - RNA, 22 nt, Artificial Sequence
  Synthetic
agcggaugcccagggcugggcu

SEQ ID NO: 9392 - RNA, 22 nt, Artificial Sequence
  Synthetic
gcggaugcccagggcugggcuu

SEQ ID NO: 9393 - RNA, 22 nt, Artificial Sequence
  Synthetic
cggaugcccagggcugggcuuc

SEQ ID NO: 9394 - RNA, 22 nt, Artificial Sequence
  Synthetic
ggaugcccagggcugggcuucu

SEQ ID NO: 9395 - RNA, 22 nt, Artificial Sequence
  Synthetic
gaugcccagggcugggcuucug

SEQ ID NO: 9396 - RNA, 22 nt, Artificial Sequence
  Synthetic
augcccagggcugggcuucugg

SEQ ID NO: 9397 - RNA, 22 nt, Artificial Sequence
  Synthetic
ugcccagggcugggcuucuggg

SEQ ID NO: 9398 - RNA, 22 nt, Artificial Sequence
  Synthetic
gcccagggcugggcuucugggc

SEQ ID NO: 9399 - RNA, 22 nt, Artificial Sequence
  Synthetic
cccagggcugggcuucugggcc

SEQ ID NO: 9400 - RNA, 22 nt, Artificial Sequence
  Synthetic
ccagggcugggcuucugggccc

SEQ ID NO: 9401 - RNA, 22 nt, Artificial Sequence
  Synthetic
cagggcugggcuucugggcccg

SEQ ID NO: 9402 - RNA, 22 nt, Artificial Sequence
  Synthetic
agggcugggcuucugggcccgc

SEQ ID NO: 9403 - RNA, 22 nt, Artificial Sequence
  Synthetic
gggcugggcuucugggcccgcc

SEQ ID NO: 9404 - RNA, 22 nt, Artificial Sequence
  Synthetic
ggcugggcuucugggcccgccg

SEQ ID NO: 9405 - RNA, 22 nt, Artificial Sequence
  Synthetic
gcugggcuucugggcccgccga

SEQ ID NO: 9406 - RNA, 22 nt, Artificial Sequence
  Synthetic
cugggcuucugggcccgccgac

SEQ ID NO: 9407 - RNA, 22 nt, Artificial Sequence
  Synthetic
ugggcuucugggcccgccgacg

SEQ ID NO: 9408 - RNA, 22 nt, Artificial Sequence
  Synthetic
gggcuucugggcccgccgacgc

SEQ ID NO: 9409 - RNA, 22 nt, Artificial Sequence
  Synthetic
ggcuucugggcccgccgacgcc

SEQ ID NO: 9410 - RNA, 22 nt, Artificial Sequence
  Synthetic
gcuucugggcccgccgacgccg

SEQ ID NO: 9411 - RNA, 22 nt, Artificial Sequence
  Synthetic
cuucugggcccgccgacgccga

SEQ ID NO: 9412 - RNA, 22 nt, Artificial Sequence
  Synthetic
uucugggcccgccgacgccgac

SEQ ID NO: 9413 - RNA, 22 nt, Artificial Sequence
  Synthetic
ucugggcccgccgacgccgacc

SEQ ID NO: 9414 - RNA, 22 nt, Artificial Sequence
  Synthetic
cugggcccgccgacgccgaccg

SEQ ID NO: 9415 - RNA, 22 nt, Artificial Sequence
  Synthetic
ugggcccgccgacgccgaccgc

SEQ ID NO: 9416 - RNA, 22 nt, Artificial Sequence
  Synthetic
gggcccgccgacgccgaccgcg

SEQ ID NO: 9417 - RNA, 22 nt, Artificial Sequence
  Synthetic
ggcccgccgacgccgaccgcgc

SEQ ID NO: 9418 - RNA, 22 nt, Artificial Sequence
  Synthetic
gcccgccgacgccgaccgcgcc

SEQ ID NO: 9419 - RNA, 22 nt, Artificial Sequence
  Synthetic
cccgccgacgccgaccgcgccc

SEQ ID NO: 9420 - RNA, 22 nt, Artificial Sequence
  Synthetic
ccgccgacgccgaccgcgcccg

SEQ ID NO: 9421 - RNA, 22 nt, Artificial Sequence
  Synthetic
cgccgacgccgaccgcgcccgc

SEQ ID NO: 9422 - RNA, 22 nt, Artificial Sequence
  Synthetic
gccgacgccgaccgcgcccgcg

SEQ ID NO: 9423 - RNA, 22 nt, Artificial Sequence
  Synthetic
ccgacgccgaccgcgcccgcgc

SEQ ID NO: 9424 - RNA, 22 nt, Artificial Sequence
  Synthetic
cgacgccgaccgcgcccgcgcg

SEQ ID NO: 9425 - RNA, 22 nt, Artificial Sequence
  Synthetic
gacgccgaccgcgcccgcgcgg

SEQ ID NO: 9426 - RNA, 22 nt, Artificial Sequence
  Synthetic
acgccgaccgcgcccgcgcggg

SEQ ID NO: 9427 - RNA, 22 nt, Artificial Sequence
  Synthetic
cgccgaccgcgcccgcgcgggg

SEQ ID NO: 9428 - RNA, 22 nt, Artificial Sequence
  Synthetic
gccgaccgcgcccgcgcggggc

SEQ ID NO: 9429 - RNA, 22 nt, Artificial Sequence
  Synthetic
ccgaccgcgcccgcgcggggcu

SEQ ID NO: 9430 - RNA, 22 nt, Artificial Sequence
  Synthetic
cgaccgcgcccgcgcggggcug

SEQ ID NO: 9431 - RNA, 22 nt, Artificial Sequence
  Synthetic
gaccgcgcccgcgcggggcuga

SEQ ID NO: 9432 - RNA, 22 nt, Artificial Sequence
  Synthetic
accgcgcccgcgcggggcugag

SEQ ID NO: 9433 - RNA, 22 nt, Artificial Sequence
  Synthetic
ccgcgcccgcgcggggcugagg

SEQ ID NO: 9434 - RNA, 22 nt, Artificial Sequence
  Synthetic
cgcgcccgcgcggggcugaggc

SEQ ID NO: 9435 - RNA, 22 nt, Artificial Sequence
  Synthetic
gcgcccgcgcggggcugaggcu

SEQ ID NO: 9436 - RNA, 22 nt, Artificial Sequence
  Synthetic
cgcccgcgcggggcugaggcug

SEQ ID NO: 9437 - RNA, 22 nt, Artificial Sequence
  Synthetic
gcccgcgcggggcugaggcugg

SEQ ID NO: 9438 - RNA, 22 nt, Artificial Sequence
  Synthetic
cccgcgcggggcugaggcugga

SEQ ID NO: 9439 - RNA, 22 nt, Artificial Sequence
  Synthetic
ccgcgcggggcugaggcuggau

SEQ ID NO: 9440 - RNA, 22 nt, Artificial Sequence
  Synthetic
cgcgcggggcugaggcuggauu

SEQ ID NO: 9441 - RNA, 22 nt, Artificial Sequence
  Synthetic
gcgcggggcugaggcuggauuc

SEQ ID NO: 9442 - RNA, 22 nt, Artificial Sequence
  Synthetic
cgcggggcugaggcuggauucc

SEQ ID NO: 9443 - RNA, 22 nt, Artificial Sequence
  Synthetic
gcggggcugaggcuggauuccu

SEQ ID NO: 9444 - RNA, 22 nt, Artificial Sequence
  Synthetic
cggggcugaggcuggauuccuu

SEQ ID NO: 9445 - RNA, 22 nt, Artificial Sequence
  Synthetic
ggggcugaggcuggauuccuuu

SEQ ID NO: 9446 - RNA, 22 nt, Artificial Sequence
  Synthetic
gggcugaggcuggauuccuuuc

SEQ ID NO: 9447 - RNA, 22 nt, Artificial Sequence
  Synthetic
ggcugaggcuggauuccuuucc

SEQ ID NO: 9448 - RNA, 22 nt, Artificial Sequence
  Synthetic
gcugaggcuggauuccuuuccc

SEQ ID NO: 9449 - RNA, 22 nt, Artificial Sequence
  Synthetic
cugaggcuggauuccuuuccca

SEQ ID NO: 9450 - RNA, 22 nt, Artificial Sequence
  Synthetic
ugaggcuggauuccuuucccac

SEQ ID NO: 9451 - RNA, 22 nt, Artificial Sequence
  Synthetic
gaggcuggauuccuuucccacu

SEQ ID NO: 9452 - RNA, 22 nt, Artificial Sequence
  Synthetic
aggcuggauuccuuucccacua

SEQ ID NO: 9453 - RNA, 22 nt, Artificial Sequence
  Synthetic
ggcuggauuccuuucccacuaa

SEQ ID NO: 9454 - RNA, 22 nt, Artificial Sequence
  Synthetic
gcuggauuccuuucccacuaau

SEQ ID NO: 9455 - RNA, 22 nt, Artificial Sequence
  Synthetic
cuggauuccuuucccacuaaua

SEQ ID NO: 9456 - RNA, 22 nt, Artificial Sequence
  Synthetic
uggauuccuuucccacuaauag

SEQ ID NO: 9457 - RNA, 22 nt, Artificial Sequence
  Synthetic
ggauuccuuucccacuaauaga

SEQ ID NO: 9458 - RNA, 22 nt, Artificial Sequence
  Synthetic
gauuccuuucccacuaauagag

SEQ ID NO: 9459 - RNA, 22 nt, Artificial Sequence
  Synthetic
auuccuuucccacuaauagagg

SEQ ID NO: 9460 - RNA, 22 nt, Artificial Sequence
  Synthetic
uuccuuucccacuaauagaggg

SEQ ID NO: 9461 - RNA, 22 nt, Artificial Sequence
  Synthetic
uccuuucccacuaauagagggc

SEQ ID NO: 9462 - RNA, 22 nt, Artificial Sequence
  Synthetic
ccuuucccacuaauagagggca

SEQ ID NO: 9463 - RNA, 22 nt, Artificial Sequence
  Synthetic
cuuucccacuaauagagggcag

SEQ ID NO: 9464 - RNA, 22 nt, Artificial Sequence
  Synthetic
uuucccacuaauagagggcagc

SEQ ID NO: 9465 - RNA, 22 nt, Artificial Sequence
  Synthetic
uucccacuaauagagggcagcg

SEQ ID NO: 9466 - RNA, 22 nt, Artificial Sequence
  Synthetic
ucccacuaauagagggcagcgg

SEQ ID NO: 9467 - RNA, 22 nt, Artificial Sequence
  Synthetic
cccacuaauagagggcagcggg

SEQ ID NO: 9468 - RNA, 22 nt, Artificial Sequence
  Synthetic
ccacuaauagagggcagcgggc

SEQ ID NO: 9469 - RNA, 22 nt, Artificial Sequence
  Synthetic
cacuaauagagggcagcgggcg

SEQ ID NO: 9470 - RNA, 22 nt, Artificial Sequence
  Synthetic
acuaauagagggcagcgggcgc

SEQ ID NO: 9471 - RNA, 22 nt, Artificial Sequence
  Synthetic
cuaauagagggcagcgggcgcu

SEQ ID NO: 9472 - RNA, 22 nt, Artificial Sequence
  Synthetic
uaauagagggcagcgggcgcuu

SEQ ID NO: 9473 - RNA, 22 nt, Artificial Sequence
  Synthetic
aauagagggcagcgggcgcuug

SEQ ID NO: 9474 - RNA, 22 nt, Artificial Sequence
  Synthetic
auagagggcagcgggcgcuuga

SEQ ID NO: 9475 - RNA, 22 nt, Artificial Sequence
  Synthetic
uagagggcagcgggcgcuugag

SEQ ID NO: 9476 - RNA, 22 nt, Artificial Sequence
  Synthetic
agagggcagcgggcgcuugagc

SEQ ID NO: 9477 - RNA, 22 nt, Artificial Sequence
  Synthetic
gagggcagcgggcgcuugagcg

SEQ ID NO: 9478 - RNA, 22 nt, Artificial Sequence
  Synthetic
agggcagcgggcgcuugagcgc

SEQ ID NO: 9479 - RNA, 22 nt, Artificial Sequence
  Synthetic
gggcagcgggcgcuugagcgcu

SEQ ID NO: 9480 - RNA, 22 nt, Artificial Sequence
  Synthetic
ggcagcgggcgcuugagcgcug

SEQ ID NO: 9481 - RNA, 22 nt, Artificial Sequence
  Synthetic
gcagcgggcgcuugagcgcugg

SEQ ID NO: 9482 - RNA, 22 nt, Artificial Sequence
  Synthetic
cagcgggcgcuugagcgcugga

SEQ ID NO: 9483 - RNA, 22 nt, Artificial Sequence
  Synthetic
agcgggcgcuugagcgcuggaa

SEQ ID NO: 9484 - RNA, 22 nt, Artificial Sequence
  Synthetic
gcgggcgcuugagcgcuggaag

SEQ ID NO: 9485 - RNA, 22 nt, Artificial Sequence
  Synthetic
cgggcgcuugagcgcuggaaga

SEQ ID NO: 9486 - RNA, 22 nt, Artificial Sequence
  Synthetic
gggcgcuugagcgcuggaagaa

SEQ ID NO: 9487 - RNA, 22 nt, Artificial Sequence
  Synthetic
ggcgcuugagcgcuggaagaag

SEQ ID NO: 9488 - RNA, 22 nt, Artificial Sequence
  Synthetic
gcgcuugagcgcuggaagaagu

SEQ ID NO: 9489 - RNA, 22 nt, Artificial Sequence
  Synthetic
cgcuugagcgcuggaagaaguc

SEQ ID NO: 9490 - RNA, 22 nt, Artificial Sequence
  Synthetic
gcuugagcgcuggaagaagucc

SEQ ID NO: 9491 - RNA, 22 nt, Artificial Sequence
  Synthetic
cuugagcgcuggaagaaguccc

SEQ ID NO: 9492 - RNA, 22 nt, Artificial Sequence
  Synthetic
uugagcgcuggaagaagucccu

SEQ ID NO: 9493 - RNA, 22 nt, Artificial Sequence
  Synthetic
ugagcgcuggaagaagucccuc

SEQ ID NO: 9494 - RNA, 22 nt, Artificial Sequence
  Synthetic
gagcgcuggaagaagucccucu

SEQ ID NO: 9495 - RNA, 22 nt, Artificial Sequence
  Synthetic
agcgcuggaagaagucccucuc

SEQ ID NO: 9496 - RNA, 22 nt, Artificial Sequence
  Synthetic
gcgcuggaagaagucccucucc

SEQ ID NO: 9497 - RNA, 22 nt, Artificial Sequence
  Synthetic
cgcuggaagaagucccucuccu

SEQ ID NO: 9498 - RNA, 22 nt, Artificial Sequence
  Synthetic
gcuggaagaagucccucuccuc

SEQ ID NO: 9499 - RNA, 22 nt, Artificial Sequence
  Synthetic
cuggaagaagucccucuccucu

SEQ ID NO: 9500 - RNA, 22 nt, Artificial Sequence
  Synthetic
uggaagaagucccucuccucuc

SEQ ID NO: 9501 - RNA, 22 nt, Artificial Sequence
  Synthetic
ggaagaagucccucuccucucg

SEQ ID NO: 9502 - RNA, 22 nt, Artificial Sequence
  Synthetic
gaagaagucccucuccucucgg

SEQ ID NO: 9503 - RNA, 22 nt, Artificial Sequence
  Synthetic
aagaagucccucuccucucggg

SEQ ID NO: 9504 - RNA, 22 nt, Artificial Sequence
  Synthetic
agaagucccucuccucucgggu

SEQ ID NO: 9505 - RNA, 22 nt, Artificial Sequence
  Synthetic
gaagucccucuccucucggguc

SEQ ID NO: 9506 - RNA, 22 nt, Artificial Sequence
  Synthetic
aagucccucuccucucgggucc

SEQ ID NO: 9507 - RNA, 22 nt, Artificial Sequence
  Synthetic
agucccucuccucucggguccu

SEQ ID NO: 9508 - RNA, 22 nt, Artificial Sequence
  Synthetic
gucccucuccucucggguccug

SEQ ID NO: 9509 - RNA, 22 nt, Artificial Sequence
  Synthetic
ucccucuccucucggguccugg

SEQ ID NO: 9510 - RNA, 22 nt, Artificial Sequence
  Synthetic
cccucuccucucggguccugga

SEQ ID NO: 9511 - RNA, 22 nt, Artificial Sequence
  Synthetic
ccucuccucucggguccuggag

SEQ ID NO: 9512 - RNA, 22 nt, Artificial Sequence
  Synthetic
cucuccucucggguccuggagc

SEQ ID NO: 9513 - RNA, 22 nt, Artificial Sequence
  Synthetic
ucuccucucggguccuggagcc

SEQ ID NO: 9514 - RNA, 22 nt, Artificial Sequence
  Synthetic
cuccucucggguccuggagccc

SEQ ID NO: 9515 - RNA, 22 nt, Artificial Sequence
  Synthetic
uccucucggguccuggagcccc

SEQ ID NO: 9516 - RNA, 22 nt, Artificial Sequence
  Synthetic
ccucucggguccuggagccccu

SEQ ID NO: 9517 - RNA, 22 nt, Artificial Sequence
  Synthetic
cucucggguccuggagccccug

SEQ ID NO: 9518 - RNA, 22 nt, Artificial Sequence
  Synthetic
ucucggguccuggagccccugc

SEQ ID NO: 9519 - RNA, 22 nt, Artificial Sequence
  Synthetic
cucggguccuggagccccugcc

SEQ ID NO: 9520 - RNA, 22 nt, Artificial Sequence
  Synthetic
ucggguccuggagccccugccc

SEQ ID NO: 9521 - RNA, 22 nt, Artificial Sequence
  Synthetic
cggguccuggagccccugcccu

SEQ ID NO: 9522 - RNA, 22 nt, Artificial Sequence
  Synthetic
ggguccuggagccccugcccug

SEQ ID NO: 9523 - RNA, 22 nt, Artificial Sequence
  Synthetic
gguccuggagccccugcccugu

SEQ ID NO: 9524 - RNA, 22 nt, Artificial Sequence
  Synthetic
guccuggagccccugcccuguc

SEQ ID NO: 9525 - RNA, 22 nt, Artificial Sequence
  Synthetic
uccuggagccccugcccugucc

SEQ ID NO: 9526 - RNA, 22 nt, Artificial Sequence
  Synthetic
ccuggagccccugcccuguccu

SEQ ID NO: 9527 - RNA, 22 nt, Artificial Sequence
  Synthetic
cuggagccccugcccuguccug

SEQ ID NO: 9528 - RNA, 22 nt, Artificial Sequence
  Synthetic
uggagccccugcccuguccugg

SEQ ID NO: 9529 - RNA, 22 nt, Artificial Sequence
  Synthetic
ggagccccugcccuguccuggc

SEQ ID NO: 9530 - RNA, 22 nt, Artificial Sequence
  Synthetic
gagccccugcccuguccuggcg

SEQ ID NO: 9531 - RNA, 22 nt, Artificial Sequence
  Synthetic
agccccugcccuguccuggcgu

SEQ ID NO: 9532 - RNA, 22 nt, Artificial Sequence
  Synthetic
gccccugcccuguccuggcguc

SEQ ID NO: 9533 - RNA, 22 nt, Artificial Sequence
  Synthetic
ccccugcccuguccuggcgucu

SEQ ID NO: 9534 - RNA, 22 nt, Artificial Sequence
  Synthetic
cccugcccuguccuggcgucuu

SEQ ID NO: 9535 - RNA, 22 nt, Artificial Sequence
  Synthetic
ccugcccuguccuggcgucuua

SEQ ID NO: 9536 - RNA, 22 nt, Artificial Sequence
  Synthetic
cugcccuguccuggcgucuuag

SEQ ID NO: 9537 - RNA, 22 nt, Artificial Sequence
  Synthetic
ugcccuguccuggcgucuuagc

SEQ ID NO: 9538 - RNA, 22 nt, Artificial Sequence
  Synthetic
gcccuguccuggcgucuuagcc

SEQ ID NO: 9539 - RNA, 22 nt, Artificial Sequence
  Synthetic
cccuguccuggcgucuuagccg

SEQ ID NO: 9540 - RNA, 22 nt, Artificial Sequence
  Synthetic
ccuguccuggcgucuuagccgg

SEQ ID NO: 9541 - RNA, 22 nt, Artificial Sequence
  Synthetic
cuguccuggcgucuuagccgga

SEQ ID NO: 9542 - RNA, 22 nt, Artificial Sequence
  Synthetic
uguccuggcgucuuagccggac

SEQ ID NO: 9543 - RNA, 22 nt, Artificial Sequence
  Synthetic
guccuggcgucuuagccggaca

SEQ ID NO: 9544 - RNA, 22 nt, Artificial Sequence
  Synthetic
uccuggcgucuuagccggacac

SEQ ID NO: 9545 - RNA, 22 nt, Artificial Sequence
  Synthetic
ccuggcgucuuagccggacaca

SEQ ID NO: 9546 - RNA, 22 nt, Artificial Sequence
  Synthetic
cuggcgucuuagccggacacac

SEQ ID NO: 9547 - RNA, 22 nt, Artificial Sequence
  Synthetic
uggcgucuuagccggacacacc

SEQ ID NO: 9548 - RNA, 22 nt, Artificial Sequence
  Synthetic
ggcgucuuagccggacacaccu

SEQ ID NO: 9549 - RNA, 22 nt, Artificial Sequence
  Synthetic
gcgucuuagccggacacaccug

SEQ ID NO: 9550 - RNA, 22 nt, Artificial Sequence
  Synthetic
cgucuuagccggacacaccugc

SEQ ID NO: 9551 - RNA, 22 nt, Artificial Sequence
  Synthetic
gucuuagccggacacaccugcc

SEQ ID NO: 9552 - RNA, 22 nt, Artificial Sequence
  Synthetic
ucuuagccggacacaccugccc

SEQ ID NO: 9553 - RNA, 22 nt, Artificial Sequence
  Synthetic
cuuagccggacacaccugcccc

SEQ ID NO: 9554 - RNA, 22 nt, Artificial Sequence
  Synthetic
uuagccggacacaccugccccg

SEQ ID NO: 9555 - RNA, 22 nt, Artificial Sequence
  Synthetic
uagccggacacaccugccccgc

SEQ ID NO: 9556 - RNA, 22 nt, Artificial Sequence
  Synthetic
agccggacacaccugccccgcg

SEQ ID NO: 9557 - RNA, 22 nt, Artificial Sequence
  Synthetic
gccggacacaccugccccgcgc

SEQ ID NO: 9558 - RNA, 22 nt, Artificial Sequence
  Synthetic
ccggacacaccugccccgcgcc

SEQ ID NO: 9559 - RNA, 22 nt, Artificial Sequence
  Synthetic
cggacacaccugccccgcgccg

SEQ ID NO: 9560 - RNA, 22 nt, Artificial Sequence
  Synthetic
ggacacaccugccccgcgccgg

SEQ ID NO: 9561 - RNA, 22 nt, Artificial Sequence
  Synthetic
gacacaccugccccgcgccggu

SEQ ID NO: 9562 - RNA, 22 nt, Artificial Sequence
  Synthetic
acacaccugccccgcgccgguc

SEQ ID NO: 9563 - RNA, 22 nt, Artificial Sequence
  Synthetic
cacaccugccccgcgccggucc

SEQ ID NO: 9564 - RNA, 22 nt, Artificial Sequence
  Synthetic
acaccugccccgcgccgguccc

SEQ ID NO: 9565 - RNA, 22 nt, Artificial Sequence
  Synthetic
caccugccccgcgccggucccc

SEQ ID NO: 9566 - RNA, 22 nt, Artificial Sequence
  Synthetic
accugccccgcgccgguccccg

SEQ ID NO: 9567 - RNA, 22 nt, Artificial Sequence
  Synthetic
ccugccccgcgccgguccccgc

SEQ ID NO: 9568 - RNA, 22 nt, Artificial Sequence
  Synthetic
cugccccgcgccgguccccgcu

SEQ ID NO: 9569 - RNA, 22 nt, Artificial Sequence
  Synthetic
ugccccgcgccgguccccgcua

SEQ ID NO: 9570 - RNA, 22 nt, Artificial Sequence
  Synthetic
gccccgcgccgguccccgcuau

SEQ ID NO: 9571 - RNA, 22 nt, Artificial Sequence
  Synthetic
ccccgcgccgguccccgcuauu

SEQ ID NO: 9572 - RNA, 22 nt, Artificial Sequence
  Synthetic
cccgcgccgguccccgcuauua

SEQ ID NO: 9573 - RNA, 22 nt, Artificial Sequence
  Synthetic
ccgcgccgguccccgcuauuac

SEQ ID NO: 9574 - RNA, 22 nt, Artificial Sequence
  Synthetic
cgcgccgguccccgcuauuacu

SEQ ID NO: 9575 - RNA, 22 nt, Artificial Sequence
  Synthetic
gcgccgguccccgcuauuacug

SEQ ID NO: 9576 - RNA, 22 nt, Artificial Sequence
  Synthetic
cgccgguccccgcuauuacugu

SEQ ID NO: 9577 - RNA, 22 nt, Artificial Sequence
  Synthetic
gccgguccccgcuauuacuguc

SEQ ID NO: 9578 - RNA, 22 nt, Artificial Sequence
  Synthetic
ccgguccccgcuauuacugucu

SEQ ID NO: 9579 - RNA, 22 nt, Artificial Sequence
  Synthetic
cgguccccgcuauuacugucug

SEQ ID NO: 9580 - RNA, 22 nt, Artificial Sequence
  Synthetic
gguccccgcuauuacugucugc

SEQ ID NO: 9581 - RNA, 22 nt, Artificial Sequence
  Synthetic
guccccgcuauuacugucugca

SEQ ID NO: 9582 - RNA, 22 nt, Artificial Sequence
  Synthetic
uccccgcuauuacugucugcac

SEQ ID NO: 9583 - RNA, 22 nt, Artificial Sequence
  Synthetic
ccccgcuauuacugucugcacc

SEQ ID NO: 9584 - RNA, 22 nt, Artificial Sequence
  Synthetic
cccgcuauuacugucugcaccu

SEQ ID NO: 9585 - RNA, 22 nt, Artificial Sequence
  Synthetic
ccgcuauuacugucugcaccua

SEQ ID NO: 9586 - RNA, 22 nt, Artificial Sequence
  Synthetic
cgcuauuacugucugcaccuac

SEQ ID NO: 9587 - RNA, 22 nt, Artificial Sequence
  Synthetic
gcuauuacugucugcaccuacg

SEQ ID NO: 9588 - RNA, 22 nt, Artificial Sequence
  Synthetic
cuauuacugucugcaccuacga

SEQ ID NO: 9589 - RNA, 22 nt, Artificial Sequence
  Synthetic
uauuacugucugcaccuacgaa

SEQ ID NO: 9590 - RNA, 22 nt, Artificial Sequence
  Synthetic
auuacugucugcaccuacgaag

SEQ ID NO: 9591 - RNA, 22 nt, Artificial Sequence
  Synthetic
uuacugucugcaccuacgaagc

SEQ ID NO: 9592 - RNA, 22 nt, Artificial Sequence
  Synthetic
uacugucugcaccuacgaagca

SEQ ID NO: 9593 - RNA, 22 nt, Artificial Sequence
  Synthetic
acugucugcaccuacgaagcau

SEQ ID NO: 9594 - RNA, 22 nt, Artificial Sequence
  Synthetic
cugucugcaccuacgaagcaug

SEQ ID NO: 9595 - RNA, 22 nt, Artificial Sequence
  Synthetic
ugucugcaccuacgaagcaugc

SEQ ID NO: 9596 - RNA, 22 nt, Artificial Sequence
  Synthetic
gucugcaccuacgaagcaugcc

SEQ ID NO: 9597 - RNA, 22 nt, Artificial Sequence
  Synthetic
ucugcaccuacgaagcaugcca

SEQ ID NO: 9598 - RNA, 22 nt, Artificial Sequence
  Synthetic
cugcaccuacgaagcaugccag

SEQ ID NO: 9599 - RNA, 22 nt, Artificial Sequence
  Synthetic
ugcaccuacgaagcaugccagc

SEQ ID NO: 9600 - RNA, 22 nt, Artificial Sequence
  Synthetic
gcaccuacgaagcaugccagcu

SEQ ID NO: 9601 - RNA, 22 nt, Artificial Sequence
  Synthetic
caccuacgaagcaugccagcuu

SEQ ID NO: 9602 - RNA, 22 nt, Artificial Sequence
  Synthetic
accuacgaagcaugccagcuuc

SEQ ID NO: 9603 - RNA, 22 nt, Artificial Sequence
  Synthetic
ccuacgaagcaugccagcuucc

SEQ ID NO: 9604 - RNA, 22 nt, Artificial Sequence
  Synthetic
cuacgaagcaugccagcuuccu

SEQ ID NO: 9605 - RNA, 22 nt, Artificial Sequence
  Synthetic
uacgaagcaugccagcuuccua

SEQ ID NO: 9606 - RNA, 22 nt, Artificial Sequence
  Synthetic
acgaagcaugccagcuuccuag

SEQ ID NO: 9607 - RNA, 22 nt, Artificial Sequence
  Synthetic
cgaagcaugccagcuuccuagg

SEQ ID NO: 9608 - RNA, 22 nt, Artificial Sequence
  Synthetic
gaagcaugccagcuuccuagga

SEQ ID NO: 9609 - RNA, 22 nt, Artificial Sequence
  Synthetic
aagcaugccagcuuccuaggau

SEQ ID NO: 9610 - RNA, 22 nt, Artificial Sequence
  Synthetic
agcaugccagcuuccuaggauu

SEQ ID NO: 9611 - RNA, 22 nt, Artificial Sequence
  Synthetic
gcaugccagcuuccuaggauug

SEQ ID NO: 9612 - RNA, 22 nt, Artificial Sequence
  Synthetic
caugccagcuuccuaggauugg

SEQ ID NO: 9613 - RNA, 22 nt, Artificial Sequence
  Synthetic
augccagcuuccuaggauuggc

SEQ ID NO: 9614 - RNA, 22 nt, Artificial Sequence
  Synthetic
ugccagcuuccuaggauuggcg

SEQ ID NO: 9615 - RNA, 22 nt, Artificial Sequence
  Synthetic
gccagcuuccuaggauuggcgg

SEQ ID NO: 9616 - RNA, 22 nt, Artificial Sequence
  Synthetic
ccagcuuccuaggauuggcggg

SEQ ID NO: 9617 - RNA, 22 nt, Artificial Sequence
  Synthetic
cagcuuccuaggauuggcgggg

SEQ ID NO: 9618 - RNA, 22 nt, Artificial Sequence
  Synthetic
agcuuccuaggauuggcgggga

SEQ ID NO: 9619 - RNA, 22 nt, Artificial Sequence
  Synthetic
gcuuccuaggauuggcggggau

SEQ ID NO: 9620 - RNA, 22 nt, Artificial Sequence
  Synthetic
cuuccuaggauuggcggggauu

SEQ ID NO: 9621 - RNA, 22 nt, Artificial Sequence
  Synthetic
uuccuaggauuggcggggauug

SEQ ID NO: 9622 - RNA, 22 nt, Artificial Sequence
  Synthetic
uccuaggauuggcggggauuga

SEQ ID NO: 9623 - RNA, 22 nt, Artificial Sequence
  Synthetic
ccuaggauuggcggggauugau

SEQ ID NO: 9624 - RNA, 22 nt, Artificial Sequence
  Synthetic
cuaggauuggcggggauugauc

SEQ ID NO: 9625 - RNA, 22 nt, Artificial Sequence
  Synthetic
uaggauuggcggggauugaucu

SEQ ID NO: 9626 - RNA, 22 nt, Artificial Sequence
  Synthetic
aggauuggcggggauugaucua

SEQ ID NO: 9627 - RNA, 22 nt, Artificial Sequence
  Synthetic
ggauuggcggggauugaucuag

SEQ ID NO: 9628 - RNA, 22 nt, Artificial Sequence
  Synthetic
gauuggcggggauugaucuagc

SEQ ID NO: 9629 - RNA, 22 nt, Artificial Sequence
  Synthetic
auuggcggggauugaucuagcg

SEQ ID NO: 9630 - RNA, 22 nt, Artificial Sequence
  Synthetic
uuggcggggauugaucuagcgg

SEQ ID NO: 9631 - RNA, 22 nt, Artificial Sequence
  Synthetic
uggcggggauugaucuagcggg

SEQ ID NO: 9632 - RNA, 22 nt, Artificial Sequence
  Synthetic
ggcggggauugaucuagcgggc

SEQ ID NO: 9633 - RNA, 22 nt, Artificial Sequence
  Synthetic
gcggggauugaucuagcgggcu

SEQ ID NO: 9634 - RNA, 22 nt, Artificial Sequence
  Synthetic
cggggauugaucuagcgggcuc

SEQ ID NO: 9635 - RNA, 22 nt, Artificial Sequence
  Synthetic
ggggauugaucuagcgggcucc

SEQ ID NO: 9636 - RNA, 22 nt, Artificial Sequence
  Synthetic
gggauugaucuagcgggcuccu

SEQ ID NO: 9637 - RNA, 22 nt, Artificial Sequence
  Synthetic
ggauugaucuagcgggcuccuc

SEQ ID NO: 9638 - RNA, 22 nt, Artificial Sequence
  Synthetic
gauugaucuagcgggcuccucu

SEQ ID NO: 9639 - RNA, 22 nt, Artificial Sequence
  Synthetic
auugaucuagcgggcuccucuu

SEQ ID NO: 9640 - RNA, 22 nt, Artificial Sequence
  Synthetic
uugaucuagcgggcuccucuug

SEQ ID NO: 9641 - RNA, 22 nt, Artificial Sequence
  Synthetic
ugaucuagcgggcuccucuugg

SEQ ID NO: 9642 - RNA, 22 nt, Artificial Sequence
  Synthetic
gaucuagcgggcuccucuuggg

SEQ ID NO: 9643 - RNA, 22 nt, Artificial Sequence
  Synthetic
aucuagcgggcuccucuugggu

SEQ ID NO: 9644 - RNA, 22 nt, Artificial Sequence
  Synthetic
ucuagcgggcuccucuugggug

SEQ ID NO: 9645 - RNA, 22 nt, Artificial Sequence
  Synthetic
cuagcgggcuccucuugggugc

SEQ ID NO: 9646 - RNA, 22 nt, Artificial Sequence
  Synthetic
uagcgggcuccucuugggugcg

SEQ ID NO: 9647 - RNA, 22 nt, Artificial Sequence
  Synthetic
agcgggcuccucuugggugcga

SEQ ID NO: 9648 - RNA, 22 nt, Artificial Sequence
  Synthetic
gcgggcuccucuugggugcgaa

SEQ ID NO: 9649 - RNA, 22 nt, Artificial Sequence
  Synthetic
cgggcuccucuugggugcgaau

SEQ ID NO: 9650 - RNA, 22 nt, Artificial Sequence
  Synthetic
gggcuccucuugggugcgaauu

SEQ ID NO: 9651 - RNA, 22 nt, Artificial Sequence
  Synthetic
ggcuccucuugggugcgaauua

SEQ ID NO: 9652 - RNA, 22 nt, Artificial Sequence
  Synthetic
gcuccucuugggugcgaauuag

SEQ ID NO: 9653 - RNA, 22 nt, Artificial Sequence
  Synthetic
cuccucuugggugcgaauuagg

SEQ ID NO: 9654 - RNA, 22 nt, Artificial Sequence
  Synthetic
uccucuugggugcgaauuaggg

SEQ ID NO: 9655 - RNA, 22 nt, Artificial Sequence
  Synthetic
ccucuugggugcgaauuagggg

SEQ ID NO: 9656 - RNA, 22 nt, Artificial Sequence
  Synthetic
cucuugggugcgaauuagggga

SEQ ID NO: 9657 - RNA, 22 nt, Artificial Sequence
  Synthetic
ucuugggugcgaauuaggggaa

SEQ ID NO: 9658 - RNA, 22 nt, Artificial Sequence
  Synthetic
cuugggugcgaauuaggggaag

SEQ ID NO: 9659 - RNA, 22 nt, Artificial Sequence
  Synthetic
uugggugcgaauuaggggaaga

SEQ ID NO: 9660 - RNA, 22 nt, Artificial Sequence
  Synthetic
ugggugcgaauuaggggaagaa

SEQ ID NO: 9661 - RNA, 22 nt, Artificial Sequence
  Synthetic
gggugcgaauuaggggaagaaa

SEQ ID NO: 9662 - RNA, 22 nt, Artificial Sequence
  Synthetic
ggugcgaauuaggggaagaaaa

SEQ ID NO: 9663 - RNA, 22 nt, Artificial Sequence
  Synthetic
gugcgaauuaggggaagaaaag

SEQ ID NO: 9664 - RNA, 22 nt, Artificial Sequence
  Synthetic
ugcgaauuaggggaagaaaagu

SEQ ID NO: 9665 - RNA, 22 nt, Artificial Sequence
  Synthetic
gcgaauuaggggaagaaaaguc

SEQ ID NO: 9666 - RNA, 22 nt, Artificial Sequence
  Synthetic
cgaauuaggggaagaaaagucc

SEQ ID NO: 9667 - RNA, 22 nt, Artificial Sequence
  Synthetic
gaauuaggggaagaaaaguccg

SEQ ID NO: 9668 - RNA, 22 nt, Artificial Sequence
  Synthetic
aauuaggggaagaaaaguccgg

SEQ ID NO: 9669 - RNA, 22 nt, Artificial Sequence
  Synthetic
auuaggggaagaaaaguccggc

SEQ ID NO: 9670 - RNA, 22 nt, Artificial Sequence
  Synthetic
uuaggggaagaaaaguccggcc

SEQ ID NO: 9671 - RNA, 22 nt, Artificial Sequence
  Synthetic
uaggggaagaaaaguccggccg

SEQ ID NO: 9672 - RNA, 22 nt, Artificial Sequence
  Synthetic
aggggaagaaaaguccggccga

SEQ ID NO: 9673 - RNA, 19 nt, Artificial Sequence
  Synthetic
gucacccccaggcuggagu

SEQ ID NO: 9674 - RNA, 19 nt, Artificial Sequence
  Synthetic
ucacccccaggcuggagug

SEQ ID NO: 9675 - RNA, 19 nt, Artificial Sequence
  Synthetic
cacccccaggcuggagugc

SEQ ID NO: 9676 - RNA, 19 nt, Artificial Sequence
  Synthetic
acccccaggcuggagugca

SEQ ID NO: 9677 - RNA, 19 nt, Artificial Sequence
  Synthetic
cccccaggcuggagugcag

SEQ ID NO: 9678 - RNA, 19 nt, Artificial Sequence
  Synthetic
ccccaggcuggagugcagu

SEQ ID NO: 9679 - RNA, 19 nt, Artificial Sequence
  Synthetic
cccaggcuggagugcagug

SEQ ID NO: 9680 - RNA, 19 nt, Artificial Sequence
  Synthetic
ccaggcuggagugcagugg

SEQ ID NO: 9681 - RNA, 19 nt, Artificial Sequence
  Synthetic
caggcuggagugcaguggc

SEQ ID NO: 9682 - RNA, 19 nt, Artificial Sequence
  Synthetic
aggcuggagugcaguggca

SEQ ID NO: 9683 - RNA, 19 nt, Artificial Sequence
  Synthetic
ggcuggagugcaguggcau

SEQ ID NO: 9684 - RNA, 19 nt, Artificial Sequence
  Synthetic
gcuggagugcaguggcaug

SEQ ID NO: 9685 - RNA, 19 nt, Artificial Sequence
  Synthetic
cuggagugcaguggcauga

SEQ ID NO: 9686 - RNA, 19 nt, Artificial Sequence
  Synthetic
uggagugcaguggcaugau

SEQ ID NO: 9687 - RNA, 19 nt, Artificial Sequence
  Synthetic
ggagugcaguggcaugauc

SEQ ID NO: 9688 - RNA, 19 nt, Artificial Sequence
  Synthetic
gagugcaguggcaugaucu

SEQ ID NO: 9689 - RNA, 19 nt, Artificial Sequence
  Synthetic
agugcaguggcaugaucuu

SEQ ID NO: 9690 - RNA, 19 nt, Artificial Sequence
  Synthetic
gugcaguggcaugaucuug

SEQ ID NO: 9691 - RNA, 19 nt, Artificial Sequence
  Synthetic
ugcaguggcaugaucuugg

SEQ ID NO: 9692 - RNA, 19 nt, Artificial Sequence
  Synthetic
gcaguggcaugaucuuggc

SEQ ID NO: 9693 - RNA, 19 nt, Artificial Sequence
  Synthetic
caguggcaugaucuuggcu

SEQ ID NO: 9694 - RNA, 19 nt, Artificial Sequence
  Synthetic
aguggcaugaucuuggcuc

SEQ ID NO: 9695 - RNA, 19 nt, Artificial Sequence
  Synthetic
guggcaugaucuuggcuca

SEQ ID NO: 9696 - RNA, 19 nt, Artificial Sequence
  Synthetic
uggcaugaucuuggcucac

SEQ ID NO: 9697 - RNA, 19 nt, Artificial Sequence
  Synthetic
ggcaugaucuuggcucacu

SEQ ID NO: 9698 - RNA, 19 nt, Artificial Sequence
  Synthetic
gcaugaucuuggcucacug

SEQ ID NO: 9699 - RNA, 19 nt, Artificial Sequence
  Synthetic
caugaucuuggcucacugc

SEQ ID NO: 9700 - RNA, 19 nt, Artificial Sequence
  Synthetic
augaucuuggcucacugca

SEQ ID NO: 9701 - RNA, 19 nt, Artificial Sequence
  Synthetic
ugaucuuggcucacugcaa

SEQ ID NO: 9702 - RNA, 19 nt, Artificial Sequence
  Synthetic
gaucuuggcucacugcaac

SEQ ID NO: 9703 - RNA, 19 nt, Artificial Sequence
  Synthetic
aucuuggcucacugcaacc

SEQ ID NO: 9704 - RNA, 19 nt, Artificial Sequence
  Synthetic
ucuuggcucacugcaaccu

SEQ ID NO: 9705 - RNA, 19 nt, Artificial Sequence
  Synthetic
cuuggcucacugcaaccuc

SEQ ID NO: 9706 - RNA, 19 nt, Artificial Sequence
  Synthetic
uuggcucacugcaaccucc

SEQ ID NO: 9707 - RNA, 19 nt, Artificial Sequence
  Synthetic
uggcucacugcaaccucca

SEQ ID NO: 9708 - RNA, 19 nt, Artificial Sequence
  Synthetic
ggcucacugcaaccuccac

SEQ ID NO: 9709 - RNA, 19 nt, Artificial Sequence
  Synthetic
gcucacugcaaccuccacc

SEQ ID NO: 9710 - RNA, 19 nt, Artificial Sequence
  Synthetic
cucacugcaaccuccaccu

SEQ ID NO: 9711 - RNA, 19 nt, Artificial Sequence
  Synthetic
ucacugcaaccuccaccuc

SEQ ID NO: 9712 - RNA, 19 nt, Artificial Sequence
  Synthetic
cacugcaaccuccaccucc

SEQ ID NO: 9713 - RNA, 19 nt, Artificial Sequence
  Synthetic
acugcaaccuccaccuccu

SEQ ID NO: 9714 - RNA, 19 nt, Artificial Sequence
  Synthetic
cugcaaccuccaccuccua

SEQ ID NO: 9715 - RNA, 19 nt, Artificial Sequence
  Synthetic
ugcaaccuccaccuccuag

SEQ ID NO: 9716 - RNA, 19 nt, Artificial Sequence
  Synthetic
gcaaccuccaccuccuagg

SEQ ID NO: 9717 - RNA, 19 nt, Artificial Sequence
  Synthetic
caaccuccaccuccuaggu

SEQ ID NO: 9718 - RNA, 19 nt, Artificial Sequence
  Synthetic
aaccuccaccuccuagguu

SEQ ID NO: 9719 - RNA, 19 nt, Artificial Sequence
  Synthetic
accuccaccuccuagguuc

SEQ ID NO: 9720 - RNA, 19 nt, Artificial Sequence
  Synthetic
ccuccaccuccuagguuca

SEQ ID NO: 9721 - RNA, 19 nt, Artificial Sequence
  Synthetic
cuccaccuccuagguucaa

SEQ ID NO: 9722 - RNA, 19 nt, Artificial Sequence
  Synthetic
uccaccuccuagguucaag

SEQ ID NO: 9723 - RNA, 19 nt, Artificial Sequence
  Synthetic
ccaccuccuagguucaagu

SEQ ID NO: 9724 - RNA, 19 nt, Artificial Sequence
  Synthetic
caccuccuagguucaagug

SEQ ID NO: 9725 - RNA, 19 nt, Artificial Sequence
  Synthetic
accuccuagguucaaguga

SEQ ID NO: 9726 - RNA, 19 nt, Artificial Sequence
  Synthetic
ccuccuagguucaagugau

SEQ ID NO: 9727 - RNA, 19 nt, Artificial Sequence
  Synthetic
cuccuagguucaagugauu

SEQ ID NO: 9728 - RNA, 19 nt, Artificial Sequence
  Synthetic
uccuagguucaagugauuc

SEQ ID NO: 9729 - RNA, 19 nt, Artificial Sequence
  Synthetic
ccuagguucaagugauucu

SEQ ID NO: 9730 - RNA, 19 nt, Artificial Sequence
  Synthetic
cuagguucaagugauucuu

SEQ ID NO: 9731 - RNA, 19 nt, Artificial Sequence
  Synthetic
uagguucaagugauucuuc

SEQ ID NO: 9732 - RNA, 19 nt, Artificial Sequence
  Synthetic
agguucaagugauucuucu

SEQ ID NO: 9733 - RNA, 19 nt, Artificial Sequence
  Synthetic
gguucaagugauucuucuc

SEQ ID NO: 9734 - RNA, 19 nt, Artificial Sequence
  Synthetic
guucaagugauucuucucu

SEQ ID NO: 9735 - RNA, 19 nt, Artificial Sequence
  Synthetic
uucaagugauucuucucug

SEQ ID NO: 9736 - RNA, 19 nt, Artificial Sequence
  Synthetic
ucaagugauucuucucugc

SEQ ID NO: 9737 - RNA, 19 nt, Artificial Sequence
  Synthetic
caagugauucuucucugcc

SEQ ID NO: 9738 - RNA, 19 nt, Artificial Sequence
  Synthetic
aagugauucuucucugccu

SEQ ID NO: 9739 - RNA, 19 nt, Artificial Sequence
  Synthetic
agugauucuucucugccuc

SEQ ID NO: 9740 - RNA, 19 nt, Artificial Sequence
  Synthetic
gugauucuucucugccuca

SEQ ID NO: 9741 - RNA, 19 nt, Artificial Sequence
  Synthetic
ugauucuucucugccucag

SEQ ID NO: 9742 - RNA, 19 nt, Artificial Sequence
  Synthetic
gauucuucucugccucagu

SEQ ID NO: 9743 - RNA, 19 nt, Artificial Sequence
  Synthetic
auucuucucugccucaguu

SEQ ID NO: 9744 - RNA, 19 nt, Artificial Sequence
  Synthetic
uucuucucugccucaguuu

SEQ ID NO: 9745 - RNA, 19 nt, Artificial Sequence
  Synthetic
ucuucucugccucaguuuc

SEQ ID NO: 9746 - RNA, 19 nt, Artificial Sequence
  Synthetic
cuucucugccucaguuucc

SEQ ID NO: 9747 - RNA, 19 nt, Artificial Sequence
  Synthetic
uucucugccucaguuuccc

SEQ ID NO: 9748 - RNA, 19 nt, Artificial Sequence
  Synthetic
ucucugccucaguuuccca

SEQ ID NO: 9749 - RNA, 19 nt, Artificial Sequence
  Synthetic
cucugccucaguuucccaa

SEQ ID NO: 9750 - RNA, 19 nt, Artificial Sequence
  Synthetic
ucugccucaguuucccaag

SEQ ID NO: 9751 - RNA, 19 nt, Artificial Sequence
  Synthetic
cugccucaguuucccaagu

SEQ ID NO: 9752 - RNA, 19 nt, Artificial Sequence
  Synthetic
ugccucaguuucccaagua

SEQ ID NO: 9753 - RNA, 19 nt, Artificial Sequence
  Synthetic
gccucaguuucccaaguag

SEQ ID NO: 9754 - RNA, 19 nt, Artificial Sequence
  Synthetic
ccucaguuucccaaguagc

SEQ ID NO: 9755 - RNA, 19 nt, Artificial Sequence
  Synthetic
cucaguuucccaaguagcu

SEQ ID NO: 9756 - RNA, 19 nt, Artificial Sequence
  Synthetic
ucaguuucccaaguagcug

SEQ ID NO: 9757 - RNA, 19 nt, Artificial Sequence
  Synthetic
caguuucccaaguagcugg

SEQ ID NO: 9758 - RNA, 19 nt, Artificial Sequence
  Synthetic
aguuucccaaguagcuggg

SEQ ID NO: 9759 - RNA, 19 nt, Artificial Sequence
  Synthetic
guuucccaaguagcuggga

SEQ ID NO: 9760 - RNA, 19 nt, Artificial Sequence
  Synthetic
uuucccaaguagcugggac

SEQ ID NO: 9761 - RNA, 19 nt, Artificial Sequence
  Synthetic
uucccaaguagcugggacu

SEQ ID NO: 9762 - RNA, 19 nt, Artificial Sequence
  Synthetic
ucccaaguagcugggacua

SEQ ID NO: 9763 - RNA, 19 nt, Artificial Sequence
  Synthetic
cccaaguagcugggacuac

SEQ ID NO: 9764 - RNA, 19 nt, Artificial Sequence
  Synthetic
ccaaguagcugggacuaca

SEQ ID NO: 9765 - RNA, 19 nt, Artificial Sequence
  Synthetic
caaguagcugggacuacag

SEQ ID NO: 9766 - RNA, 19 nt, Artificial Sequence
  Synthetic
aaguagcugggacuacagg

SEQ ID NO: 9767 - RNA, 19 nt, Artificial Sequence
  Synthetic
aguagcugggacuacaggc

SEQ ID NO: 9768 - RNA, 19 nt, Artificial Sequence
  Synthetic
guagcugggacuacaggca

SEQ ID NO: 9769 - RNA, 19 nt, Artificial Sequence
  Synthetic
uagcugggacuacaggcac

SEQ ID NO: 9770 - RNA, 19 nt, Artificial Sequence
  Synthetic
agcugggacuacaggcacg

SEQ ID NO: 9771 - RNA, 19 nt, Artificial Sequence
  Synthetic
gcugggacuacaggcacgc

SEQ ID NO: 9772 - RNA, 19 nt, Artificial Sequence
  Synthetic
cugggacuacaggcacgca

SEQ ID NO: 9773 - RNA, 19 nt, Artificial Sequence
  Synthetic
ugggacuacaggcacgcac

SEQ ID NO: 9774 - RNA, 19 nt, Artificial Sequence
  Synthetic
gggacuacaggcacgcacc

SEQ ID NO: 9775 - RNA, 19 nt, Artificial Sequence
  Synthetic
ggacuacaggcacgcacca

SEQ ID NO: 9776 - RNA, 19 nt, Artificial Sequence
  Synthetic
gacuacaggcacgcaccac

SEQ ID NO: 9777 - RNA, 19 nt, Artificial Sequence
  Synthetic
acuacaggcacgcaccacc

SEQ ID NO: 9778 - RNA, 19 nt, Artificial Sequence
  Synthetic
cuacaggcacgcaccacca

SEQ ID NO: 9779 - RNA, 19 nt, Artificial Sequence
  Synthetic
uacaggcacgcaccaccac

SEQ ID NO: 9780 - RNA, 19 nt, Artificial Sequence
  Synthetic
acaggcacgcaccaccacg

SEQ ID NO: 9781 - RNA, 19 nt, Artificial Sequence
  Synthetic
caggcacgcaccaccacgc

SEQ ID NO: 9782 - RNA, 19 nt, Artificial Sequence
  Synthetic
aggcacgcaccaccacgcc

SEQ ID NO: 9783 - RNA, 19 nt, Artificial Sequence
  Synthetic
ggcacgcaccaccacgccu

SEQ ID NO: 9784 - RNA, 19 nt, Artificial Sequence
  Synthetic
gcacgcaccaccacgccug

SEQ ID NO: 9785 - RNA, 19 nt, Artificial Sequence
  Synthetic
cacgcaccaccacgccugg

SEQ ID NO: 9786 - RNA, 19 nt, Artificial Sequence
  Synthetic
acgcaccaccacgccuggc

SEQ ID NO: 9787 - RNA, 19 nt, Artificial Sequence
  Synthetic
cgcaccaccacgccuggcu

SEQ ID NO: 9788 - RNA, 19 nt, Artificial Sequence
  Synthetic
gcaccaccacgccuggcua

SEQ ID NO: 9789 - RNA, 19 nt, Artificial Sequence
  Synthetic
caccaccacgccuggcuau

SEQ ID NO: 9790 - RNA, 19 nt, Artificial Sequence
  Synthetic
accaccacgccuggcuauu

SEQ ID NO: 9791 - RNA, 19 nt, Artificial Sequence
  Synthetic
ccaccacgccuggcuauuu

SEQ ID NO: 9792 - RNA, 19 nt, Artificial Sequence
  Synthetic
caccacgccuggcuauuuu

SEQ ID NO: 9793 - RNA, 19 nt, Artificial Sequence
  Synthetic
accacgccuggcuauuuuu

SEQ ID NO: 9794 - RNA, 19 nt, Artificial Sequence
  Synthetic
ccacgccuggcuauuuuuu

SEQ ID NO: 9795 - RNA, 19 nt, Artificial Sequence
  Synthetic
cacgccuggcuauuuuuuu

SEQ ID NO: 9796 - RNA, 19 nt, Artificial Sequence
  Synthetic
acgccuggcuauuuuuuua

SEQ ID NO: 9797 - RNA, 19 nt, Artificial Sequence
  Synthetic
cgccuggcuauuuuuuuau

SEQ ID NO: 9798 - RNA, 19 nt, Artificial Sequence
  Synthetic
gccuggcuauuuuuuuauu

SEQ ID NO: 9799 - RNA, 19 nt, Artificial Sequence
  Synthetic
ccuggcuauuuuuuuauuu

SEQ ID NO: 9800 - RNA, 19 nt, Artificial Sequence
  Synthetic
cuggcuauuuuuuuauuuu

SEQ ID NO: 9801 - RNA, 19 nt, Artificial Sequence
  Synthetic
uggcuauuuuuuuauuuuu

SEQ ID NO: 9802 - RNA, 19 nt, Artificial Sequence
  Synthetic
ggcuauuuuuuuauuuuua

SEQ ID NO: 9803 - RNA, 19 nt, Artificial Sequence
  Synthetic
gcuauuuuuuuauuuuuau

SEQ ID NO: 9804 - RNA, 19 nt, Artificial Sequence
  Synthetic
cuauuuuuuuauuuuuauu

SEQ ID NO: 9805 - RNA, 19 nt, Artificial Sequence
  Synthetic
uauuuuuuuauuuuuauuu

SEQ ID NO: 9806 - RNA, 19 nt, Artificial Sequence
  Synthetic
auuuuuuuauuuuuauuuu

SEQ ID NO: 9807 - RNA, 19 nt, Artificial Sequence
  Synthetic
uuuuuuuauuuuuauuuuu

SEQ ID NO: 9808 - RNA, 19 nt, Artificial Sequence
  Synthetic
uuuuuuauuuuuauuuuua

SEQ ID NO: 9809 - RNA, 19 nt, Artificial Sequence
  Synthetic
uuuuuauuuuuauuuuuag

SEQ ID NO: 9810 - RNA, 19 nt, Artificial Sequence
  Synthetic
uuuuauuuuuauuuuuagu

SEQ ID NO: 9811 - RNA, 19 nt, Artificial Sequence
  Synthetic
uuuauuuuuauuuuuagua

SEQ ID NO: 9812 - RNA, 19 nt, Artificial Sequence
  Synthetic
uuauuuuuauuuuuaguag

SEQ ID NO: 9813 - RNA, 19 nt, Artificial Sequence
  Synthetic
uauuuuuauuuuuaguaga

SEQ ID NO: 9814 - RNA, 19 nt, Artificial Sequence
  Synthetic
auuuuuauuuuuaguagag

SEQ ID NO: 9815 - RNA, 19 nt, Artificial Sequence
  Synthetic
uuuuuauuuuuaguagaga

SEQ ID NO: 9816 - RNA, 19 nt, Artificial Sequence
  Synthetic
uuuuauuuuuaguagagac

SEQ ID NO: 9817 - RNA, 19 nt, Artificial Sequence
  Synthetic
uuuauuuuuaguagagaca

SEQ ID NO: 9818 - RNA, 19 nt, Artificial Sequence
  Synthetic
uuauuuuuaguagagacag

SEQ ID NO: 9819 - RNA, 19 nt, Artificial Sequence
  Synthetic
uauuuuuaguagagacagg

SEQ ID NO: 9820 - RNA, 19 nt, Artificial Sequence
  Synthetic
auuuuuaguagagacaggg

SEQ ID NO: 9821 - RNA, 19 nt, Artificial Sequence
  Synthetic
uuuuuaguagagacagggu

SEQ ID NO: 9822 - RNA, 19 nt, Artificial Sequence
  Synthetic
uuuuaguagagacaggguu

SEQ ID NO: 9823 - RNA, 19 nt, Artificial Sequence
  Synthetic
uuuaguagagacaggguuu

SEQ ID NO: 9824 - RNA, 19 nt, Artificial Sequence
  Synthetic
uuaguagagacaggguuuc

SEQ ID NO: 9825 - RNA, 19 nt, Artificial Sequence
  Synthetic
uaguagagacaggguuuca

SEQ ID NO: 9826 - RNA, 19 nt, Artificial Sequence
  Synthetic
aguagagacaggguuucac

SEQ ID NO: 9827 - RNA, 19 nt, Artificial Sequence
  Synthetic
guagagacaggguuucacc

SEQ ID NO: 9828 - RNA, 19 nt, Artificial Sequence
  Synthetic
uagagacaggguuucacca

SEQ ID NO: 9829 - RNA, 19 nt, Artificial Sequence
  Synthetic
agagacaggguuucaccau

SEQ ID NO: 9830 - RNA, 19 nt, Artificial Sequence
  Synthetic
gagacaggguuucaccaug

SEQ ID NO: 9831 - RNA, 19 nt, Artificial Sequence
  Synthetic
agacaggguuucaccaugu

SEQ ID NO: 9832 - RNA, 19 nt, Artificial Sequence
  Synthetic
gacaggguuucaccauguu

SEQ ID NO: 9833 - RNA, 19 nt, Artificial Sequence
  Synthetic
acaggguuucaccauguug

SEQ ID NO: 9834 - RNA, 19 nt, Artificial Sequence
  Synthetic
caggguuucaccauguugg

SEQ ID NO: 9835 - RNA, 19 nt, Artificial Sequence
  Synthetic
aggguuucaccauguuggc

SEQ ID NO: 9836 - RNA, 19 nt, Artificial Sequence
  Synthetic
ggguuucaccauguuggcc

SEQ ID NO: 9837 - RNA, 19 nt, Artificial Sequence
  Synthetic
gguuucaccauguuggccg

SEQ ID NO: 9838 - RNA, 19 nt, Artificial Sequence
  Synthetic
guuucaccauguuggccgg

SEQ ID NO: 9839 - RNA, 19 nt, Artificial Sequence
  Synthetic
uuucaccauguuggccggg

SEQ ID NO: 9840 - RNA, 19 nt, Artificial Sequence
  Synthetic
uucaccauguuggccgggc

SEQ ID NO: 9841 - RNA, 19 nt, Artificial Sequence
  Synthetic
ucaccauguuggccgggcu

SEQ ID NO: 9842 - RNA, 19 nt, Artificial Sequence
  Synthetic
caccauguuggccgggcug

SEQ ID NO: 9843 - RNA, 19 nt, Artificial Sequence
  Synthetic
accauguuggccgggcugg

SEQ ID NO: 9844 - RNA, 19 nt, Artificial Sequence
  Synthetic
ccauguuggccgggcuggu

SEQ ID NO: 9845 - RNA, 19 nt, Artificial Sequence
  Synthetic
cauguuggccgggcugguc

SEQ ID NO: 9846 - RNA, 19 nt, Artificial Sequence
  Synthetic
auguuggccgggcuggucu

SEQ ID NO: 9847 - RNA, 19 nt, Artificial Sequence
  Synthetic
uguuggccgggcuggucuu

SEQ ID NO: 9848 - RNA, 19 nt, Artificial Sequence
  Synthetic
guuggccgggcuggucuug

SEQ ID NO: 9849 - RNA, 19 nt, Artificial Sequence
  Synthetic
uuggccgggcuggucuuga

SEQ ID NO: 9850 - RNA, 19 nt, Artificial Sequence
  Synthetic
uggccgggcuggucuugaa

SEQ ID NO: 9851 - RNA, 19 nt, Artificial Sequence
  Synthetic
ggccgggcuggucuugaac

SEQ ID NO: 9852 - RNA, 19 nt, Artificial Sequence
  Synthetic
gccgggcuggucuugaacu

SEQ ID NO: 9853 - RNA, 19 nt, Artificial Sequence
  Synthetic
ccgggcuggucuugaacuc

SEQ ID NO: 9854 - RNA, 19 nt, Artificial Sequence
  Synthetic
cgggcuggucuugaacucc

SEQ ID NO: 9855 - RNA, 19 nt, Artificial Sequence
  Synthetic
gggcuggucuugaacuccu

SEQ ID NO: 9856 - RNA, 19 nt, Artificial Sequence
  Synthetic
ggcuggucuugaacuccug

SEQ ID NO: 9857 - RNA, 19 nt, Artificial Sequence
  Synthetic
gcuggucuugaacuccuga

SEQ ID NO: 9858 - RNA, 19 nt, Artificial Sequence
  Synthetic
cuggucuugaacuccugac

SEQ ID NO: 9859 - RNA, 19 nt, Artificial Sequence
  Synthetic
uggucuugaacuccugacc

SEQ ID NO: 9860 - RNA, 19 nt, Artificial Sequence
  Synthetic
ggucuugaacuccugaccu

SEQ ID NO: 9861 - RNA, 19 nt, Artificial Sequence
  Synthetic
gucuugaacuccugaccuc

SEQ ID NO: 9862 - RNA, 19 nt, Artificial Sequence
  Synthetic
ucuugaacuccugaccuca

SEQ ID NO: 9863 - RNA, 19 nt, Artificial Sequence
  Synthetic
cuugaacuccugaccucaa

SEQ ID NO: 9864 - RNA, 19 nt, Artificial Sequence
  Synthetic
uugaacuccugaccucaag

SEQ ID NO: 9865 - RNA, 19 nt, Artificial Sequence
  Synthetic
ugaacuccugaccucaagu

SEQ ID NO: 9866 - RNA, 19 nt, Artificial Sequence
  Synthetic
gaacuccugaccucaagug

SEQ ID NO: 9867 - RNA, 19 nt, Artificial Sequence
  Synthetic
aacuccugaccucaaguga

SEQ ID NO: 9868 - RNA, 19 nt, Artificial Sequence
  Synthetic
acuccugaccucaagugau

SEQ ID NO: 9869 - RNA, 19 nt, Artificial Sequence
  Synthetic
cuccugaccucaagugauc

SEQ ID NO: 9870 - RNA, 19 nt, Artificial Sequence
  Synthetic
uccugaccucaagugaucu

SEQ ID NO: 9871 - RNA, 19 nt, Artificial Sequence
  Synthetic
ccugaccucaagugaucug

SEQ ID NO: 9872 - RNA, 19 nt, Artificial Sequence
  Synthetic
cugaccucaagugaucugc

SEQ ID NO: 9873 - RNA, 19 nt, Artificial Sequence
  Synthetic
ugaccucaagugaucugcc

SEQ ID NO: 9874 - RNA, 19 nt, Artificial Sequence
  Synthetic
gaccucaagugaucugccc

SEQ ID NO: 9875 - RNA, 19 nt, Artificial Sequence
  Synthetic
accucaagugaucugccca

SEQ ID NO: 9876 - RNA, 19 nt, Artificial Sequence
  Synthetic
ccucaagugaucugcccac

SEQ ID NO: 9877 - RNA, 19 nt, Artificial Sequence
  Synthetic
cucaagugaucugcccacc

SEQ ID NO: 9878 - RNA, 19 nt, Artificial Sequence
  Synthetic
ucaagugaucugcccaccu

SEQ ID NO: 9879 - RNA, 19 nt, Artificial Sequence
  Synthetic
caagugaucugcccaccuc

SEQ ID NO: 9880 - RNA, 19 nt, Artificial Sequence
  Synthetic
aagugaucugcccaccuca

SEQ ID NO: 9881 - RNA, 19 nt, Artificial Sequence
  Synthetic
agugaucugcccaccucag

SEQ ID NO: 9882 - RNA, 19 nt, Artificial Sequence
  Synthetic
gugaucugcccaccucagc

SEQ ID NO: 9883 - RNA, 19 nt, Artificial Sequence
  Synthetic
ugaucugcccaccucagcc

SEQ ID NO: 9884 - RNA, 19 nt, Artificial Sequence
  Synthetic
gaucugcccaccucagccu

SEQ ID NO: 9885 - RNA, 19 nt, Artificial Sequence
  Synthetic
aucugcccaccucagccuc

SEQ ID NO: 9886 - RNA, 19 nt, Artificial Sequence
  Synthetic
ucugcccaccucagccucc

SEQ ID NO: 9887 - RNA, 19 nt, Artificial Sequence
  Synthetic
cugcccaccucagccuccc

SEQ ID NO: 9888 - RNA, 19 nt, Artificial Sequence
  Synthetic
ugcccaccucagccuccca

SEQ ID NO: 9889 - RNA, 19 nt, Artificial Sequence
  Synthetic
gcccaccucagccucccaa

SEQ ID NO: 9890 - RNA, 19 nt, Artificial Sequence
  Synthetic
cccaccucagccucccaaa

SEQ ID NO: 9891 - RNA, 19 nt, Artificial Sequence
  Synthetic
ccaccucagccucccaaag

SEQ ID NO: 9892 - RNA, 19 nt, Artificial Sequence
  Synthetic
caccucagccucccaaagu

SEQ ID NO: 9893 - RNA, 19 nt, Artificial Sequence
  Synthetic
accucagccucccaaagug

SEQ ID NO: 9894 - RNA, 19 nt, Artificial Sequence
  Synthetic
ccucagccucccaaagugc

SEQ ID NO: 9895 - RNA, 19 nt, Artificial Sequence
  Synthetic
cucagccucccaaagugcu

SEQ ID NO: 9896 - RNA, 19 nt, Artificial Sequence
  Synthetic
ucagccucccaaagugcug

SEQ ID NO: 9897 - RNA, 19 nt, Artificial Sequence
  Synthetic
cagccucccaaagugcugg

SEQ ID NO: 9898 - RNA, 19 nt, Artificial Sequence
  Synthetic
agccucccaaagugcuggg

SEQ ID NO: 9899 - RNA, 19 nt, Artificial Sequence
  Synthetic
gccucccaaagugcuggga

SEQ ID NO: 9900 - RNA, 19 nt, Artificial Sequence
  Synthetic
ccucccaaagugcugggau

SEQ ID NO: 9901 - RNA, 19 nt, Artificial Sequence
  Synthetic
cucccaaagugcugggauu

SEQ ID NO: 9902 - RNA, 19 nt, Artificial Sequence
  Synthetic
ucccaaagugcugggauua

SEQ ID NO: 9903 - RNA, 19 nt, Artificial Sequence
  Synthetic
cccaaagugcugggauuac

SEQ ID NO: 9904 - RNA, 19 nt, Artificial Sequence
  Synthetic
ccaaagugcugggauuaca

SEQ ID NO: 9905 - RNA, 19 nt, Artificial Sequence
  Synthetic
caaagugcugggauuacag

SEQ ID NO: 9906 - RNA, 19 nt, Artificial Sequence
  Synthetic
aaagugcugggauuacagg

SEQ ID NO: 9907 - RNA, 19 nt, Artificial Sequence
  Synthetic
aagugcugggauuacaggc

SEQ ID NO: 9908 - RNA, 19 nt, Artificial Sequence
  Synthetic
agugcugggauuacaggcg

SEQ ID NO: 9909 - RNA, 19 nt, Artificial Sequence
  Synthetic
gugcugggauuacaggcgu

SEQ ID NO: 9910 - RNA, 19 nt, Artificial Sequence
  Synthetic
ugcugggauuacaggcgug

SEQ ID NO: 9911 - RNA, 19 nt, Artificial Sequence
  Synthetic
gcugggauuacaggcguga

SEQ ID NO: 9912 - RNA, 19 nt, Artificial Sequence
  Synthetic
cugggauuacaggcgugag

SEQ ID NO: 9913 - RNA, 19 nt, Artificial Sequence
  Synthetic
ugggauuacaggcgugagc

SEQ ID NO: 9914 - RNA, 19 nt, Artificial Sequence
  Synthetic
gggauuacaggcgugagcc

SEQ ID NO: 9915 - RNA, 19 nt, Artificial Sequence
  Synthetic
ggauuacaggcgugagcca

SEQ ID NO: 9916 - RNA, 19 nt, Artificial Sequence
  Synthetic
gauuacaggcgugagccac

SEQ ID NO: 9917 - RNA, 19 nt, Artificial Sequence
  Synthetic
auuacaggcgugagccacu

SEQ ID NO: 9918 - RNA, 19 nt, Artificial Sequence
  Synthetic
uuacaggcgugagccacug

SEQ ID NO: 9919 - RNA, 19 nt, Artificial Sequence
  Synthetic
uacaggcgugagccacugc

SEQ ID NO: 9920 - RNA, 19 nt, Artificial Sequence
  Synthetic
acaggcgugagccacugcg

SEQ ID NO: 9921 - RNA, 19 nt, Artificial Sequence
  Synthetic
caggcgugagccacugcgc

SEQ ID NO: 9922 - RNA, 19 nt, Artificial Sequence
  Synthetic
aggcgugagccacugcgcc

SEQ ID NO: 9923 - RNA, 19 nt, Artificial Sequence
  Synthetic
ggcgugagccacugcgccc

SEQ ID NO: 9924 - RNA, 19 nt, Artificial Sequence
  Synthetic
gcgugagccacugcgcccc

SEQ ID NO: 9925 - RNA, 19 nt, Artificial Sequence
  Synthetic
cgugagccacugcgccccg

SEQ ID NO: 9926 - RNA, 19 nt, Artificial Sequence
  Synthetic
gugagccacugcgccccgc

SEQ ID NO: 9927 - RNA, 19 nt, Artificial Sequence
  Synthetic
ugagccacugcgccccgcc

SEQ ID NO: 9928 - RNA, 19 nt, Artificial Sequence
  Synthetic
gagccacugcgccccgccc

SEQ ID NO: 9929 - RNA, 19 nt, Artificial Sequence
  Synthetic
agccacugcgccccgccca

SEQ ID NO: 9930 - RNA, 19 nt, Artificial Sequence
  Synthetic
gccacugcgccccgcccac

SEQ ID NO: 9931 - RNA, 19 nt, Artificial Sequence
  Synthetic
ccacugcgccccgcccacu

SEQ ID NO: 9932 - RNA, 19 nt, Artificial Sequence
  Synthetic
cacugcgccccgcccacug

SEQ ID NO: 9933 - RNA, 19 nt, Artificial Sequence
  Synthetic
acugcgccccgcccacugu

SEQ ID NO: 9934 - RNA, 19 nt, Artificial Sequence
  Synthetic
cugcgccccgcccacuguc

SEQ ID NO: 9935 - RNA, 19 nt, Artificial Sequence
  Synthetic
ugcgccccgcccacugucu

SEQ ID NO: 9936 - RNA, 19 nt, Artificial Sequence
  Synthetic
gcgccccgcccacugucuu

SEQ ID NO: 9937 - RNA, 19 nt, Artificial Sequence
  Synthetic
cgccccgcccacugucuuu

SEQ ID NO: 9938 - RNA, 19 nt, Artificial Sequence
  Synthetic
gccccgcccacugucuuuu

SEQ ID NO: 9939 - RNA, 19 nt, Artificial Sequence
  Synthetic
ccccgcccacugucuuuuu

SEQ ID NO: 9940 - RNA, 19 nt, Artificial Sequence
  Synthetic
cccgcccacugucuuuuuu

SEQ ID NO: 9941 - RNA, 19 nt, Artificial Sequence
  Synthetic
ccgcccacugucuuuuuuu

SEQ ID NO: 9942 - RNA, 19 nt, Artificial Sequence
  Synthetic
cgcccacugucuuuuuuuu

SEQ ID NO: 9943 - RNA, 19 nt, Artificial Sequence
  Synthetic
gcccacugucuuuuuuuuu

SEQ ID NO: 9944 - RNA, 19 nt, Artificial Sequence
  Synthetic
cccacugucuuuuuuuuuu

SEQ ID NO: 9945 - RNA, 19 nt, Artificial Sequence
  Synthetic
ccacugucuuuuuuuuuuu

SEQ ID NO: 9946 - RNA, 19 nt, Artificial Sequence
  Synthetic
cacugucuuuuuuuuuuuu

SEQ ID NO: 9947 - RNA, 19 nt, Artificial Sequence
  Synthetic
acugucuuuuuuuuuuuuu

SEQ ID NO: 9948 - RNA, 19 nt, Artificial Sequence
  Synthetic
cugucuuuuuuuuuuuuuu

SEQ ID NO: 9949 - RNA, 19 nt, Artificial Sequence
  Synthetic
ugucuuuuuuuuuuuuuua

SEQ ID NO: 9950 - RNA, 19 nt, Artificial Sequence
  Synthetic
gucuuuuuuuuuuuuuuaa

SEQ ID NO: 9951 - RNA, 19 nt, Artificial Sequence
  Synthetic
ucuuuuuuuuuuuuuuaaa

SEQ ID NO: 9952 - RNA, 19 nt, Artificial Sequence
  Synthetic
cuuuuuuuuuuuuuuaaag

SEQ ID NO: 9953 - RNA, 19 nt, Artificial Sequence
  Synthetic
uuuuuuuuuuuuuuaaagg

SEQ ID NO: 9954 - RNA, 19 nt, Artificial Sequence
  Synthetic
uuuuuuuuuuuuuaaagga

SEQ ID NO: 9955 - RNA, 19 nt, Artificial Sequence
  Synthetic
uuuuuuuuuuuuaaaggac

SEQ ID NO: 9956 - RNA, 19 nt, Artificial Sequence
  Synthetic
uuuuuuuuuuuaaaggacc

SEQ ID NO: 9957 - RNA, 19 nt, Artificial Sequence
  Synthetic
uuuuuuuuuuaaaggaccu

SEQ ID NO: 9958 - RNA, 19 nt, Artificial Sequence
  Synthetic
uuuuuuuuuaaaggaccuc

SEQ ID NO: 9959 - RNA, 19 nt, Artificial Sequence
  Synthetic
uuuuuuuuaaaggaccuca

SEQ ID NO: 9960 - RNA, 19 nt, Artificial Sequence
  Synthetic
uuuuuuuaaaggaccucag

SEQ ID NO: 9961 - RNA, 19 nt, Artificial Sequence
  Synthetic
uuuuuuaaaggaccucagg

SEQ ID NO: 9962 - RNA, 19 nt, Artificial Sequence
  Synthetic
uuuuuaaaggaccucaggu

SEQ ID NO: 9963 - RNA, 19 nt, Artificial Sequence
  Synthetic
uuuuaaaggaccucaggug

SEQ ID NO: 9964 - RNA, 19 nt, Artificial Sequence
  Synthetic
uuuaaaggaccucagguga

SEQ ID NO: 9965 - RNA, 19 nt, Artificial Sequence
  Synthetic
uuaaaggaccucaggugau

SEQ ID NO: 9966 - RNA, 19 nt, Artificial Sequence
  Synthetic
uaaaggaccucaggugauu

SEQ ID NO: 9967 - RNA, 19 nt, Artificial Sequence
  Synthetic
aaaggaccucaggugauuc

SEQ ID NO: 9968 - RNA, 19 nt, Artificial Sequence
  Synthetic
aaggaccucaggugauucu

SEQ ID NO: 9969 - RNA, 19 nt, Artificial Sequence
  Synthetic
aggaccucaggugauucug

SEQ ID NO: 9970 - RNA, 19 nt, Artificial Sequence
  Synthetic
ggaccucaggugauucuga

SEQ ID NO: 9971 - RNA, 19 nt, Artificial Sequence
  Synthetic
gaccucaggugauucugau

SEQ ID NO: 9972 - RNA, 19 nt, Artificial Sequence
  Synthetic
accucaggugauucugaug

SEQ ID NO: 9973 - RNA, 19 nt, Artificial Sequence
  Synthetic
ccucaggugauucugaugc

SEQ ID NO: 9974 - RNA, 19 nt, Artificial Sequence
  Synthetic
cucaggugauucugaugca

SEQ ID NO: 9975 - RNA, 19 nt, Artificial Sequence
  Synthetic
ucaggugauucugaugcac

SEQ ID NO: 9976 - RNA, 19 nt, Artificial Sequence
  Synthetic
caggugauucugaugcaca

SEQ ID NO: 9977 - RNA, 19 nt, Artificial Sequence
  Synthetic
aggugauucugaugcacag

SEQ ID NO: 9978 - RNA, 19 nt, Artificial Sequence
  Synthetic
ggugauucugaugcacagc

SEQ ID NO: 9979 - RNA, 19 nt, Artificial Sequence
  Synthetic
gugauucugaugcacagcu

SEQ ID NO: 9980 - RNA, 19 nt, Artificial Sequence
  Synthetic
ugauucugaugcacagcuc

SEQ ID NO: 9981 - RNA, 19 nt, Artificial Sequence
  Synthetic
gauucugaugcacagcuca

SEQ ID NO: 9982 - RNA, 19 nt, Artificial Sequence
  Synthetic
auucugaugcacagcucag

SEQ ID NO: 9983 - RNA, 19 nt, Artificial Sequence
  Synthetic
uucugaugcacagcucagg

SEQ ID NO: 9984 - RNA, 19 nt, Artificial Sequence
  Synthetic
ucugaugcacagcucaggu

SEQ ID NO: 9985 - RNA, 19 nt, Artificial Sequence
  Synthetic
cugaugcacagcucagguu

SEQ ID NO: 9986 - RNA, 19 nt, Artificial Sequence
  Synthetic
ugaugcacagcucagguug

SEQ ID NO: 9987 - RNA, 19 nt, Artificial Sequence
  Synthetic
gaugcacagcucagguuga

SEQ ID NO: 9988 - RNA, 19 nt, Artificial Sequence
  Synthetic
augcacagcucagguugaa

SEQ ID NO: 9989 - RNA, 19 nt, Artificial Sequence
  Synthetic
ugcacagcucagguugaaa

SEQ ID NO: 9990 - RNA, 19 nt, Artificial Sequence
  Synthetic
gcacagcucagguugaaag

SEQ ID NO: 9991 - RNA, 19 nt, Artificial Sequence
  Synthetic
cacagcucagguugaaagc

SEQ ID NO: 9992 - RNA, 19 nt, Artificial Sequence
  Synthetic
acagcucagguugaaagca

SEQ ID NO: 9993 - RNA, 19 nt, Artificial Sequence
  Synthetic
cagcucagguugaaagcac

SEQ ID NO: 9994 - RNA, 19 nt, Artificial Sequence
  Synthetic
agcucagguugaaagcacu

SEQ ID NO: 9995 - RNA, 19 nt, Artificial Sequence
  Synthetic
gcucagguugaaagcacug

SEQ ID NO: 9996 - RNA, 19 nt, Artificial Sequence
  Synthetic
cucagguugaaagcacuga

SEQ ID NO: 9997 - RNA, 19 nt, Artificial Sequence
  Synthetic
ucagguugaaagcacugaa

SEQ ID NO: 9998 - RNA, 19 nt, Artificial Sequence
  Synthetic
cagguugaaagcacugaac

SEQ ID NO: 9999 - RNA, 19 nt, Artificial Sequence
  Synthetic
agguugaaagcacugaacu

SEQ ID NO: 10000 - RNA, 19 nt, Artificial Sequence
  Synthetic
gguugaaagcacugaacua

SEQ ID NO: 10001 - RNA, 19 nt, Artificial Sequence
  Synthetic
guugaaagcacugaacuaa

SEQ ID NO: 10002 - RNA, 19 nt, Artificial Sequence
  Synthetic
uugaaagcacugaacuaaa

SEQ ID NO: 10003 - RNA, 19 nt, Artificial Sequence
  Synthetic
ugaaagcacugaacuaaag

SEQ ID NO: 10004 - RNA, 19 nt, Artificial Sequence
  Synthetic
gaaagcacugaacuaaagg

SEQ ID NO: 10005 - RNA, 19 nt, Artificial Sequence
  Synthetic
aaagcacugaacuaaagga

SEQ ID NO: 10006 - RNA, 19 nt, Artificial Sequence
  Synthetic
aagcacugaacuaaaggaa

SEQ ID NO: 10007 - RNA, 19 nt, Artificial Sequence
  Synthetic
agcacugaacuaaaggaag

SEQ ID NO: 10008 - RNA, 19 nt, Artificial Sequence
  Synthetic
gcacugaacuaaaggaagg

SEQ ID NO: 10009 - RNA, 19 nt, Artificial Sequence
  Synthetic
cacugaacuaaaggaagga

SEQ ID NO: 10010 - RNA, 19 nt, Artificial Sequence
  Synthetic
acugaacuaaaggaaggag

SEQ ID NO: 10011 - RNA, 19 nt, Artificial Sequence
  Synthetic
cugaacuaaaggaaggagc

SEQ ID NO: 10012 - RNA, 19 nt, Artificial Sequence
  Synthetic
ugaacuaaaggaaggagcc

SEQ ID NO: 10013 - RNA, 19 nt, Artificial Sequence
  Synthetic
gaacuaaaggaaggagccu

SEQ ID NO: 10014 - RNA, 19 nt, Artificial Sequence
  Synthetic
aacuaaaggaaggagccuu

SEQ ID NO: 10015 - RNA, 19 nt, Artificial Sequence
  Synthetic
acuaaaggaaggagccuuu

SEQ ID NO: 10016 - RNA, 19 nt, Artificial Sequence
  Synthetic
cuaaaggaaggagccuuuu

SEQ ID NO: 10017 - RNA, 19 nt, Artificial Sequence
  Synthetic
uaaaggaaggagccuuuug

SEQ ID NO: 10018 - RNA, 19 nt, Artificial Sequence
  Synthetic
aaaggaaggagccuuuuga

SEQ ID NO: 10019 - RNA, 19 nt, Artificial Sequence
  Synthetic
aaggaaggagccuuuugau

SEQ ID NO: 10020 - RNA, 19 nt, Artificial Sequence
  Synthetic
aggaaggagccuuuugaua

SEQ ID NO: 10021 - RNA, 19 nt, Artificial Sequence
  Synthetic
ggaaggagccuuuugauau

SEQ ID NO: 10022 - RNA, 19 nt, Artificial Sequence
  Synthetic
gaaggagccuuuugauaug

SEQ ID NO: 10023 - RNA, 19 nt, Artificial Sequence
  Synthetic
aaggagccuuuugauaugc

SEQ ID NO: 10024 - RNA, 19 nt, Artificial Sequence
  Synthetic
aggagccuuuugauaugca

SEQ ID NO: 10025 - RNA, 19 nt, Artificial Sequence
  Synthetic
ggagccuuuugauaugcau

SEQ ID NO: 10026 - RNA, 19 nt, Artificial Sequence
  Synthetic
gagccuuuugauaugcauu

SEQ ID NO: 10027 - RNA, 19 nt, Artificial Sequence
  Synthetic
agccuuuugauaugcauuc

SEQ ID NO: 10028 - RNA, 19 nt, Artificial Sequence
  Synthetic
gccuuuugauaugcauuca

SEQ ID NO: 10029 - RNA, 19 nt, Artificial Sequence
  Synthetic
ccuuuugauaugcauucag

SEQ ID NO: 10030 - RNA, 19 nt, Artificial Sequence
  Synthetic
cuuuugauaugcauucagg

SEQ ID NO: 10031 - RNA, 19 nt, Artificial Sequence
  Synthetic
uuuugauaugcauucagga

SEQ ID NO: 10032 - RNA, 19 nt, Artificial Sequence
  Synthetic
uuugauaugcauucaggaa

SEQ ID NO: 10033 - RNA, 19 nt, Artificial Sequence
  Synthetic
uugauaugcauucaggaag

SEQ ID NO: 10034 - RNA, 19 nt, Artificial Sequence
  Synthetic
ugauaugcauucaggaagc

SEQ ID NO: 10035 - RNA, 19 nt, Artificial Sequence
  Synthetic
gauaugcauucaggaagca

SEQ ID NO: 10036 - RNA, 19 nt, Artificial Sequence
  Synthetic
auaugcauucaggaagcag

SEQ ID NO: 10037 - RNA, 19 nt, Artificial Sequence
  Synthetic
uaugcauucaggaagcagc

SEQ ID NO: 10038 - RNA, 19 nt, Artificial Sequence
  Synthetic
augcauucaggaagcagcc

SEQ ID NO: 10039 - RNA, 19 nt, Artificial Sequence
  Synthetic
ugcauucaggaagcagcca

SEQ ID NO: 10040 - RNA, 19 nt, Artificial Sequence
  Synthetic
gcauucaggaagcagccaa

SEQ ID NO: 10041 - RNA, 19 nt, Artificial Sequence
  Synthetic
cauucaggaagcagccaac

SEQ ID NO: 10042 - RNA, 19 nt, Artificial Sequence
  Synthetic
auucaggaagcagccaacc

SEQ ID NO: 10043 - RNA, 19 nt, Artificial Sequence
  Synthetic
uucaggaagcagccaaccu

SEQ ID NO: 10044 - RNA, 19 nt, Artificial Sequence
  Synthetic
ucaggaagcagccaaccua

SEQ ID NO: 10045 - RNA, 19 nt, Artificial Sequence
  Synthetic
caggaagcagccaaccuaa

SEQ ID NO: 10046 - RNA, 19 nt, Artificial Sequence
  Synthetic
aggaagcagccaaccuaau

SEQ ID NO: 10047 - RNA, 19 nt, Artificial Sequence
  Synthetic
ggaagcagccaaccuaaug

SEQ ID NO: 10048 - RNA, 19 nt, Artificial Sequence
  Synthetic
gaagcagccaaccuaaugc

SEQ ID NO: 10049 - RNA, 19 nt, Artificial Sequence
  Synthetic
aagcagccaaccuaaugca

SEQ ID NO: 10050 - RNA, 19 nt, Artificial Sequence
  Synthetic
agcagccaaccuaaugcaa

SEQ ID NO: 10051 - RNA, 19 nt, Artificial Sequence
  Synthetic
gcagccaaccuaaugcaau

SEQ ID NO: 10052 - RNA, 19 nt, Artificial Sequence
  Synthetic
cagccaaccuaaugcaauc

SEQ ID NO: 10053 - RNA, 19 nt, Artificial Sequence
  Synthetic
agccaaccuaaugcaauca

SEQ ID NO: 10054 - RNA, 19 nt, Artificial Sequence
  Synthetic
gccaaccuaaugcaaucaa

SEQ ID NO: 10055 - RNA, 19 nt, Artificial Sequence
  Synthetic
ccaaccuaaugcaaucaag

SEQ ID NO: 10056 - RNA, 19 nt, Artificial Sequence
  Synthetic
caaccuaaugcaaucaaga

SEQ ID NO: 10057 - RNA, 19 nt, Artificial Sequence
  Synthetic
aaccuaaugcaaucaagaa

SEQ ID NO: 10058 - RNA, 19 nt, Artificial Sequence
  Synthetic
accuaaugcaaucaagaag

SEQ ID NO: 10059 - RNA, 19 nt, Artificial Sequence
  Synthetic
ccuaaugcaaucaagaaga

SEQ ID NO: 10060 - RNA, 19 nt, Artificial Sequence
  Synthetic
cuaaugcaaucaagaagag

SEQ ID NO: 10061 - RNA, 19 nt, Artificial Sequence
  Synthetic
uaaugcaaucaagaagaga

SEQ ID NO: 10062 - RNA, 19 nt, Artificial Sequence
  Synthetic
aaugcaaucaagaagagau

SEQ ID NO: 10063 - RNA, 19 nt, Artificial Sequence
  Synthetic
augcaaucaagaagagaua

SEQ ID NO: 10064 - RNA, 19 nt, Artificial Sequence
  Synthetic
ugcaaucaagaagagauag

SEQ ID NO: 10065 - RNA, 19 nt, Artificial Sequence
  Synthetic
gcaaucaagaagagauagu

SEQ ID NO: 10066 - RNA, 19 nt, Artificial Sequence
  Synthetic
caaucaagaagagauaguu

SEQ ID NO: 10067 - RNA, 19 nt, Artificial Sequence
  Synthetic
aaucaagaagagauaguuc

SEQ ID NO: 10068 - RNA, 19 nt, Artificial Sequence
  Synthetic
aucaagaagagauaguucc

SEQ ID NO: 10069 - RNA, 19 nt, Artificial Sequence
  Synthetic
ucaagaagagauaguuccu

SEQ ID NO: 10070 - RNA, 19 nt, Artificial Sequence
  Synthetic
caagaagagauaguuccua

SEQ ID NO: 10071 - RNA, 19 nt, Artificial Sequence
  Synthetic
aagaagagauaguuccuaa

SEQ ID NO: 10072 - RNA, 19 nt, Artificial Sequence
  Synthetic
agaagagauaguuccuaac

SEQ ID NO: 10073 - RNA, 19 nt, Artificial Sequence
  Synthetic
gaagagauaguuccuaacu

SEQ ID NO: 10074 - RNA, 19 nt, Artificial Sequence
  Synthetic
aagagauaguuccuaacug

SEQ ID NO: 10075 - RNA, 19 nt, Artificial Sequence
  Synthetic
agagauaguuccuaacugu

SEQ ID NO: 10076 - RNA, 19 nt, Artificial Sequence
  Synthetic
gagauaguuccuaacuguc

SEQ ID NO: 10077 - RNA, 19 nt, Artificial Sequence
  Synthetic
agauaguuccuaacuguca

SEQ ID NO: 10078 - RNA, 19 nt, Artificial Sequence
  Synthetic
gauaguuccuaacugucag

SEQ ID NO: 10079 - RNA, 19 nt, Artificial Sequence
  Synthetic
auaguuccuaacugucagc

SEQ ID NO: 10080 - RNA, 19 nt, Artificial Sequence
  Synthetic
uaguuccuaacugucagcc

SEQ ID NO: 10081 - RNA, 19 nt, Artificial Sequence
  Synthetic
aguuccuaacugucagccu

SEQ ID NO: 10082 - RNA, 19 nt, Artificial Sequence
  Synthetic
guuccuaacugucagccuu

SEQ ID NO: 10083 - RNA, 19 nt, Artificial Sequence
  Synthetic
uuccuaacugucagccuug

SEQ ID NO: 10084 - RNA, 19 nt, Artificial Sequence
  Synthetic
uccuaacugucagccuugu

SEQ ID NO: 10085 - RNA, 19 nt, Artificial Sequence
  Synthetic
ccuaacugucagccuugug

SEQ ID NO: 10086 - RNA, 19 nt, Artificial Sequence
  Synthetic
cuaacugucagccuugugg

SEQ ID NO: 10087 - RNA, 19 nt, Artificial Sequence
  Synthetic
uaacugucagccuuguggc

SEQ ID NO: 10088 - RNA, 19 nt, Artificial Sequence
  Synthetic
aacugucagccuuguggcu

SEQ ID NO: 10089 - RNA, 19 nt, Artificial Sequence
  Synthetic
acugucagccuuguggcua

SEQ ID NO: 10090 - RNA, 19 nt, Artificial Sequence
  Synthetic
cugucagccuuguggcuaa

SEQ ID NO: 10091 - RNA, 19 nt, Artificial Sequence
  Synthetic
ugucagccuuguggcuaag

SEQ ID NO: 10092 - RNA, 19 nt, Artificial Sequence
  Synthetic
gucagccuuguggcuaagu

SEQ ID NO: 10093 - RNA, 19 nt, Artificial Sequence
  Synthetic
ucagccuuguggcuaagug

SEQ ID NO: 10094 - RNA, 19 nt, Artificial Sequence
  Synthetic
cagccuuguggcuaaguga

SEQ ID NO: 10095 - RNA, 19 nt, Artificial Sequence
  Synthetic
agccuuguggcuaagugag

SEQ ID NO: 10096 - RNA, 19 nt, Artificial Sequence
  Synthetic
gccuuguggcuaagugagg

SEQ ID NO: 10097 - RNA, 19 nt, Artificial Sequence
  Synthetic
ccuuguggcuaagugagga

SEQ ID NO: 10098 - RNA, 19 nt, Artificial Sequence
  Synthetic
cuuguggcuaagugaggaa

SEQ ID NO: 10099 - RNA, 19 nt, Artificial Sequence
  Synthetic
uuguggcuaagugaggaag

SEQ ID NO: 10100 - RNA, 19 nt, Artificial Sequence
  Synthetic
uguggcuaagugaggaaga

SEQ ID NO: 10101 - RNA, 19 nt, Artificial Sequence
  Synthetic
guggcuaagugaggaagag

SEQ ID NO: 10102 - RNA, 19 nt, Artificial Sequence
  Synthetic
uggcuaagugaggaagaga

SEQ ID NO: 10103 - RNA, 19 nt, Artificial Sequence
  Synthetic
ggcuaagugaggaagagau

SEQ ID NO: 10104 - RNA, 19 nt, Artificial Sequence
  Synthetic
gcuaagugaggaagagaua

SEQ ID NO: 10105 - RNA, 19 nt, Artificial Sequence
  Synthetic
cuaagugaggaagagauaa

SEQ ID NO: 10106 - RNA, 19 nt, Artificial Sequence
  Synthetic
uaagugaggaagagauaau

SEQ ID NO: 10107 - RNA, 19 nt, Artificial Sequence
  Synthetic
aagugaggaagagauaauu

SEQ ID NO: 10108 - RNA, 19 nt, Artificial Sequence
  Synthetic
agugaggaagagauaauuu

SEQ ID NO: 10109 - RNA, 19 nt, Artificial Sequence
  Synthetic
gugaggaagagauaauuug

SEQ ID NO: 10110 - RNA, 19 nt, Artificial Sequence
  Synthetic
ugaggaagagauaauuugg

SEQ ID NO: 10111 - RNA, 19 nt, Artificial Sequence
  Synthetic
gaggaagagauaauuuggc

SEQ ID NO: 10112 - RNA, 19 nt, Artificial Sequence
  Synthetic
aggaagagauaauuuggca

SEQ ID NO: 10113 - RNA, 19 nt, Artificial Sequence
  Synthetic
ggaagagauaauuuggcaa

SEQ ID NO: 10114 - RNA, 19 nt, Artificial Sequence
  Synthetic
gaagagauaauuuggcaaa

SEQ ID NO: 10115 - RNA, 19 nt, Artificial Sequence
  Synthetic
aagagauaauuuggcaaac

SEQ ID NO: 10116 - RNA, 19 nt, Artificial Sequence
  Synthetic
agagauaauuuggcaaacc

SEQ ID NO: 10117 - RNA, 19 nt, Artificial Sequence
  Synthetic
gagauaauuuggcaaacca

SEQ ID NO: 10118 - RNA, 19 nt, Artificial Sequence
  Synthetic
agauaauuuggcaaaccau

SEQ ID NO: 10119 - RNA, 19 nt, Artificial Sequence
  Synthetic
gauaauuuggcaaaccaug

SEQ ID NO: 10120 - RNA, 19 nt, Artificial Sequence
  Synthetic
auaauuuggcaaaccaugg

SEQ ID NO: 10121 - RNA, 19 nt, Artificial Sequence
  Synthetic
uaauuuggcaaaccaugga

SEQ ID NO: 10122 - RNA, 19 nt, Artificial Sequence
  Synthetic
aauuuggcaaaccauggag

SEQ ID NO: 10123 - RNA, 19 nt, Artificial Sequence
  Synthetic
auuuggcaaaccauggaga

SEQ ID NO: 10124 - RNA, 19 nt, Artificial Sequence
  Synthetic
uuuggcaaaccauggagac

SEQ ID NO: 10125 - RNA, 19 nt, Artificial Sequence
  Synthetic
uuggcaaaccauggagacc

SEQ ID NO: 10126 - RNA, 19 nt, Artificial Sequence
  Synthetic
uggcaaaccauggagaccc

SEQ ID NO: 10127 - RNA, 19 nt, Artificial Sequence
  Synthetic
ggcaaaccauggagacccc

SEQ ID NO: 10128 - RNA, 19 nt, Artificial Sequence
  Synthetic
gcaaaccauggagacccca

SEQ ID NO: 10129 - RNA, 19 nt, Artificial Sequence
  Synthetic
caaaccauggagaccccac

SEQ ID NO: 10130 - RNA, 19 nt, Artificial Sequence
  Synthetic
aaaccauggagaccccaca

SEQ ID NO: 10131 - RNA, 19 nt, Artificial Sequence
  Synthetic
aaccauggagaccccacac

SEQ ID NO: 10132 - RNA, 19 nt, Artificial Sequence
  Synthetic
accauggagaccccacaca

SEQ ID NO: 10133 - RNA, 19 nt, Artificial Sequence
  Synthetic
ccauggagaccccacacaa

SEQ ID NO: 10134 - RNA, 19 nt, Artificial Sequence
  Synthetic
cauggagaccccacacaac

SEQ ID NO: 10135 - RNA, 19 nt, Artificial Sequence
  Synthetic
auggagaccccacacaaca

SEQ ID NO: 10136 - RNA, 19 nt, Artificial Sequence
  Synthetic
uggagaccccacacaacac

SEQ ID NO: 10137 - RNA, 19 nt, Artificial Sequence
  Synthetic
ggagaccccacacaacaca

SEQ ID NO: 10138 - RNA, 19 nt, Artificial Sequence
  Synthetic
gagaccccacacaacacac

SEQ ID NO: 10139 - RNA, 19 nt, Artificial Sequence
  Synthetic
agaccccacacaacacaca

SEQ ID NO: 10140 - RNA, 19 nt, Artificial Sequence
  Synthetic
gaccccacacaacacacag

SEQ ID NO: 10141 - RNA, 19 nt, Artificial Sequence
  Synthetic
accccacacaacacacaga

SEQ ID NO: 10142 - RNA, 19 nt, Artificial Sequence
  Synthetic
ccccacacaacacacagag

SEQ ID NO: 10143 - RNA, 19 nt, Artificial Sequence
  Synthetic
cccacacaacacacagagc

SEQ ID NO: 10144 - RNA, 19 nt, Artificial Sequence
  Synthetic
ccacacaacacacagagcu

SEQ ID NO: 10145 - RNA, 19 nt, Artificial Sequence
  Synthetic
cacacaacacacagagcug

SEQ ID NO: 10146 - RNA, 19 nt, Artificial Sequence
  Synthetic
acacaacacacagagcugu

SEQ ID NO: 10147 - RNA, 19 nt, Artificial Sequence
  Synthetic
cacaacacacagagcugua

SEQ ID NO: 10148 - RNA, 19 nt, Artificial Sequence
  Synthetic
acaacacacagagcuguaa

SEQ ID NO: 10149 - RNA, 19 nt, Artificial Sequence
  Synthetic
caacacacagagcuguaau

SEQ ID NO: 10150 - RNA, 19 nt, Artificial Sequence
  Synthetic
aacacacagagcuguaauc

SEQ ID NO: 10151 - RNA, 19 nt, Artificial Sequence
  Synthetic
acacacagagcuguaaucu

SEQ ID NO: 10152 - RNA, 19 nt, Artificial Sequence
  Synthetic
cacacagagcuguaaucua

SEQ ID NO: 10153 - RNA, 19 nt, Artificial Sequence
  Synthetic
acacagagcuguaaucuag

SEQ ID NO: 10154 - RNA, 19 nt, Artificial Sequence
  Synthetic
cacagagcuguaaucuaga

SEQ ID NO: 10155 - RNA, 19 nt, Artificial Sequence
  Synthetic
acagagcuguaaucuagag

SEQ ID NO: 10156 - RNA, 19 nt, Artificial Sequence
  Synthetic
cagagcuguaaucuagagc

SEQ ID NO: 10157 - RNA, 19 nt, Artificial Sequence
  Synthetic
agagcuguaaucuagagca

SEQ ID NO: 10158 - RNA, 19 nt, Artificial Sequence
  Synthetic
gagcuguaaucuagagcaa

SEQ ID NO: 10159 - RNA, 19 nt, Artificial Sequence
  Synthetic
agcuguaaucuagagcaag

SEQ ID NO: 10160 - RNA, 19 nt, Artificial Sequence
  Synthetic
gcuguaaucuagagcaagg

SEQ ID NO: 10161 - RNA, 19 nt, Artificial Sequence
  Synthetic
cuguaaucuagagcaagga

SEQ ID NO: 10162 - RNA, 19 nt, Artificial Sequence
  Synthetic
uguaaucuagagcaaggag

SEQ ID NO: 10163 - RNA, 19 nt, Artificial Sequence
  Synthetic
guaaucuagagcaaggaga

SEQ ID NO: 10164 - RNA, 19 nt, Artificial Sequence
  Synthetic
uaaucuagagcaaggagac

SEQ ID NO: 10165 - RNA, 19 nt, Artificial Sequence
  Synthetic
aaucuagagcaaggagaca

SEQ ID NO: 10166 - RNA, 19 nt, Artificial Sequence
  Synthetic
aucuagagcaaggagacag

SEQ ID NO: 10167 - RNA, 19 nt, Artificial Sequence
  Synthetic
ucuagagcaaggagacaga

SEQ ID NO: 10168 - RNA, 19 nt, Artificial Sequence
  Synthetic
cuagagcaaggagacagac

SEQ ID NO: 10169 - RNA, 19 nt, Artificial Sequence
  Synthetic
uagagcaaggagacagaca

SEQ ID NO: 10170 - RNA, 19 nt, Artificial Sequence
  Synthetic
agagcaaggagacagacaa

SEQ ID NO: 10171 - RNA, 19 nt, Artificial Sequence
  Synthetic
gagcaaggagacagacaac

SEQ ID NO: 10172 - RNA, 19 nt, Artificial Sequence
  Synthetic
agcaaggagacagacaacu

SEQ ID NO: 10173 - RNA, 19 nt, Artificial Sequence
  Synthetic
gcaaggagacagacaacuc

SEQ ID NO: 10174 - RNA, 19 nt, Artificial Sequence
  Synthetic
caaggagacagacaacucc

SEQ ID NO: 10175 - RNA, 19 nt, Artificial Sequence
  Synthetic
aaggagacagacaacuccc

SEQ ID NO: 10176 - RNA, 19 nt, Artificial Sequence
  Synthetic
aggagacagacaacuccca

SEQ ID NO: 10177 - RNA, 19 nt, Artificial Sequence
  Synthetic
ggagacagacaacucccaa

SEQ ID NO: 10178 - RNA, 19 nt, Artificial Sequence
  Synthetic
gagacagacaacucccaaa

SEQ ID NO: 10179 - RNA, 19 nt, Artificial Sequence
  Synthetic
agacagacaacucccaaac

SEQ ID NO: 10180 - RNA, 19 nt, Artificial Sequence
  Synthetic
gacagacaacucccaaacc

SEQ ID NO: 10181 - RNA, 19 nt, Artificial Sequence
  Synthetic
acagacaacucccaaaccu

SEQ ID NO: 10182 - RNA, 19 nt, Artificial Sequence
  Synthetic
cagacaacucccaaaccua

SEQ ID NO: 10183 - RNA, 19 nt, Artificial Sequence
  Synthetic
agacaacucccaaaccuac

SEQ ID NO: 10184 - RNA, 19 nt, Artificial Sequence
  Synthetic
gacaacucccaaaccuaca

SEQ ID NO: 10185 - RNA, 19 nt, Artificial Sequence
  Synthetic
acaacucccaaaccuacag

SEQ ID NO: 10186 - RNA, 19 nt, Artificial Sequence
  Synthetic
caacucccaaaccuacagu

SEQ ID NO: 10187 - RNA, 19 nt, Artificial Sequence
  Synthetic
aacucccaaaccuacaguc

SEQ ID NO: 10188 - RNA, 19 nt, Artificial Sequence
  Synthetic
acucccaaaccuacaguca

SEQ ID NO: 10189 - RNA, 19 nt, Artificial Sequence
  Synthetic
cucccaaaccuacagucag

SEQ ID NO: 10190 - RNA, 19 nt, Artificial Sequence
  Synthetic
ucccaaaccuacagucagc

SEQ ID NO: 10191 - RNA, 19 nt, Artificial Sequence
  Synthetic
cccaaaccuacagucagcu

SEQ ID NO: 10192 - RNA, 19 nt, Artificial Sequence
  Synthetic
ccaaaccuacagucagcuc

SEQ ID NO: 10193 - RNA, 19 nt, Artificial Sequence
  Synthetic
caaaccuacagucagcucc

SEQ ID NO: 10194 - RNA, 19 nt, Artificial Sequence
  Synthetic
aaaccuacagucagcucca

SEQ ID NO: 10195 - RNA, 19 nt, Artificial Sequence
  Synthetic
aaccuacagucagcuccaa

SEQ ID NO: 10196 - RNA, 19 nt, Artificial Sequence
  Synthetic
accuacagucagcuccaag

SEQ ID NO: 10197 - RNA, 19 nt, Artificial Sequence
  Synthetic
ccuacagucagcuccaaga

SEQ ID NO: 10198 - RNA, 19 nt, Artificial Sequence
  Synthetic
cuacagucagcuccaagag

SEQ ID NO: 10199 - RNA, 19 nt, Artificial Sequence
  Synthetic
uacagucagcuccaagagc

SEQ ID NO: 10200 - RNA, 19 nt, Artificial Sequence
  Synthetic
acagucagcuccaagagcc

SEQ ID NO: 10201 - RNA, 19 nt, Artificial Sequence
  Synthetic
cagucagcuccaagagccc

SEQ ID NO: 10202 - RNA, 19 nt, Artificial Sequence
  Synthetic
agucagcuccaagagcccu

SEQ ID NO: 10203 - RNA, 19 nt, Artificial Sequence
  Synthetic
gucagcuccaagagcccua

SEQ ID NO: 10204 - RNA, 19 nt, Artificial Sequence
  Synthetic
ucagcuccaagagcccuag

SEQ ID NO: 10205 - RNA, 19 nt, Artificial Sequence
  Synthetic
cagcuccaagagcccuagc

SEQ ID NO: 10206 - RNA, 19 nt, Artificial Sequence
  Synthetic
agcuccaagagcccuagca

SEQ ID NO: 10207 - RNA, 19 nt, Artificial Sequence
  Synthetic
gcuccaagagcccuagcac

SEQ ID NO: 10208 - RNA, 19 nt, Artificial Sequence
  Synthetic
cuccaagagcccuagcacc

SEQ ID NO: 10209 - RNA, 19 nt, Artificial Sequence
  Synthetic
uccaagagcccuagcaccu

SEQ ID NO: 10210 - RNA, 19 nt, Artificial Sequence
  Synthetic
ccaagagcccuagcaccuu

SEQ ID NO: 10211 - RNA, 19 nt, Artificial Sequence
  Synthetic
caagagcccuagcaccuuu

SEQ ID NO: 10212 - RNA, 19 nt, Artificial Sequence
  Synthetic
aagagcccuagcaccuuuc

SEQ ID NO: 10213 - RNA, 19 nt, Artificial Sequence
  Synthetic
agagcccuagcaccuuuca

SEQ ID NO: 10214 - RNA, 19 nt, Artificial Sequence
  Synthetic
gagcccuagcaccuuucau

SEQ ID NO: 10215 - RNA, 19 nt, Artificial Sequence
  Synthetic
agcccuagcaccuuucaug

SEQ ID NO: 10216 - RNA, 19 nt, Artificial Sequence
  Synthetic
gcccuagcaccuuucaugu

SEQ ID NO: 10217 - RNA, 19 nt, Artificial Sequence
  Synthetic
cccuagcaccuuucaugug

SEQ ID NO: 10218 - RNA, 19 nt, Artificial Sequence
  Synthetic
ccuagcaccuuucaugugc

SEQ ID NO: 10219 - RNA, 19 nt, Artificial Sequence
  Synthetic
cuagcaccuuucaugugcu

SEQ ID NO: 10220 - RNA, 19 nt, Artificial Sequence
  Synthetic
uagcaccuuucaugugcuu

SEQ ID NO: 10221 - RNA, 19 nt, Artificial Sequence
  Synthetic
agcaccuuucaugugcuuu

SEQ ID NO: 10222 - RNA, 19 nt, Artificial Sequence
  Synthetic
gcaccuuucaugugcuuuu

SEQ ID NO: 10223 - RNA, 19 nt, Artificial Sequence
  Synthetic
caccuuucaugugcuuuuc

SEQ ID NO: 10224 - RNA, 19 nt, Artificial Sequence
  Synthetic
accuuucaugugcuuuucc

SEQ ID NO: 10225 - RNA, 19 nt, Artificial Sequence
  Synthetic
ccuuucaugugcuuuuccu

SEQ ID NO: 10226 - RNA, 19 nt, Artificial Sequence
  Synthetic
cuuucaugugcuuuuccug

SEQ ID NO: 10227 - RNA, 19 nt, Artificial Sequence
  Synthetic
uuucaugugcuuuuccuga

SEQ ID NO: 10228 - RNA, 19 nt, Artificial Sequence
  Synthetic
uucaugugcuuuuccugaa

SEQ ID NO: 10229 - RNA, 19 nt, Artificial Sequence
  Synthetic
ucaugugcuuuuccugaaa

SEQ ID NO: 10230 - RNA, 19 nt, Artificial Sequence
  Synthetic
caugugcuuuuccugaaag

SEQ ID NO: 10231 - RNA, 19 nt, Artificial Sequence
  Synthetic
augugcuuuuccugaaagc

SEQ ID NO: 10232 - RNA, 19 nt, Artificial Sequence
  Synthetic
ugugcuuuuccugaaagcu

SEQ ID NO: 10233 - RNA, 19 nt, Artificial Sequence
  Synthetic
gugcuuuuccugaaagcug

SEQ ID NO: 10234 - RNA, 19 nt, Artificial Sequence
  Synthetic
ugcuuuuccugaaagcuga

SEQ ID NO: 10235 - RNA, 19 nt, Artificial Sequence
  Synthetic
gcuuuuccugaaagcugau

SEQ ID NO: 10236 - RNA, 19 nt, Artificial Sequence
  Synthetic
cuuuuccugaaagcugaug

SEQ ID NO: 10237 - RNA, 19 nt, Artificial Sequence
  Synthetic
uuuuccugaaagcugaugu

SEQ ID NO: 10238 - RNA, 19 nt, Artificial Sequence
  Synthetic
uuuccugaaagcugaugug

SEQ ID NO: 10239 - RNA, 19 nt, Artificial Sequence
  Synthetic
uuccugaaagcugaugugu

SEQ ID NO: 10240 - RNA, 19 nt, Artificial Sequence
  Synthetic
uccugaaagcugaugugug

SEQ ID NO: 10241 - RNA, 19 nt, Artificial Sequence
  Synthetic
ccugaaagcugaugugugc

SEQ ID NO: 10242 - RNA, 19 nt, Artificial Sequence
  Synthetic
cugaaagcugaugugugcc

SEQ ID NO: 10243 - RNA, 19 nt, Artificial Sequence
  Synthetic
ugaaagcugaugugugcca

SEQ ID NO: 10244 - RNA, 19 nt, Artificial Sequence
  Synthetic
gaaagcugaugugugccau

SEQ ID NO: 10245 - RNA, 19 nt, Artificial Sequence
  Synthetic
aaagcugaugugugccauc

SEQ ID NO: 10246 - RNA, 19 nt, Artificial Sequence
  Synthetic
aagcugaugugugccaucc

SEQ ID NO: 10247 - RNA, 19 nt, Artificial Sequence
  Synthetic
agcugaugugugccaucca

SEQ ID NO: 10248 - RNA, 19 nt, Artificial Sequence
  Synthetic
gcugaugugugccauccau

SEQ ID NO: 10249 - RNA, 19 nt, Artificial Sequence
  Synthetic
cugaugugugccauccaua

SEQ ID NO: 10250 - RNA, 19 nt, Artificial Sequence
  Synthetic
ugaugugugccauccauaa

SEQ ID NO: 10251 - RNA, 19 nt, Artificial Sequence
  Synthetic
gaugugugccauccauaaa

SEQ ID NO: 10252 - RNA, 19 nt, Artificial Sequence
  Synthetic
augugugccauccauaaag

SEQ ID NO: 10253 - RNA, 19 nt, Artificial Sequence
  Synthetic
ugugugccauccauaaaga

SEQ ID NO: 10254 - RNA, 19 nt, Artificial Sequence
  Synthetic
gugugccauccauaaagau

SEQ ID NO: 10255 - RNA, 19 nt, Artificial Sequence
  Synthetic
ugugccauccauaaagauc

SEQ ID NO: 10256 - RNA, 19 nt, Artificial Sequence
  Synthetic
gugccauccauaaagauca

SEQ ID NO: 10257 - RNA, 19 nt, Artificial Sequence
  Synthetic
ugccauccauaaagaucac

SEQ ID NO: 10258 - RNA, 19 nt, Artificial Sequence
  Synthetic
gccauccauaaagaucaca

SEQ ID NO: 10259 - RNA, 19 nt, Artificial Sequence
  Synthetic
ccauccauaaagaucacag

SEQ ID NO: 10260 - RNA, 19 nt, Artificial Sequence
  Synthetic
cauccauaaagaucacagc

SEQ ID NO: 10261 - RNA, 19 nt, Artificial Sequence
  Synthetic
auccauaaagaucacagcu

SEQ ID NO: 10262 - RNA, 19 nt, Artificial Sequence
  Synthetic
uccauaaagaucacagcug

SEQ ID NO: 10263 - RNA, 19 nt, Artificial Sequence
  Synthetic
ccauaaagaucacagcugg

SEQ ID NO: 10264 - RNA, 19 nt, Artificial Sequence
  Synthetic
cauaaagaucacagcuggg

SEQ ID NO: 10265 - RNA, 19 nt, Artificial Sequence
  Synthetic
auaaagaucacagcugggc

SEQ ID NO: 10266 - RNA, 19 nt, Artificial Sequence
  Synthetic
uaaagaucacagcugggcc

SEQ ID NO: 10267 - RNA, 19 nt, Artificial Sequence
  Synthetic
aaagaucacagcugggccc

SEQ ID NO: 10268 - RNA, 19 nt, Artificial Sequence
  Synthetic
aagaucacagcugggccca

SEQ ID NO: 10269 - RNA, 19 nt, Artificial Sequence
  Synthetic
agaucacagcugggcccac

SEQ ID NO: 10270 - RNA, 19 nt, Artificial Sequence
  Synthetic
gaucacagcugggcccacc

SEQ ID NO: 10271 - RNA, 19 nt, Artificial Sequence
  Synthetic
aucacagcugggcccacca

SEQ ID NO: 10272 - RNA, 19 nt, Artificial Sequence
  Synthetic
ucacagcugggcccaccaa

SEQ ID NO: 10273 - RNA, 19 nt, Artificial Sequence
  Synthetic
cacagcugggcccaccaag

SEQ ID NO: 10274 - RNA, 19 nt, Artificial Sequence
  Synthetic
acagcugggcccaccaaga

SEQ ID NO: 10275 - RNA, 19 nt, Artificial Sequence
  Synthetic
cagcugggcccaccaagag

SEQ ID NO: 10276 - RNA, 19 nt, Artificial Sequence
  Synthetic
agcugggcccaccaagagg

SEQ ID NO: 10277 - RNA, 19 nt, Artificial Sequence
  Synthetic
gcugggcccaccaagagga

SEQ ID NO: 10278 - RNA, 19 nt, Artificial Sequence
  Synthetic
cugggcccaccaagaggaa

SEQ ID NO: 10279 - RNA, 19 nt, Artificial Sequence
  Synthetic
ugggcccaccaagaggaag

SEQ ID NO: 10280 - RNA, 19 nt, Artificial Sequence
  Synthetic
gggcccaccaagaggaagc

SEQ ID NO: 10281 - RNA, 19 nt, Artificial Sequence
  Synthetic
ggcccaccaagaggaagcu

SEQ ID NO: 10282 - RNA, 19 nt, Artificial Sequence
  Synthetic
gcccaccaagaggaagcug

SEQ ID NO: 10283 - RNA, 19 nt, Artificial Sequence
  Synthetic
cccaccaagaggaagcugu

SEQ ID NO: 10284 - RNA, 19 nt, Artificial Sequence
  Synthetic
ccaccaagaggaagcugug

SEQ ID NO: 10285 - RNA, 19 nt, Artificial Sequence
  Synthetic
caccaagaggaagcugugc

SEQ ID NO: 10286 - RNA, 19 nt, Artificial Sequence
  Synthetic
accaagaggaagcugugca

SEQ ID NO: 10287 - RNA, 19 nt, Artificial Sequence
  Synthetic
ccaagaggaagcugugcag

SEQ ID NO: 10288 - RNA, 19 nt, Artificial Sequence
  Synthetic
caagaggaagcugugcaga

SEQ ID NO: 10289 - RNA, 19 nt, Artificial Sequence
  Synthetic
aagaggaagcugugcagag

SEQ ID NO: 10290 - RNA, 19 nt, Artificial Sequence
  Synthetic
agaggaagcugugcagaga

SEQ ID NO: 10291 - RNA, 19 nt, Artificial Sequence
  Synthetic
gaggaagcugugcagagau

SEQ ID NO: 10292 - RNA, 19 nt, Artificial Sequence
  Synthetic
aggaagcugugcagagaua

SEQ ID NO: 10293 - RNA, 19 nt, Artificial Sequence
  Synthetic
ggaagcugugcagagauaa

SEQ ID NO: 10294 - RNA, 19 nt, Artificial Sequence
  Synthetic
gaagcugugcagagauaau

SEQ ID NO: 10295 - RNA, 19 nt, Artificial Sequence
  Synthetic
aagcugugcagagauaaug

SEQ ID NO: 10296 - RNA, 19 nt, Artificial Sequence
  Synthetic
agcugugcagagauaaugc

SEQ ID NO: 10297 - RNA, 19 nt, Artificial Sequence
  Synthetic
gcugugcagagauaaugca

SEQ ID NO: 10298 - RNA, 19 nt, Artificial Sequence
  Synthetic
cugugcagagauaaugcag

SEQ ID NO: 10299 - RNA, 19 nt, Artificial Sequence
  Synthetic
ugugcagagauaaugcagc

SEQ ID NO: 10300 - RNA, 19 nt, Artificial Sequence
  Synthetic
gugcagagauaaugcagcc

SEQ ID NO: 10301 - RNA, 19 nt, Artificial Sequence
  Synthetic
ugcagagauaaugcagccc

SEQ ID NO: 10302 - RNA, 19 nt, Artificial Sequence
  Synthetic
gcagagauaaugcagcccu

SEQ ID NO: 10303 - RNA, 19 nt, Artificial Sequence
  Synthetic
cagagauaaugcagcccuc

SEQ ID NO: 10304 - RNA, 19 nt, Artificial Sequence
  Synthetic
agagauaaugcagcccuca

SEQ ID NO: 10305 - RNA, 19 nt, Artificial Sequence
  Synthetic
gagauaaugcagcccucac

SEQ ID NO: 10306 - RNA, 19 nt, Artificial Sequence
  Synthetic
agauaaugcagcccucaca

SEQ ID NO: 10307 - RNA, 19 nt, Artificial Sequence
  Synthetic
gauaaugcagcccucacag

SEQ ID NO: 10308 - RNA, 19 nt, Artificial Sequence
  Synthetic
auaaugcagcccucacagc

SEQ ID NO: 10309 - RNA, 19 nt, Artificial Sequence
  Synthetic
uaaugcagcccucacagcc

SEQ ID NO: 10310 - RNA, 19 nt, Artificial Sequence
  Synthetic
aaugcagcccucacagcca

SEQ ID NO: 10311 - RNA, 19 nt, Artificial Sequence
  Synthetic
augcagcccucacagccac

SEQ ID NO: 10312 - RNA, 19 nt, Artificial Sequence
  Synthetic
ugcagcccucacagccacu

SEQ ID NO: 10313 - RNA, 19 nt, Artificial Sequence
  Synthetic
gcagcccucacagccacuu

SEQ ID NO: 10314 - RNA, 19 nt, Artificial Sequence
  Synthetic
cagcccucacagccacuuc

SEQ ID NO: 10315 - RNA, 19 nt, Artificial Sequence
  Synthetic
agcccucacagccacuucc

SEQ ID NO: 10316 - RNA, 19 nt, Artificial Sequence
  Synthetic
gcccucacagccacuuccg

SEQ ID NO: 10317 - RNA, 19 nt, Artificial Sequence
  Synthetic
cccucacagccacuuccgg

SEQ ID NO: 10318 - RNA, 19 nt, Artificial Sequence
  Synthetic
ccucacagccacuuccgga

SEQ ID NO: 10319 - RNA, 19 nt, Artificial Sequence
  Synthetic
cucacagccacuuccggag

SEQ ID NO: 10320 - RNA, 19 nt, Artificial Sequence
  Synthetic
ucacagccacuuccggaga

SEQ ID NO: 10321 - RNA, 19 nt, Artificial Sequence
  Synthetic
cacagccacuuccggagac

SEQ ID NO: 10322 - RNA, 19 nt, Artificial Sequence
  Synthetic
acagccacuuccggagacu

SEQ ID NO: 10323 - RNA, 19 nt, Artificial Sequence
  Synthetic
cagccacuuccggagacua

SEQ ID NO: 10324 - RNA, 19 nt, Artificial Sequence
  Synthetic
agccacuuccggagacuac

SEQ ID NO: 10325 - RNA, 19 nt, Artificial Sequence
  Synthetic
gccacuuccggagacuaca

SEQ ID NO: 10326 - RNA, 19 nt, Artificial Sequence
  Synthetic
ccacuuccggagacuacac

SEQ ID NO: 10327 - RNA, 19 nt, Artificial Sequence
  Synthetic
cacuuccggagacuacaca

SEQ ID NO: 10328 - RNA, 19 nt, Artificial Sequence
  Synthetic
acuuccggagacuacacag

SEQ ID NO: 10329 - RNA, 19 nt, Artificial Sequence
  Synthetic
cuuccggagacuacacaga

SEQ ID NO: 10330 - RNA, 19 nt, Artificial Sequence
  Synthetic
uuccggagacuacacagag

SEQ ID NO: 10331 - RNA, 19 nt, Artificial Sequence
  Synthetic
uccggagacuacacagaga

SEQ ID NO: 10332 - RNA, 19 nt, Artificial Sequence
  Synthetic
ccggagacuacacagagau

SEQ ID NO: 10333 - RNA, 19 nt, Artificial Sequence
  Synthetic
cggagacuacacagagauu

SEQ ID NO: 10334 - RNA, 19 nt, Artificial Sequence
  Synthetic
ggagacuacacagagauuc

SEQ ID NO: 10335 - RNA, 19 nt, Artificial Sequence
  Synthetic
gagacuacacagagauucu

SEQ ID NO: 10336 - RNA, 19 nt, Artificial Sequence
  Synthetic
agacuacacagagauucua

SEQ ID NO: 10337 - RNA, 19 nt, Artificial Sequence
  Synthetic
gacuacacagagauucuag

SEQ ID NO: 10338 - RNA, 19 nt, Artificial Sequence
  Synthetic
acuacacagagauucuagu

SEQ ID NO: 10339 - RNA, 19 nt, Artificial Sequence
  Synthetic
cuacacagagauucuagug

SEQ ID NO: 10340 - RNA, 19 nt, Artificial Sequence
  Synthetic
uacacagagauucuagugg

SEQ ID NO: 10341 - RNA, 19 nt, Artificial Sequence
  Synthetic
acacagagauucuaguggu

SEQ ID NO: 10342 - RNA, 19 nt, Artificial Sequence
  Synthetic
cacagagauucuagugguu

SEQ ID NO: 10343 - RNA, 19 nt, Artificial Sequence
  Synthetic
acagagauucuagugguuu

SEQ ID NO: 10344 - RNA, 19 nt, Artificial Sequence
  Synthetic
cagagauucuagugguuuc

SEQ ID NO: 10345 - RNA, 19 nt, Artificial Sequence
  Synthetic
agagauucuagugguuucc

SEQ ID NO: 10346 - RNA, 19 nt, Artificial Sequence
  Synthetic
gagauucuagugguuucca

SEQ ID NO: 10347 - RNA, 19 nt, Artificial Sequence
  Synthetic
agauucuagugguuuccac

SEQ ID NO: 10348 - RNA, 19 nt, Artificial Sequence
  Synthetic
gauucuagugguuuccacu

SEQ ID NO: 10349 - RNA, 19 nt, Artificial Sequence
  Synthetic
auucuagugguuuccacuu

SEQ ID NO: 10350 - RNA, 19 nt, Artificial Sequence
  Synthetic
uucuagugguuuccacuua

SEQ ID NO: 10351 - RNA, 19 nt, Artificial Sequence
  Synthetic
ucuagugguuuccacuuaa

SEQ ID NO: 10352 - RNA, 19 nt, Artificial Sequence
  Synthetic
cuagugguuuccacuuaaa

SEQ ID NO: 10353 - RNA, 19 nt, Artificial Sequence
  Synthetic
uagugguuuccacuuaaaa

SEQ ID NO: 10354 - RNA, 19 nt, Artificial Sequence
  Synthetic
agugguuuccacuuaaaac

SEQ ID NO: 10355 - RNA, 19 nt, Artificial Sequence
  Synthetic
gugguuuccacuuaaaacg

SEQ ID NO: 10356 - RNA, 19 nt, Artificial Sequence
  Synthetic
ugguuuccacuuaaaacgc

SEQ ID NO: 10357 - RNA, 19 nt, Artificial Sequence
  Synthetic
gguuuccacuuaaaacgcu

SEQ ID NO: 10358 - RNA, 19 nt, Artificial Sequence
  Synthetic
guuuccacuuaaaacgcuc

SEQ ID NO: 10359 - RNA, 19 nt, Artificial Sequence
  Synthetic
uuuccacuuaaaacgcucc

SEQ ID NO: 10360 - RNA, 19 nt, Artificial Sequence
  Synthetic
uuccacuuaaaacgcucca

SEQ ID NO: 10361 - RNA, 19 nt, Artificial Sequence
  Synthetic
uccacuuaaaacgcuccag

SEQ ID NO: 10362 - RNA, 19 nt, Artificial Sequence
  Synthetic
ccacuuaaaacgcuccagu

SEQ ID NO: 10363 - RNA, 19 nt, Artificial Sequence
  Synthetic
cacuuaaaacgcuccagug

SEQ ID NO: 10364 - RNA, 19 nt, Artificial Sequence
  Synthetic
acuuaaaacgcuccagugc

SEQ ID NO: 10365 - RNA, 19 nt, Artificial Sequence
  Synthetic
cuuaaaacgcuccagugca

SEQ ID NO: 10366 - RNA, 19 nt, Artificial Sequence
  Synthetic
uuaaaacgcuccagugcau

SEQ ID NO: 10367 - RNA, 19 nt, Artificial Sequence
  Synthetic
uaaaacgcuccagugcauu

SEQ ID NO: 10368 - RNA, 19 nt, Artificial Sequence
  Synthetic
aaaacgcuccagugcauug

SEQ ID NO: 10369 - RNA, 19 nt, Artificial Sequence
  Synthetic
aaacgcuccagugcauugg

SEQ ID NO: 10370 - RNA, 19 nt, Artificial Sequence
  Synthetic
aacgcuccagugcauugga

SEQ ID NO: 10371 - RNA, 19 nt, Artificial Sequence
  Synthetic
acgcuccagugcauuggag

SEQ ID NO: 10372 - RNA, 19 nt, Artificial Sequence
  Synthetic
cgcuccagugcauuggaga

SEQ ID NO: 10373 - RNA, 19 nt, Artificial Sequence
  Synthetic
gcuccagugcauuggagag

SEQ ID NO: 10374 - RNA, 19 nt, Artificial Sequence
  Synthetic
cuccagugcauuggagagg

SEQ ID NO: 10375 - RNA, 19 nt, Artificial Sequence
  Synthetic
uccagugcauuggagaggc

SEQ ID NO: 10376 - RNA, 19 nt, Artificial Sequence
  Synthetic
ccagugcauuggagaggca

SEQ ID NO: 10377 - RNA, 19 nt, Artificial Sequence
  Synthetic
cagugcauuggagaggcau

SEQ ID NO: 10378 - RNA, 19 nt, Artificial Sequence
  Synthetic
agugcauuggagaggcauu

SEQ ID NO: 10379 - RNA, 19 nt, Artificial Sequence
  Synthetic
gugcauuggagaggcauuu

SEQ ID NO: 10380 - RNA, 19 nt, Artificial Sequence
  Synthetic
ugcauuggagaggcauuug

SEQ ID NO: 10381 - RNA, 19 nt, Artificial Sequence
  Synthetic
gcauuggagaggcauuugc

SEQ ID NO: 10382 - RNA, 19 nt, Artificial Sequence
  Synthetic
cauuggagaggcauuugcc

SEQ ID NO: 10383 - RNA, 19 nt, Artificial Sequence
  Synthetic
auuggagaggcauuugccg

SEQ ID NO: 10384 - RNA, 19 nt, Artificial Sequence
  Synthetic
uuggagaggcauuugccgg

SEQ ID NO: 10385 - RNA, 19 nt, Artificial Sequence
  Synthetic
uggagaggcauuugccggg

SEQ ID NO: 10386 - RNA, 19 nt, Artificial Sequence
  Synthetic
ggagaggcauuugccgggc

SEQ ID NO: 10387 - RNA, 19 nt, Artificial Sequence
  Synthetic
gagaggcauuugccgggca

SEQ ID NO: 10388 - RNA, 19 nt, Artificial Sequence
  Synthetic
agaggcauuugccgggcau

SEQ ID NO: 10389 - RNA, 19 nt, Artificial Sequence
  Synthetic
gaggcauuugccgggcaug

SEQ ID NO: 10390 - RNA, 19 nt, Artificial Sequence
  Synthetic
aggcauuugccgggcaugc

SEQ ID NO: 10391 - RNA, 19 nt, Artificial Sequence
  Synthetic
ggcauuugccgggcaugca

SEQ ID NO: 10392 - RNA, 19 nt, Artificial Sequence
  Synthetic
gcauuugccgggcaugcac

SEQ ID NO: 10393 - RNA, 19 nt, Artificial Sequence
  Synthetic
cauuugccgggcaugcacg

SEQ ID NO: 10394 - RNA, 19 nt, Artificial Sequence
  Synthetic
auuugccgggcaugcacgc

SEQ ID NO: 10395 - RNA, 19 nt, Artificial Sequence
  Synthetic
uuugccgggcaugcacgcu

SEQ ID NO: 10396 - RNA, 19 nt, Artificial Sequence
  Synthetic
uugccgggcaugcacgcuu

SEQ ID NO: 10397 - RNA, 19 nt, Artificial Sequence
  Synthetic
ugccgggcaugcacgcuug

SEQ ID NO: 10398 - RNA, 19 nt, Artificial Sequence
  Synthetic
gccgggcaugcacgcuugu

SEQ ID NO: 10399 - RNA, 19 nt, Artificial Sequence
  Synthetic
ccgggcaugcacgcuugua

SEQ ID NO: 10400 - RNA, 19 nt, Artificial Sequence
  Synthetic
cgggcaugcacgcuuguag

SEQ ID NO: 10401 - RNA, 19 nt, Artificial Sequence
  Synthetic
gggcaugcacgcuuguaga

SEQ ID NO: 10402 - RNA, 19 nt, Artificial Sequence
  Synthetic
ggcaugcacgcuuguagau

SEQ ID NO: 10403 - RNA, 19 nt, Artificial Sequence
  Synthetic
gcaugcacgcuuguagauu

SEQ ID NO: 10404 - RNA, 19 nt, Artificial Sequence
  Synthetic
caugcacgcuuguagauuu

SEQ ID NO: 10405 - RNA, 19 nt, Artificial Sequence
  Synthetic
augcacgcuuguagauuuc

SEQ ID NO: 10406 - RNA, 19 nt, Artificial Sequence
  Synthetic
ugcacgcuuguagauuuca

SEQ ID NO: 10407 - RNA, 19 nt, Artificial Sequence
  Synthetic
gcacgcuuguagauuucac

SEQ ID NO: 10408 - RNA, 19 nt, Artificial Sequence
  Synthetic
cacgcuuguagauuucaca

SEQ ID NO: 10409 - RNA, 19 nt, Artificial Sequence
  Synthetic
acgcuuguagauuucacau

SEQ ID NO: 10410 - RNA, 19 nt, Artificial Sequence
  Synthetic
cgcuuguagauuucacauc

SEQ ID NO: 10411 - RNA, 19 nt, Artificial Sequence
  Synthetic
gcuuguagauuucacaucc

SEQ ID NO: 10412 - RNA, 19 nt, Artificial Sequence
  Synthetic
cuuguagauuucacauccc

SEQ ID NO: 10413 - RNA, 19 nt, Artificial Sequence
  Synthetic
uuguagauuucacauccca

SEQ ID NO: 10414 - RNA, 19 nt, Artificial Sequence
  Synthetic
uguagauuucacaucccau

SEQ ID NO: 10415 - RNA, 19 nt, Artificial Sequence
  Synthetic
guagauuucacaucccaug

SEQ ID NO: 10416 - RNA, 19 nt, Artificial Sequence
  Synthetic
uagauuucacaucccauga

SEQ ID NO: 10417 - RNA, 19 nt, Artificial Sequence
  Synthetic
agauuucacaucccaugag

SEQ ID NO: 10418 - RNA, 19 nt, Artificial Sequence
  Synthetic
gauuucacaucccaugagu

SEQ ID NO: 10419 - RNA, 19 nt, Artificial Sequence
  Synthetic
auuucacaucccaugagug

SEQ ID NO: 10420 - RNA, 19 nt, Artificial Sequence
  Synthetic
uuucacaucccaugagugu

SEQ ID NO: 10421 - RNA, 19 nt, Artificial Sequence
  Synthetic
uucacaucccaugagugug

SEQ ID NO: 10422 - RNA, 19 nt, Artificial Sequence
  Synthetic
ucacaucccaugagugugg

SEQ ID NO: 10423 - RNA, 19 nt, Artificial Sequence
  Synthetic
cacaucccaugagugugga

SEQ ID NO: 10424 - RNA, 19 nt, Artificial Sequence
  Synthetic
acaucccaugaguguggag

SEQ ID NO: 10425 - RNA, 19 nt, Artificial Sequence
  Synthetic
caucccaugaguguggagc

SEQ ID NO: 10426 - RNA, 19 nt, Artificial Sequence
  Synthetic
aucccaugaguguggagcu

SEQ ID NO: 10427 - RNA, 19 nt, Artificial Sequence
  Synthetic
ucccaugaguguggagcua

SEQ ID NO: 10428 - RNA, 19 nt, Artificial Sequence
  Synthetic
cccaugaguguggagcuac

SEQ ID NO: 10429 - RNA, 19 nt, Artificial Sequence
  Synthetic
ccaugaguguggagcuacu

SEQ ID NO: 10430 - RNA, 19 nt, Artificial Sequence
  Synthetic
caugaguguggagcuacuu

SEQ ID NO: 10431 - RNA, 19 nt, Artificial Sequence
  Synthetic
augaguguggagcuacuuu

SEQ ID NO: 10432 - RNA, 19 nt, Artificial Sequence
  Synthetic
ugaguguggagcuacuuuc

SEQ ID NO: 10433 - RNA, 19 nt, Artificial Sequence
  Synthetic
gaguguggagcuacuuucu

SEQ ID NO: 10434 - RNA, 19 nt, Artificial Sequence
  Synthetic
aguguggagcuacuuucuu

SEQ ID NO: 10435 - RNA, 19 nt, Artificial Sequence
  Synthetic
guguggagcuacuuucuuc

SEQ ID NO: 10436 - RNA, 19 nt, Artificial Sequence
  Synthetic
uguggagcuacuuucuucu

SEQ ID NO: 10437 - RNA, 19 nt, Artificial Sequence
  Synthetic
guggagcuacuuucuucua

SEQ ID NO: 10438 - RNA, 19 nt, Artificial Sequence
  Synthetic
uggagcuacuuucuucuac

SEQ ID NO: 10439 - RNA, 19 nt, Artificial Sequence
  Synthetic
ggagcuacuuucuucuacc

SEQ ID NO: 10440 - RNA, 19 nt, Artificial Sequence
  Synthetic
gagcuacuuucuucuaccu

SEQ ID NO: 10441 - RNA, 19 nt, Artificial Sequence
  Synthetic
agcuacuuucuucuaccuu

SEQ ID NO: 10442 - RNA, 19 nt, Artificial Sequence
  Synthetic
gcuacuuucuucuaccuuc

SEQ ID NO: 10443 - RNA, 19 nt, Artificial Sequence
  Synthetic
cuacuuucuucuaccuucu

SEQ ID NO: 10444 - RNA, 19 nt, Artificial Sequence
  Synthetic
uacuuucuucuaccuucug

SEQ ID NO: 10445 - RNA, 19 nt, Artificial Sequence
  Synthetic
acuuucuucuaccuucugu

SEQ ID NO: 10446 - RNA, 19 nt, Artificial Sequence
  Synthetic
cuuucuucuaccuucuguu

SEQ ID NO: 10447 - RNA, 19 nt, Artificial Sequence
  Synthetic
uuucuucuaccuucuguuu

SEQ ID NO: 10448 - RNA, 19 nt, Artificial Sequence
  Synthetic
uucuucuaccuucuguuug

SEQ ID NO: 10449 - RNA, 19 nt, Artificial Sequence
  Synthetic
ucuucuaccuucuguuugu

SEQ ID NO: 10450 - RNA, 19 nt, Artificial Sequence
  Synthetic
cuucuaccuucuguuuguc

SEQ ID NO: 10451 - RNA, 19 nt, Artificial Sequence
  Synthetic
uucuaccuucuguuuguca

SEQ ID NO: 10452 - RNA, 19 nt, Artificial Sequence
  Synthetic
ucuaccuucuguuugucag

SEQ ID NO: 10453 - RNA, 19 nt, Artificial Sequence
  Synthetic
cuaccuucuguuugucagu

SEQ ID NO: 10454 - RNA, 19 nt, Artificial Sequence
  Synthetic
uaccuucuguuugucaguu

SEQ ID NO: 10455 - RNA, 19 nt, Artificial Sequence
  Synthetic
accuucuguuugucaguuu

SEQ ID NO: 10456 - RNA, 19 nt, Artificial Sequence
  Synthetic
ccuucuguuugucaguuuu

SEQ ID NO: 10457 - RNA, 19 nt, Artificial Sequence
  Synthetic
cuucuguuugucaguuuua

SEQ ID NO: 10458 - RNA, 19 nt, Artificial Sequence
  Synthetic
uucuguuugucaguuuuag

SEQ ID NO: 10459 - RNA, 19 nt, Artificial Sequence
  Synthetic
ucuguuugucaguuuuagc

SEQ ID NO: 10460 - RNA, 19 nt, Artificial Sequence
  Synthetic
cuguuugucaguuuuagcu

SEQ ID NO: 10461 - RNA, 19 nt, Artificial Sequence
  Synthetic
uguuugucaguuuuagcuu

SEQ ID NO: 10462 - RNA, 19 nt, Artificial Sequence
  Synthetic
guuugucaguuuuagcuuu

SEQ ID NO: 10463 - RNA, 19 nt, Artificial Sequence
  Synthetic
uuugucaguuuuagcuuuu

SEQ ID NO: 10464 - RNA, 19 nt, Artificial Sequence
  Synthetic
uugucaguuuuagcuuuuc

SEQ ID NO: 10465 - RNA, 19 nt, Artificial Sequence
  Synthetic
ugucaguuuuagcuuuucu

SEQ ID NO: 10466 - RNA, 19 nt, Artificial Sequence
  Synthetic
gucaguuuuagcuuuucug

SEQ ID NO: 10467 - RNA, 19 nt, Artificial Sequence
  Synthetic
ucaguuuuagcuuuucuga

SEQ ID NO: 10468 - RNA, 19 nt, Artificial Sequence
  Synthetic
caguuuuagcuuuucugac

SEQ ID NO: 10469 - RNA, 19 nt, Artificial Sequence
  Synthetic
aguuuuagcuuuucugacu

SEQ ID NO: 10470 - RNA, 19 nt, Artificial Sequence
  Synthetic
guuuuagcuuuucugacua

SEQ ID NO: 10471 - RNA, 19 nt, Artificial Sequence
  Synthetic
uuuuagcuuuucugacuac

SEQ ID NO: 10472 - RNA, 19 nt, Artificial Sequence
  Synthetic
uuuagcuuuucugacuacu

SEQ ID NO: 10473 - RNA, 19 nt, Artificial Sequence
  Synthetic
uuagcuuuucugacuacuu

SEQ ID NO: 10474 - RNA, 19 nt, Artificial Sequence
  Synthetic
uagcuuuucugacuacuuc

SEQ ID NO: 10475 - RNA, 19 nt, Artificial Sequence
  Synthetic
agcuuuucugacuacuucc

SEQ ID NO: 10476 - RNA, 19 nt, Artificial Sequence
  Synthetic
gcuuuucugacuacuuccu

SEQ ID NO: 10477 - RNA, 19 nt, Artificial Sequence
  Synthetic
cuuuucugacuacuuccuu

SEQ ID NO: 10478 - RNA, 19 nt, Artificial Sequence
  Synthetic
uuuucugacuacuuccuug

SEQ ID NO: 10479 - RNA, 19 nt, Artificial Sequence
  Synthetic
uuucugacuacuuccuuga

SEQ ID NO: 10480 - RNA, 19 nt, Artificial Sequence
  Synthetic
uucugacuacuuccuugau

SEQ ID NO: 10481 - RNA, 19 nt, Artificial Sequence
  Synthetic
ucugacuacuuccuugaug

SEQ ID NO: 10482 - RNA, 19 nt, Artificial Sequence
  Synthetic
cugacuacuuccuugaugu

SEQ ID NO: 10483 - RNA, 19 nt, Artificial Sequence
  Synthetic
ugacuacuuccuugauguu

SEQ ID NO: 10484 - RNA, 19 nt, Artificial Sequence
  Synthetic
gacuacuuccuugauguua

SEQ ID NO: 10485 - RNA, 19 nt, Artificial Sequence
  Synthetic
acuacuuccuugauguuaa

SEQ ID NO: 10486 - RNA, 19 nt, Artificial Sequence
  Synthetic
cuacuuccuugauguuaag

SEQ ID NO: 10487 - RNA, 19 nt, Artificial Sequence
  Synthetic
uacuuccuugauguuaagu

SEQ ID NO: 10488 - RNA, 19 nt, Artificial Sequence
  Synthetic
acuuccuugauguuaaguu

SEQ ID NO: 10489 - RNA, 19 nt, Artificial Sequence
  Synthetic
cuuccuugauguuaaguug

SEQ ID NO: 10490 - RNA, 19 nt, Artificial Sequence
  Synthetic
uuccuugauguuaaguugu

SEQ ID NO: 10491 - RNA, 19 nt, Artificial Sequence
  Synthetic
uccuugauguuaaguuguc

SEQ ID NO: 10492 - RNA, 19 nt, Artificial Sequence
  Synthetic
ccuugauguuaaguuguca

SEQ ID NO: 10493 - RNA, 19 nt, Artificial Sequence
  Synthetic
cuugauguuaaguugucac

SEQ ID NO: 10494 - RNA, 19 nt, Artificial Sequence
  Synthetic
uugauguuaaguugucacu

SEQ ID NO: 10495 - RNA, 19 nt, Artificial Sequence
  Synthetic
ugauguuaaguugucacuu

SEQ ID NO: 10496 - RNA, 19 nt, Artificial Sequence
  Synthetic
gauguuaaguugucacuug

SEQ ID NO: 10497 - RNA, 19 nt, Artificial Sequence
  Synthetic
auguuaaguugucacuugc

SEQ ID NO: 10498 - RNA, 19 nt, Artificial Sequence
  Synthetic
uguuaaguugucacuugcc

SEQ ID NO: 10499 - RNA, 19 nt, Artificial Sequence
  Synthetic
guuaaguugucacuugcca

SEQ ID NO: 10500 - RNA, 19 nt, Artificial Sequence
  Synthetic
uuaaguugucacuugccag

SEQ ID NO: 10501 - RNA, 19 nt, Artificial Sequence
  Synthetic
uaaguugucacuugccagg

SEQ ID NO: 10502 - RNA, 19 nt, Artificial Sequence
  Synthetic
aaguugucacuugccaggu

SEQ ID NO: 10503 - RNA, 19 nt, Artificial Sequence
  Synthetic
aguugucacuugccagguu

SEQ ID NO: 10504 - RNA, 19 nt, Artificial Sequence
  Synthetic
guugucacuugccagguuu

SEQ ID NO: 10505 - RNA, 19 nt, Artificial Sequence
  Synthetic
uugucacuugccagguuuu

SEQ ID NO: 10506 - RNA, 19 nt, Artificial Sequence
  Synthetic
ugucacuugccagguuuuc

SEQ ID NO: 10507 - RNA, 19 nt, Artificial Sequence
  Synthetic
gucacuugccagguuuucc

SEQ ID NO: 10508 - RNA, 19 nt, Artificial Sequence
  Synthetic
ucacuugccagguuuuccc

SEQ ID NO: 10509 - RNA, 19 nt, Artificial Sequence
  Synthetic
cacuugccagguuuuccca

SEQ ID NO: 10510 - RNA, 19 nt, Artificial Sequence
  Synthetic
acuugccagguuuucccaa

SEQ ID NO: 10511 - RNA, 19 nt, Artificial Sequence
  Synthetic
cuugccagguuuucccaaa

SEQ ID NO: 10512 - RNA, 19 nt, Artificial Sequence
  Synthetic
uugccagguuuucccaaaa

SEQ ID NO: 10513 - RNA, 19 nt, Artificial Sequence
  Synthetic
ugccagguuuucccaaaac

SEQ ID NO: 10514 - RNA, 19 nt, Artificial Sequence
  Synthetic
gccagguuuucccaaaacg

SEQ ID NO: 10515 - RNA, 19 nt, Artificial Sequence
  Synthetic
ccagguuuucccaaaacgu

SEQ ID NO: 10516 - RNA, 19 nt, Artificial Sequence
  Synthetic
cagguuuucccaaaacgug

SEQ ID NO: 10517 - RNA, 19 nt, Artificial Sequence
  Synthetic
agguuuucccaaaacgugg

SEQ ID NO: 10518 - RNA, 19 nt, Artificial Sequence
  Synthetic
gguuuucccaaaacguggg

SEQ ID NO: 10519 - RNA, 19 nt, Artificial Sequence
  Synthetic
guuuucccaaaacgugggu

SEQ ID NO: 10520 - RNA, 19 nt, Artificial Sequence
  Synthetic
uuuucccaaaacguggguu

SEQ ID NO: 10521 - RNA, 19 nt, Artificial Sequence
  Synthetic
uuucccaaaacguggguuu

SEQ ID NO: 10522 - RNA, 19 nt, Artificial Sequence
  Synthetic
uucccaaaacguggguuuc

SEQ ID NO: 10523 - RNA, 19 nt, Artificial Sequence
  Synthetic
ucccaaaacguggguuucu

SEQ ID NO: 10524 - RNA, 19 nt, Artificial Sequence
  Synthetic
cccaaaacguggguuucuc

SEQ ID NO: 10525 - RNA, 19 nt, Artificial Sequence
  Synthetic
ccaaaacguggguuucuca

SEQ ID NO: 10526 - RNA, 19 nt, Artificial Sequence
  Synthetic
caaaacguggguuucucau

SEQ ID NO: 10527 - RNA, 19 nt, Artificial Sequence
  Synthetic
aaaacguggguuucucauc

SEQ ID NO: 10528 - RNA, 19 nt, Artificial Sequence
  Synthetic
aaacguggguuucucaucu

SEQ ID NO: 10529 - RNA, 19 nt, Artificial Sequence
  Synthetic
aacguggguuucucaucuc

SEQ ID NO: 10530 - RNA, 19 nt, Artificial Sequence
  Synthetic
acguggguuucucaucucc

SEQ ID NO: 10531 - RNA, 19 nt, Artificial Sequence
  Synthetic
cguggguuucucaucucca

SEQ ID NO: 10532 - RNA, 19 nt, Artificial Sequence
  Synthetic
guggguuucucaucuccaa

SEQ ID NO: 10533 - RNA, 19 nt, Artificial Sequence
  Synthetic
uggguuucucaucuccaac

SEQ ID NO: 10534 - RNA, 19 nt, Artificial Sequence
  Synthetic
ggguuucucaucuccaaca

SEQ ID NO: 10535 - RNA, 19 nt, Artificial Sequence
  Synthetic
gguuucucaucuccaacaa

SEQ ID NO: 10536 - RNA, 19 nt, Artificial Sequence
  Synthetic
guuucucaucuccaacaac

SEQ ID NO: 10537 - RNA, 19 nt, Artificial Sequence
  Synthetic
uuucucaucuccaacaacc

SEQ ID NO: 10538 - RNA, 19 nt, Artificial Sequence
  Synthetic
uucucaucuccaacaaccc

SEQ ID NO: 10539 - RNA, 19 nt, Artificial Sequence
  Synthetic
ucucaucuccaacaacccu

SEQ ID NO: 10540 - RNA, 19 nt, Artificial Sequence
  Synthetic
cucaucuccaacaacccua

SEQ ID NO: 10541 - RNA, 19 nt, Artificial Sequence
  Synthetic
ucaucuccaacaacccuaa

SEQ ID NO: 10542 - RNA, 19 nt, Artificial Sequence
  Synthetic
caucuccaacaacccuaau

SEQ ID NO: 10543 - RNA, 19 nt, Artificial Sequence
  Synthetic
aucuccaacaacccuaauc

SEQ ID NO: 10544 - RNA, 19 nt, Artificial Sequence
  Synthetic
ucuccaacaacccuaaucu

SEQ ID NO: 10545 - RNA, 19 nt, Artificial Sequence
  Synthetic
cuccaacaacccuaaucua

SEQ ID NO: 10546 - RNA, 19 nt, Artificial Sequence
  Synthetic
uccaacaacccuaaucuac

SEQ ID NO: 10547 - RNA, 19 nt, Artificial Sequence
  Synthetic
ccaacaacccuaaucuacu

SEQ ID NO: 10548 - RNA, 19 nt, Artificial Sequence
  Synthetic
caacaacccuaaucuacuu

SEQ ID NO: 10549 - RNA, 19 nt, Artificial Sequence
  Synthetic
aacaacccuaaucuacuua

SEQ ID NO: 10550 - RNA, 19 nt, Artificial Sequence
  Synthetic
acaacccuaaucuacuuag

SEQ ID NO: 10551 - RNA, 19 nt, Artificial Sequence
  Synthetic
caacccuaaucuacuuagc

SEQ ID NO: 10552 - RNA, 19 nt, Artificial Sequence
  Synthetic
aacccuaaucuacuuagcu

SEQ ID NO: 10553 - RNA, 19 nt, Artificial Sequence
  Synthetic
acccuaaucuacuuagcuc

SEQ ID NO: 10554 - RNA, 19 nt, Artificial Sequence
  Synthetic
cccuaaucuacuuagcucu

SEQ ID NO: 10555 - RNA, 19 nt, Artificial Sequence
  Synthetic
ccuaaucuacuuagcucuc

SEQ ID NO: 10556 - RNA, 19 nt, Artificial Sequence
  Synthetic
cuaaucuacuuagcucucu

SEQ ID NO: 10557 - RNA, 19 nt, Artificial Sequence
  Synthetic
uaaucuacuuagcucucua

SEQ ID NO: 10558 - RNA, 19 nt, Artificial Sequence
  Synthetic
aaucuacuuagcucucuaa

SEQ ID NO: 10559 - RNA, 19 nt, Artificial Sequence
  Synthetic
aucuacuuagcucucuaau

SEQ ID NO: 10560 - RNA, 19 nt, Artificial Sequence
  Synthetic
ucuacuuagcucucuaauu

SEQ ID NO: 10561 - RNA, 19 nt, Artificial Sequence
  Synthetic
cuacuuagcucucuaauua

SEQ ID NO: 10562 - RNA, 19 nt, Artificial Sequence
  Synthetic
uacuuagcucucuaauuac

SEQ ID NO: 10563 - RNA, 19 nt, Artificial Sequence
  Synthetic
acuuagcucucuaauuacu

SEQ ID NO: 10564 - RNA, 19 nt, Artificial Sequence
  Synthetic
cuuagcucucuaauuacua

SEQ ID NO: 10565 - RNA, 19 nt, Artificial Sequence
  Synthetic
uuagcucucuaauuacuaa

SEQ ID NO: 10566 - RNA, 19 nt, Artificial Sequence
  Synthetic
uagcucucuaauuacuaac

SEQ ID NO: 10567 - RNA, 19 nt, Artificial Sequence
  Synthetic
agcucucuaauuacuaacu

SEQ ID NO: 10568 - RNA, 19 nt, Artificial Sequence
  Synthetic
gcucucuaauuacuaacuu

SEQ ID NO: 10569 - RNA, 19 nt, Artificial Sequence
  Synthetic
cucucuaauuacuaacuuc

SEQ ID NO: 10570 - RNA, 19 nt, Artificial Sequence
  Synthetic
ucucuaauuacuaacuucu

SEQ ID NO: 10571 - RNA, 19 nt, Artificial Sequence
  Synthetic
cucuaauuacuaacuucuu

SEQ ID NO: 10572 - RNA, 19 nt, Artificial Sequence
  Synthetic
ucuaauuacuaacuucuua

SEQ ID NO: 10573 - RNA, 19 nt, Artificial Sequence
  Synthetic
cuaauuacuaacuucuuac

SEQ ID NO: 10574 - RNA, 19 nt, Artificial Sequence
  Synthetic
uaauuacuaacuucuuacu

SEQ ID NO: 10575 - RNA, 19 nt, Artificial Sequence
  Synthetic
aauuacuaacuucuuacua

SEQ ID NO: 10576 - RNA, 19 nt, Artificial Sequence
  Synthetic
auuacuaacuucuuacuag

SEQ ID NO: 10577 - RNA, 19 nt, Artificial Sequence
  Synthetic
uuacuaacuucuuacuagu

SEQ ID NO: 10578 - RNA, 19 nt, Artificial Sequence
  Synthetic
uacuaacuucuuacuaguc

SEQ ID NO: 10579 - RNA, 19 nt, Artificial Sequence
  Synthetic
acuaacuucuuacuagucu

SEQ ID NO: 10580 - RNA, 19 nt, Artificial Sequence
  Synthetic
cuaacuucuuacuagucug

SEQ ID NO: 10581 - RNA, 19 nt, Artificial Sequence
  Synthetic
uaacuucuuacuagucugu

SEQ ID NO: 10582 - RNA, 19 nt, Artificial Sequence
  Synthetic
aacuucuuacuagucugug

SEQ ID NO: 10583 - RNA, 19 nt, Artificial Sequence
  Synthetic
acuucuuacuagucuguga

SEQ ID NO: 10584 - RNA, 19 nt, Artificial Sequence
  Synthetic
cuucuuacuagucugugag

SEQ ID NO: 10585 - RNA, 19 nt, Artificial Sequence
  Synthetic
uucuuacuagucugugagu

SEQ ID NO: 10586 - RNA, 19 nt, Artificial Sequence
  Synthetic
ucuuacuagucugugaguc

SEQ ID NO: 10587 - RNA, 19 nt, Artificial Sequence
  Synthetic
cuuacuagucugugaguca

SEQ ID NO: 10588 - RNA, 19 nt, Artificial Sequence
  Synthetic
uuacuagucugugagucag

SEQ ID NO: 10589 - RNA, 19 nt, Artificial Sequence
  Synthetic
uacuagucugugagucaga

SEQ ID NO: 10590 - RNA, 19 nt, Artificial Sequence
  Synthetic
acuagucugugagucagaa

SEQ ID NO: 10591 - RNA, 19 nt, Artificial Sequence
  Synthetic
cuagucugugagucagaaa

SEQ ID NO: 10592 - RNA, 19 nt, Artificial Sequence
  Synthetic
uagucugugagucagaaaa

SEQ ID NO: 10593 - RNA, 19 nt, Artificial Sequence
  Synthetic
agucugugagucagaaaac

SEQ ID NO: 10594 - RNA, 19 nt, Artificial Sequence
  Synthetic
gucugugagucagaaaacc

SEQ ID NO: 10595 - RNA, 19 nt, Artificial Sequence
  Synthetic
ucugugagucagaaaacca

SEQ ID NO: 10596 - RNA, 19 nt, Artificial Sequence
  Synthetic
cugugagucagaaaaccac

SEQ ID NO: 10597 - RNA, 19 nt, Artificial Sequence
  Synthetic
ugugagucagaaaaccaca

SEQ ID NO: 10598 - RNA, 19 nt, Artificial Sequence
  Synthetic
gugagucagaaaaccacau

SEQ ID NO: 10599 - RNA, 19 nt, Artificial Sequence
  Synthetic
ugagucagaaaaccacaug

SEQ ID NO: 10600 - RNA, 19 nt, Artificial Sequence
  Synthetic
gagucagaaaaccacauga

SEQ ID NO: 10601 - RNA, 19 nt, Artificial Sequence
  Synthetic
agucagaaaaccacaugac

SEQ ID NO: 10602 - RNA, 19 nt, Artificial Sequence
  Synthetic
gucagaaaaccacaugaca

SEQ ID NO: 10603 - RNA, 19 nt, Artificial Sequence
  Synthetic
ucagaaaaccacaugacaa

SEQ ID NO: 10604 - RNA, 19 nt, Artificial Sequence
  Synthetic
cagaaaaccacaugacaaa

SEQ ID NO: 10605 - RNA, 19 nt, Artificial Sequence
  Synthetic
agaaaaccacaugacaaaa

SEQ ID NO: 10606 - RNA, 19 nt, Artificial Sequence
  Synthetic
gaaaaccacaugacaaaau

SEQ ID NO: 10607 - RNA, 19 nt, Artificial Sequence
  Synthetic
aaaaccacaugacaaaauu

SEQ ID NO: 10608 - RNA, 19 nt, Artificial Sequence
  Synthetic
aaaccacaugacaaaauug

SEQ ID NO: 10609 - RNA, 19 nt, Artificial Sequence
  Synthetic
aaccacaugacaaaauuga

SEQ ID NO: 10610 - RNA, 19 nt, Artificial Sequence
  Synthetic
accacaugacaaaauugac

SEQ ID NO: 10611 - RNA, 19 nt, Artificial Sequence
  Synthetic
ccacaugacaaaauugacu

SEQ ID NO: 10612 - RNA, 19 nt, Artificial Sequence
  Synthetic
cacaugacaaaauugacuu

SEQ ID NO: 10613 - RNA, 19 nt, Artificial Sequence
  Synthetic
acaugacaaaauugacuua

SEQ ID NO: 10614 - RNA, 19 nt, Artificial Sequence
  Synthetic
caugacaaaauugacuuag

SEQ ID NO: 10615 - RNA, 19 nt, Artificial Sequence
  Synthetic
augacaaaauugacuuaga

SEQ ID NO: 10616 - RNA, 19 nt, Artificial Sequence
  Synthetic
ugacaaaauugacuuagaa

SEQ ID NO: 10617 - RNA, 19 nt, Artificial Sequence
  Synthetic
gacaaaauugacuuagaac

SEQ ID NO: 10618 - RNA, 19 nt, Artificial Sequence
  Synthetic
acaaaauugacuuagaacu

SEQ ID NO: 10619 - RNA, 19 nt, Artificial Sequence
  Synthetic
caaaauugacuuagaacug

SEQ ID NO: 10620 - RNA, 19 nt, Artificial Sequence
  Synthetic
aaaauugacuuagaacugu

SEQ ID NO: 10621 - RNA, 19 nt, Artificial Sequence
  Synthetic
aaauugacuuagaacuguc

SEQ ID NO: 10622 - RNA, 19 nt, Artificial Sequence
  Synthetic
aauugacuuagaacuguca

SEQ ID NO: 10623 - RNA, 19 nt, Artificial Sequence
  Synthetic
auugacuuagaacugucac

SEQ ID NO: 10624 - RNA, 19 nt, Artificial Sequence
  Synthetic
uugacuuagaacugucaca

SEQ ID NO: 10625 - RNA, 19 nt, Artificial Sequence
  Synthetic
ugacuuagaacugucacac

SEQ ID NO: 10626 - RNA, 19 nt, Artificial Sequence
  Synthetic
gacuuagaacugucacacg

SEQ ID NO: 10627 - RNA, 19 nt, Artificial Sequence
  Synthetic
acuuagaacugucacacga

SEQ ID NO: 10628 - RNA, 19 nt, Artificial Sequence
  Synthetic
cuuagaacugucacacgau

SEQ ID NO: 10629 - RNA, 19 nt, Artificial Sequence
  Synthetic
uuagaacugucacacgaua

SEQ ID NO: 10630 - RNA, 19 nt, Artificial Sequence
  Synthetic
uagaacugucacacgauaa

SEQ ID NO: 10631 - RNA, 19 nt, Artificial Sequence
  Synthetic
agaacugucacacgauaag

SEQ ID NO: 10632 - RNA, 19 nt, Artificial Sequence
  Synthetic
gaacugucacacgauaagg

SEQ ID NO: 10633 - RNA, 19 nt, Artificial Sequence
  Synthetic
aacugucacacgauaaggg

SEQ ID NO: 10634 - RNA, 19 nt, Artificial Sequence
  Synthetic
acugucacacgauaaggga

SEQ ID NO: 10635 - RNA, 19 nt, Artificial Sequence
  Synthetic
cugucacacgauaagggaa

SEQ ID NO: 10636 - RNA, 19 nt, Artificial Sequence
  Synthetic
ugucacacgauaagggaac

SEQ ID NO: 10637 - RNA, 19 nt, Artificial Sequence
  Synthetic
gucacacgauaagggaacc

SEQ ID NO: 10638 - RNA, 19 nt, Artificial Sequence
  Synthetic
ucacacgauaagggaacca

SEQ ID NO: 10639 - RNA, 19 nt, Artificial Sequence
  Synthetic
cacacgauaagggaaccag

SEQ ID NO: 10640 - RNA, 19 nt, Artificial Sequence
  Synthetic
acacgauaagggaaccagg

SEQ ID NO: 10641 - RNA, 19 nt, Artificial Sequence
  Synthetic
cacgauaagggaaccagga

SEQ ID NO: 10642 - RNA, 19 nt, Artificial Sequence
  Synthetic
acgauaagggaaccaggaa

SEQ ID NO: 10643 - RNA, 19 nt, Artificial Sequence
  Synthetic
cgauaagggaaccaggaac

SEQ ID NO: 10644 - RNA, 19 nt, Artificial Sequence
  Synthetic
gauaagggaaccaggaacu

SEQ ID NO: 10645 - RNA, 19 nt, Artificial Sequence
  Synthetic
auaagggaaccaggaacuc

SEQ ID NO: 10646 - RNA, 19 nt, Artificial Sequence
  Synthetic
uaagggaaccaggaacucu

SEQ ID NO: 10647 - RNA, 19 nt, Artificial Sequence
  Synthetic
aagggaaccaggaacucuc

SEQ ID NO: 10648 - RNA, 19 nt, Artificial Sequence
  Synthetic
agggaaccaggaacucucc

SEQ ID NO: 10649 - RNA, 19 nt, Artificial Sequence
  Synthetic
gggaaccaggaacucucca

SEQ ID NO: 10650 - RNA, 19 nt, Artificial Sequence
  Synthetic
ggaaccaggaacucuccaa

SEQ ID NO: 10651 - RNA, 19 nt, Artificial Sequence
  Synthetic
gaaccaggaacucuccaaa

SEQ ID NO: 10652 - RNA, 19 nt, Artificial Sequence
  Synthetic
aaccaggaacucuccaaau

SEQ ID NO: 10653 - RNA, 19 nt, Artificial Sequence
  Synthetic
accaggaacucuccaaaua

SEQ ID NO: 10654 - RNA, 19 nt, Artificial Sequence
  Synthetic
ccaggaacucuccaaauag

SEQ ID NO: 10655 - RNA, 19 nt, Artificial Sequence
  Synthetic
caggaacucuccaaauaga

SEQ ID NO: 10656 - RNA, 19 nt, Artificial Sequence
  Synthetic
aggaacucuccaaauagag

SEQ ID NO: 10657 - RNA, 19 nt, Artificial Sequence
  Synthetic
ggaacucuccaaauagagu

SEQ ID NO: 10658 - RNA, 19 nt, Artificial Sequence
  Synthetic
gaacucuccaaauagaguu

SEQ ID NO: 10659 - RNA, 19 nt, Artificial Sequence
  Synthetic
aacucuccaaauagaguuc

SEQ ID NO: 10660 - RNA, 19 nt, Artificial Sequence
  Synthetic
acucuccaaauagaguucc

SEQ ID NO: 10661 - RNA, 19 nt, Artificial Sequence
  Synthetic
cucuccaaauagaguuccu

SEQ ID NO: 10662 - RNA, 19 nt, Artificial Sequence
  Synthetic
ucuccaaauagaguuccua

SEQ ID NO: 10663 - RNA, 19 nt, Artificial Sequence
  Synthetic
cuccaaauagaguuccuaa

SEQ ID NO: 10664 - RNA, 19 nt, Artificial Sequence
  Synthetic
uccaaauagaguuccuaac

SEQ ID NO: 10665 - RNA, 19 nt, Artificial Sequence
  Synthetic
ccaaauagaguuccuaacu

SEQ ID NO: 10666 - RNA, 19 nt, Artificial Sequence
  Synthetic
caaauagaguuccuaacuc

SEQ ID NO: 10667 - RNA, 19 nt, Artificial Sequence
  Synthetic
aaauagaguuccuaacucu

SEQ ID NO: 10668 - RNA, 19 nt, Artificial Sequence
  Synthetic
aauagaguuccuaacucuu

SEQ ID NO: 10669 - RNA, 19 nt, Artificial Sequence
  Synthetic
auagaguuccuaacucuuu

SEQ ID NO: 10670 - RNA, 19 nt, Artificial Sequence
  Synthetic
uagaguuccuaacucuuuc

SEQ ID NO: 10671 - RNA, 19 nt, Artificial Sequence
  Synthetic
agaguuccuaacucuuuca

SEQ ID NO: 10672 - RNA, 19 nt, Artificial Sequence
  Synthetic
gaguuccuaacucuuucag

SEQ ID NO: 10673 - RNA, 19 nt, Artificial Sequence
  Synthetic
aguuccuaacucuuucagu

SEQ ID NO: 10674 - RNA, 19 nt, Artificial Sequence
  Synthetic
guuccuaacucuuucaguu

SEQ ID NO: 10675 - RNA, 19 nt, Artificial Sequence
  Synthetic
uuccuaacucuuucaguuc

SEQ ID NO: 10676 - RNA, 19 nt, Artificial Sequence
  Synthetic
uccuaacucuuucaguucu

SEQ ID NO: 10677 - RNA, 19 nt, Artificial Sequence
  Synthetic
ccuaacucuuucaguucuc

SEQ ID NO: 10678 - RNA, 19 nt, Artificial Sequence
  Synthetic
cuaacucuuucaguucuca

SEQ ID NO: 10679 - RNA, 19 nt, Artificial Sequence
  Synthetic
uaacucuuucaguucucag

SEQ ID NO: 10680 - RNA, 19 nt, Artificial Sequence
  Synthetic
aacucuuucaguucucaga

SEQ ID NO: 10681 - RNA, 19 nt, Artificial Sequence
  Synthetic
acucuuucaguucucagaa

SEQ ID NO: 10682 - RNA, 19 nt, Artificial Sequence
  Synthetic
cucuuucaguucucagaau

SEQ ID NO: 10683 - RNA, 19 nt, Artificial Sequence
  Synthetic
ucuuucaguucucagaauu

SEQ ID NO: 10684 - RNA, 19 nt, Artificial Sequence
  Synthetic
cuuucaguucucagaauua

SEQ ID NO: 10685 - RNA, 19 nt, Artificial Sequence
  Synthetic
uuucaguucucagaauuag

SEQ ID NO: 10686 - RNA, 19 nt, Artificial Sequence
  Synthetic
uucaguucucagaauuagu

SEQ ID NO: 10687 - RNA, 19 nt, Artificial Sequence
  Synthetic
ucaguucucagaauuagug

SEQ ID NO: 10688 - RNA, 19 nt, Artificial Sequence
  Synthetic
caguucucagaauuagugg

SEQ ID NO: 10689 - RNA, 19 nt, Artificial Sequence
  Synthetic
aguucucagaauuagugga

SEQ ID NO: 10690 - RNA, 19 nt, Artificial Sequence
  Synthetic
guucucagaauuaguggaa

SEQ ID NO: 10691 - RNA, 19 nt, Artificial Sequence
  Synthetic
uucucagaauuaguggaaa

SEQ ID NO: 10692 - RNA, 19 nt, Artificial Sequence
  Synthetic
ucucagaauuaguggaaag

SEQ ID NO: 10693 - RNA, 19 nt, Artificial Sequence
  Synthetic
cucagaauuaguggaaaga

SEQ ID NO: 10694 - RNA, 19 nt, Artificial Sequence
  Synthetic
ucagaauuaguggaaagau

SEQ ID NO: 10695 - RNA, 19 nt, Artificial Sequence
  Synthetic
cagaauuaguggaaagauc

SEQ ID NO: 10696 - RNA, 19 nt, Artificial Sequence
  Synthetic
agaauuaguggaaagaucc

SEQ ID NO: 10697 - RNA, 19 nt, Artificial Sequence
  Synthetic
gaauuaguggaaagauccu

SEQ ID NO: 10698 - RNA, 19 nt, Artificial Sequence
  Synthetic
aauuaguggaaagauccug

SEQ ID NO: 10699 - RNA, 19 nt, Artificial Sequence
  Synthetic
auuaguggaaagauccugc

SEQ ID NO: 10700 - RNA, 19 nt, Artificial Sequence
  Synthetic
uuaguggaaagauccugca

SEQ ID NO: 10701 - RNA, 19 nt, Artificial Sequence
  Synthetic
uaguggaaagauccugcag

SEQ ID NO: 10702 - RNA, 19 nt, Artificial Sequence
  Synthetic
aguggaaagauccugcagc

SEQ ID NO: 10703 - RNA, 19 nt, Artificial Sequence
  Synthetic
guggaaagauccugcagcc

SEQ ID NO: 10704 - RNA, 19 nt, Artificial Sequence
  Synthetic
uggaaagauccugcagcca

SEQ ID NO: 10705 - RNA, 19 nt, Artificial Sequence
  Synthetic
ggaaagauccugcagccau

SEQ ID NO: 10706 - RNA, 19 nt, Artificial Sequence
  Synthetic
gaaagauccugcagccauu

SEQ ID NO: 10707 - RNA, 19 nt, Artificial Sequence
  Synthetic
aaagauccugcagccauuu

SEQ ID NO: 10708 - RNA, 19 nt, Artificial Sequence
  Synthetic
aagauccugcagccauuuc

SEQ ID NO: 10709 - RNA, 19 nt, Artificial Sequence
  Synthetic
agauccugcagccauuucc

SEQ ID NO: 10710 - RNA, 19 nt, Artificial Sequence
  Synthetic
gauccugcagccauuucca

SEQ ID NO: 10711 - RNA, 19 nt, Artificial Sequence
  Synthetic
auccugcagccauuuccag

SEQ ID NO: 10712 - RNA, 19 nt, Artificial Sequence
  Synthetic
uccugcagccauuuccagu

SEQ ID NO: 10713 - RNA, 19 nt, Artificial Sequence
  Synthetic
ccugcagccauuuccagug

SEQ ID NO: 10714 - RNA, 19 nt, Artificial Sequence
  Synthetic
cugcagccauuuccagugc

SEQ ID NO: 10715 - RNA, 19 nt, Artificial Sequence
  Synthetic
ugcagccauuuccagugca

SEQ ID NO: 10716 - RNA, 19 nt, Artificial Sequence
  Synthetic
gcagccauuuccagugcaa

SEQ ID NO: 10717 - RNA, 19 nt, Artificial Sequence
  Synthetic
cagccauuuccagugcaac

SEQ ID NO: 10718 - RNA, 19 nt, Artificial Sequence
  Synthetic
agccauuuccagugcaaca

SEQ ID NO: 10719 - RNA, 19 nt, Artificial Sequence
  Synthetic
gccauuuccagugcaacau

SEQ ID NO: 10720 - RNA, 19 nt, Artificial Sequence
  Synthetic
ccauuuccagugcaacauc

SEQ ID NO: 10721 - RNA, 19 nt, Artificial Sequence
  Synthetic
cauuuccagugcaacaucc

SEQ ID NO: 10722 - RNA, 19 nt, Artificial Sequence
  Synthetic
auuuccagugcaacauccu

SEQ ID NO: 10723 - RNA, 19 nt, Artificial Sequence
  Synthetic
uuuccagugcaacauccua

SEQ ID NO: 10724 - RNA, 19 nt, Artificial Sequence
  Synthetic
uuccagugcaacauccuag

SEQ ID NO: 10725 - RNA, 19 nt, Artificial Sequence
  Synthetic
uccagugcaacauccuaga

SEQ ID NO: 10726 - RNA, 19 nt, Artificial Sequence
  Synthetic
ccagugcaacauccuagag

SEQ ID NO: 10727 - RNA, 19 nt, Artificial Sequence
  Synthetic
cagugcaacauccuagaga

SEQ ID NO: 10728 - RNA, 19 nt, Artificial Sequence
  Synthetic
agugcaacauccuagagau

SEQ ID NO: 10729 - RNA, 19 nt, Artificial Sequence
  Synthetic
gugcaacauccuagagauc

SEQ ID NO: 10730 - RNA, 19 nt, Artificial Sequence
  Synthetic
ugcaacauccuagagaucu

SEQ ID NO: 10731 - RNA, 19 nt, Artificial Sequence
  Synthetic
gcaacauccuagagaucug

SEQ ID NO: 10732 - RNA, 19 nt, Artificial Sequence
  Synthetic
caacauccuagagaucuga

SEQ ID NO: 10733 - RNA, 19 nt, Artificial Sequence
  Synthetic
aacauccuagagaucugag

SEQ ID NO: 10734 - RNA, 19 nt, Artificial Sequence
  Synthetic
acauccuagagaucugagg

SEQ ID NO: 10735 - RNA, 19 nt, Artificial Sequence
  Synthetic
cauccuagagaucugaggu

SEQ ID NO: 10736 - RNA, 19 nt, Artificial Sequence
  Synthetic
auccuagagaucugagguu

SEQ ID NO: 10737 - RNA, 19 nt, Artificial Sequence
  Synthetic
uccuagagaucugagguuc

SEQ ID NO: 10738 - RNA, 19 nt, Artificial Sequence
  Synthetic
ccuagagaucugagguucc

SEQ ID NO: 10739 - RNA, 19 nt, Artificial Sequence
  Synthetic
cuagagaucugagguuccc

SEQ ID NO: 10740 - RNA, 19 nt, Artificial Sequence
  Synthetic
uagagaucugagguucccu

SEQ ID NO: 10741 - RNA, 19 nt, Artificial Sequence
  Synthetic
agagaucugagguucccug

SEQ ID NO: 10742 - RNA, 19 nt, Artificial Sequence
  Synthetic
gagaucugagguucccugg

SEQ ID NO: 10743 - RNA, 19 nt, Artificial Sequence
  Synthetic
agaucugagguucccugga

SEQ ID NO: 10744 - RNA, 19 nt, Artificial Sequence
  Synthetic
gaucugagguucccuggag

SEQ ID NO: 10745 - RNA, 19 nt, Artificial Sequence
  Synthetic
aucugagguucccuggaga

SEQ ID NO: 10746 - RNA, 19 nt, Artificial Sequence
  Synthetic
ucugagguucccuggagac

SEQ ID NO: 10747 - RNA, 19 nt, Artificial Sequence
  Synthetic
cugagguucccuggagacc

SEQ ID NO: 10748 - RNA, 19 nt, Artificial Sequence
  Synthetic
ugagguucccuggagacca

SEQ ID NO: 10749 - RNA, 19 nt, Artificial Sequence
  Synthetic
gagguucccuggagaccaa

SEQ ID NO: 10750 - RNA, 19 nt, Artificial Sequence
  Synthetic
agguucccuggagaccaac

SEQ ID NO: 10751 - RNA, 19 nt, Artificial Sequence
  Synthetic
gguucccuggagaccaacu

SEQ ID NO: 10752 - RNA, 19 nt, Artificial Sequence
  Synthetic
guucccuggagaccaacuc

SEQ ID NO: 10753 - RNA, 19 nt, Artificial Sequence
  Synthetic
uucccuggagaccaacucu

SEQ ID NO: 10754 - RNA, 19 nt, Artificial Sequence
  Synthetic
ucccuggagaccaacucuc

SEQ ID NO: 10755 - RNA, 19 nt, Artificial Sequence
  Synthetic
cccuggagaccaacucuca

SEQ ID NO: 10756 - RNA, 19 nt, Artificial Sequence
  Synthetic
ccuggagaccaacucucag

SEQ ID NO: 10757 - RNA, 19 nt, Artificial Sequence
  Synthetic
cuggagaccaacucucaga

SEQ ID NO: 10758 - RNA, 19 nt, Artificial Sequence
  Synthetic
uggagaccaacucucagau

SEQ ID NO: 10759 - RNA, 19 nt, Artificial Sequence
  Synthetic
ggagaccaacucucagaug

SEQ ID NO: 10760 - RNA, 19 nt, Artificial Sequence
  Synthetic
gagaccaacucucagauga

SEQ ID NO: 10761 - RNA, 19 nt, Artificial Sequence
  Synthetic
agaccaacucucagaugau

SEQ ID NO: 10762 - RNA, 19 nt, Artificial Sequence
  Synthetic
gaccaacucucagaugauc

SEQ ID NO: 10763 - RNA, 19 nt, Artificial Sequence
  Synthetic
accaacucucagaugaucu

SEQ ID NO: 10764 - RNA, 19 nt, Artificial Sequence
  Synthetic
ccaacucucagaugaucuu

SEQ ID NO: 10765 - RNA, 19 nt, Artificial Sequence
  Synthetic
caacucucagaugaucuug

SEQ ID NO: 10766 - RNA, 19 nt, Artificial Sequence
  Synthetic
aacucucagaugaucuuga

SEQ ID NO: 10767 - RNA, 19 nt, Artificial Sequence
  Synthetic
acucucagaugaucuugac

SEQ ID NO: 10768 - RNA, 19 nt, Artificial Sequence
  Synthetic
cucucagaugaucuugacu

SEQ ID NO: 10769 - RNA, 19 nt, Artificial Sequence
  Synthetic
ucucagaugaucuugacug

SEQ ID NO: 10770 - RNA, 19 nt, Artificial Sequence
  Synthetic
cucagaugaucuugacugg

SEQ ID NO: 10771 - RNA, 19 nt, Artificial Sequence
  Synthetic
ucagaugaucuugacuggg

SEQ ID NO: 10772 - RNA, 19 nt, Artificial Sequence
  Synthetic
cagaugaucuugacuggga

SEQ ID NO: 10773 - RNA, 19 nt, Artificial Sequence
  Synthetic
agaugaucuugacugggau

SEQ ID NO: 10774 - RNA, 19 nt, Artificial Sequence
  Synthetic
gaugaucuugacugggauu

SEQ ID NO: 10775 - RNA, 19 nt, Artificial Sequence
  Synthetic
augaucuugacugggauua

SEQ ID NO: 10776 - RNA, 19 nt, Artificial Sequence
  Synthetic
ugaucuugacugggauuaa

SEQ ID NO: 10777 - RNA, 19 nt, Artificial Sequence
  Synthetic
gaucuugacugggauuaac

SEQ ID NO: 10778 - RNA, 19 nt, Artificial Sequence
  Synthetic
aucuugacugggauuaaca

SEQ ID NO: 10779 - RNA, 19 nt, Artificial Sequence
  Synthetic
ucuugacugggauuaacaa

SEQ ID NO: 10780 - RNA, 19 nt, Artificial Sequence
  Synthetic
cuugacugggauuaacaac

SEQ ID NO: 10781 - RNA, 19 nt, Artificial Sequence
  Synthetic
uugacugggauuaacaacg

SEQ ID NO: 10782 - RNA, 19 nt, Artificial Sequence
  Synthetic
ugacugggauuaacaacgg

SEQ ID NO: 10783 - RNA, 19 nt, Artificial Sequence
  Synthetic
gacugggauuaacaacgga

SEQ ID NO: 10784 - RNA, 19 nt, Artificial Sequence
  Synthetic
acugggauuaacaacggag

SEQ ID NO: 10785 - RNA, 19 nt, Artificial Sequence
  Synthetic
cugggauuaacaacggagg

SEQ ID NO: 10786 - RNA, 19 nt, Artificial Sequence
  Synthetic
ugggauuaacaacggagga

SEQ ID NO: 10787 - RNA, 19 nt, Artificial Sequence
  Synthetic
gggauuaacaacggaggac

SEQ ID NO: 10788 - RNA, 19 nt, Artificial Sequence
  Synthetic
ggauuaacaacggaggaca

SEQ ID NO: 10789 - RNA, 19 nt, Artificial Sequence
  Synthetic
gauuaacaacggaggacag

SEQ ID NO: 10790 - RNA, 19 nt, Artificial Sequence
  Synthetic
auuaacaacggaggacagg

SEQ ID NO: 10791 - RNA, 19 nt, Artificial Sequence
  Synthetic
uuaacaacggaggacagga

SEQ ID NO: 10792 - RNA, 19 nt, Artificial Sequence
  Synthetic
uaacaacggaggacaggac

SEQ ID NO: 10793 - RNA, 19 nt, Artificial Sequence
  Synthetic
aacaacggaggacaggaca

SEQ ID NO: 10794 - RNA, 19 nt, Artificial Sequence
  Synthetic
acaacggaggacaggacac

SEQ ID NO: 10795 - RNA, 19 nt, Artificial Sequence
  Synthetic
caacggaggacaggacacu

SEQ ID NO: 10796 - RNA, 19 nt, Artificial Sequence
  Synthetic
aacggaggacaggacacuc

SEQ ID NO: 10797 - RNA, 19 nt, Artificial Sequence
  Synthetic
acggaggacaggacacucu

SEQ ID NO: 10798 - RNA, 19 nt, Artificial Sequence
  Synthetic
cggaggacaggacacucuc

SEQ ID NO: 10799 - RNA, 19 nt, Artificial Sequence
  Synthetic
ggaggacaggacacucuca

SEQ ID NO: 10800 - RNA, 19 nt, Artificial Sequence
  Synthetic
gaggacaggacacucucag

SEQ ID NO: 10801 - RNA, 19 nt, Artificial Sequence
  Synthetic
aggacaggacacucucagg

SEQ ID NO: 10802 - RNA, 19 nt, Artificial Sequence
  Synthetic
ggacaggacacucucagga

SEQ ID NO: 10803 - RNA, 19 nt, Artificial Sequence
  Synthetic
gacaggacacucucaggac

SEQ ID NO: 10804 - RNA, 19 nt, Artificial Sequence
  Synthetic
acaggacacucucaggacu

SEQ ID NO: 10805 - RNA, 19 nt, Artificial Sequence
  Synthetic
caggacacucucaggacuu

SEQ ID NO: 10806 - RNA, 19 nt, Artificial Sequence
  Synthetic
aggacacucucaggacuua

SEQ ID NO: 10807 - RNA, 19 nt, Artificial Sequence
  Synthetic
ggacacucucaggacuuac

SEQ ID NO: 10808 - RNA, 19 nt, Artificial Sequence
  Synthetic
gacacucucaggacuuaca

SEQ ID NO: 10809 - RNA, 19 nt, Artificial Sequence
  Synthetic
acacucucaggacuuacaa

SEQ ID NO: 10810 - RNA, 19 nt, Artificial Sequence
  Synthetic
cacucucaggacuuacaaa

SEQ ID NO: 10811 - RNA, 19 nt, Artificial Sequence
  Synthetic
acucucaggacuuacaaau

SEQ ID NO: 10812 - RNA, 19 nt, Artificial Sequence
  Synthetic
cucucaggacuuacaaauu

SEQ ID NO: 10813 - RNA, 19 nt, Artificial Sequence
  Synthetic
ucucaggacuuacaaauua

SEQ ID NO: 10814 - RNA, 19 nt, Artificial Sequence
  Synthetic
cucaggacuuacaaauuac

SEQ ID NO: 10815 - RNA, 19 nt, Artificial Sequence
  Synthetic
ucaggacuuacaaauuaca

SEQ ID NO: 10816 - RNA, 19 nt, Artificial Sequence
  Synthetic
caggacuuacaaauuacaa

SEQ ID NO: 10817 - RNA, 19 nt, Artificial Sequence
  Synthetic
aggacuuacaaauuacaac

SEQ ID NO: 10818 - RNA, 19 nt, Artificial Sequence
  Synthetic
ggacuuacaaauuacaacu

SEQ ID NO: 10819 - RNA, 19 nt, Artificial Sequence
  Synthetic
gacuuacaaauuacaacug

SEQ ID NO: 10820 - RNA, 19 nt, Artificial Sequence
  Synthetic
acuuacaaauuacaacugc

SEQ ID NO: 10821 - RNA, 19 nt, Artificial Sequence
  Synthetic
cuuacaaauuacaacugcu

SEQ ID NO: 10822 - RNA, 19 nt, Artificial Sequence
  Synthetic
uuacaaauuacaacugcua

SEQ ID NO: 10823 - RNA, 19 nt, Artificial Sequence
  Synthetic
uacaaauuacaacugcuau

SEQ ID NO: 10824 - RNA, 19 nt, Artificial Sequence
  Synthetic
acaaauuacaacugcuauu

SEQ ID NO: 10825 - RNA, 19 nt, Artificial Sequence
  Synthetic
caaauuacaacugcuauua

SEQ ID NO: 10826 - RNA, 19 nt, Artificial Sequence
  Synthetic
aaauuacaacugcuauuac

SEQ ID NO: 10827 - RNA, 19 nt, Artificial Sequence
  Synthetic
aauuacaacugcuauuaca

SEQ ID NO: 10828 - RNA, 19 nt, Artificial Sequence
  Synthetic
auuacaacugcuauuacag

SEQ ID NO: 10829 - RNA, 19 nt, Artificial Sequence
  Synthetic
uuacaacugcuauuacagc

SEQ ID NO: 10830 - RNA, 19 nt, Artificial Sequence
  Synthetic
uacaacugcuauuacagcu

SEQ ID NO: 10831 - RNA, 19 nt, Artificial Sequence
  Synthetic
acaacugcuauuacagcuc

SEQ ID NO: 10832 - RNA, 19 nt, Artificial Sequence
  Synthetic
caacugcuauuacagcuca

SEQ ID NO: 10833 - RNA, 19 nt, Artificial Sequence
  Synthetic
aacugcuauuacagcucag

SEQ ID NO: 10834 - RNA, 19 nt, Artificial Sequence
  Synthetic
acugcuauuacagcucagc

SEQ ID NO: 10835 - RNA, 19 nt, Artificial Sequence
  Synthetic
cugcuauuacagcucagca

SEQ ID NO: 10836 - RNA, 19 nt, Artificial Sequence
  Synthetic
ugcuauuacagcucagcau

SEQ ID NO: 10837 - RNA, 19 nt, Artificial Sequence
  Synthetic
gcuauuacagcucagcauu

SEQ ID NO: 10838 - RNA, 19 nt, Artificial Sequence
  Synthetic
cuauuacagcucagcauuu

SEQ ID NO: 10839 - RNA, 19 nt, Artificial Sequence
  Synthetic
uauuacagcucagcauuuc

SEQ ID NO: 10840 - RNA, 19 nt, Artificial Sequence
  Synthetic
auuacagcucagcauuuca

SEQ ID NO: 10841 - RNA, 19 nt, Artificial Sequence
  Synthetic
uuacagcucagcauuucaa

SEQ ID NO: 10842 - RNA, 19 nt, Artificial Sequence
  Synthetic
uacagcucagcauuucaaa

SEQ ID NO: 10843 - RNA, 19 nt, Artificial Sequence
  Synthetic
acagcucagcauuucaaau

SEQ ID NO: 10844 - RNA, 19 nt, Artificial Sequence
  Synthetic
cagcucagcauuucaaauu

SEQ ID NO: 10845 - RNA, 19 nt, Artificial Sequence
  Synthetic
agcucagcauuucaaauuc

SEQ ID NO: 10846 - RNA, 19 nt, Artificial Sequence
  Synthetic
gcucagcauuucaaauuca

SEQ ID NO: 10847 - RNA, 19 nt, Artificial Sequence
  Synthetic
cucagcauuucaaauucaa

SEQ ID NO: 10848 - RNA, 19 nt, Artificial Sequence
  Synthetic
ucagcauuucaaauucaag

SEQ ID NO: 10849 - RNA, 19 nt, Artificial Sequence
  Synthetic
cagcauuucaaauucaaga

SEQ ID NO: 10850 - RNA, 19 nt, Artificial Sequence
  Synthetic
agcauuucaaauucaagau

SEQ ID NO: 10851 - RNA, 19 nt, Artificial Sequence
  Synthetic
gcauuucaaauucaagaua

SEQ ID NO: 10852 - RNA, 19 nt, Artificial Sequence
  Synthetic
cauuucaaauucaagauaa

SEQ ID NO: 10853 - RNA, 19 nt, Artificial Sequence
  Synthetic
auuucaaauucaagauaau

SEQ ID NO: 10854 - RNA, 19 nt, Artificial Sequence
  Synthetic
uuucaaauucaagauaauu

SEQ ID NO: 10855 - RNA, 19 nt, Artificial Sequence
  Synthetic
uucaaauucaagauaauuu

SEQ ID NO: 10856 - RNA, 19 nt, Artificial Sequence
  Synthetic
ucaaauucaagauaauuuc

SEQ ID NO: 10857 - RNA, 19 nt, Artificial Sequence
  Synthetic
caaauucaagauaauuucu

SEQ ID NO: 10858 - RNA, 19 nt, Artificial Sequence
  Synthetic
aaauucaagauaauuucuu

SEQ ID NO: 10859 - RNA, 19 nt, Artificial Sequence
  Synthetic
aauucaagauaauuucuua

SEQ ID NO: 10860 - RNA, 19 nt, Artificial Sequence
  Synthetic
auucaagauaauuucuuau

SEQ ID NO: 10861 - RNA, 19 nt, Artificial Sequence
  Synthetic
uucaagauaauuucuuauu

SEQ ID NO: 10862 - RNA, 19 nt, Artificial Sequence
  Synthetic
ucaagauaauuucuuauuc

SEQ ID NO: 10863 - RNA, 19 nt, Artificial Sequence
  Synthetic
caagauaauuucuuauuca

SEQ ID NO: 10864 - RNA, 19 nt, Artificial Sequence
  Synthetic
aagauaauuucuuauucaa

SEQ ID NO: 10865 - RNA, 19 nt, Artificial Sequence
  Synthetic
agauaauuucuuauucaaa

SEQ ID NO: 10866 - RNA, 19 nt, Artificial Sequence
  Synthetic
gauaauuucuuauucaaau

SEQ ID NO: 10867 - RNA, 19 nt, Artificial Sequence
  Synthetic
auaauuucuuauucaaaug

SEQ ID NO: 10868 - RNA, 19 nt, Artificial Sequence
  Synthetic
uaauuucuuauucaaaugu

SEQ ID NO: 10869 - RNA, 19 nt, Artificial Sequence
  Synthetic
aauuucuuauucaaaugug

SEQ ID NO: 10870 - RNA, 19 nt, Artificial Sequence
  Synthetic
auuucuuauucaaaugugg

SEQ ID NO: 10871 - RNA, 19 nt, Artificial Sequence
  Synthetic
uuucuuauucaaaugugga

SEQ ID NO: 10872 - RNA, 19 nt, Artificial Sequence
  Synthetic
uucuuauucaaauguggac

SEQ ID NO: 10873 - RNA, 19 nt, Artificial Sequence
  Synthetic
ucuuauucaaauguggacc

SEQ ID NO: 10874 - RNA, 19 nt, Artificial Sequence
  Synthetic
cuuauucaaauguggacca

SEQ ID NO: 10875 - RNA, 19 nt, Artificial Sequence
  Synthetic
uuauucaaauguggaccaa

SEQ ID NO: 10876 - RNA, 19 nt, Artificial Sequence
  Synthetic
uauucaaauguggaccaac

SEQ ID NO: 10877 - RNA, 19 nt, Artificial Sequence
  Synthetic
auucaaauguggaccaaca

SEQ ID NO: 10878 - RNA, 19 nt, Artificial Sequence
  Synthetic
uucaaauguggaccaacag

SEQ ID NO: 10879 - RNA, 19 nt, Artificial Sequence
  Synthetic
ucaaauguggaccaacaga

SEQ ID NO: 10880 - RNA, 19 nt, Artificial Sequence
  Synthetic
caaauguggaccaacagau

SEQ ID NO: 10881 - RNA, 19 nt, Artificial Sequence
  Synthetic
aaauguggaccaacagaua

SEQ ID NO: 10882 - RNA, 19 nt, Artificial Sequence
  Synthetic
aauguggaccaacagauaa

SEQ ID NO: 10883 - RNA, 19 nt, Artificial Sequence
  Synthetic
auguggaccaacagauaac

SEQ ID NO: 10884 - RNA, 19 nt, Artificial Sequence
  Synthetic
uguggaccaacagauaacu

SEQ ID NO: 10885 - RNA, 19 nt, Artificial Sequence
  Synthetic
guggaccaacagauaacug

SEQ ID NO: 10886 - RNA, 19 nt, Artificial Sequence
  Synthetic
uggaccaacagauaacuga

SEQ ID NO: 10887 - RNA, 19 nt, Artificial Sequence
  Synthetic
ggaccaacagauaacugaa

SEQ ID NO: 10888 - RNA, 19 nt, Artificial Sequence
  Synthetic
gaccaacagauaacugaaa

SEQ ID NO: 10889 - RNA, 19 nt, Artificial Sequence
  Synthetic
accaacagauaacugaaaa

SEQ ID NO: 10890 - RNA, 19 nt, Artificial Sequence
  Synthetic
ccaacagauaacugaaaau

SEQ ID NO: 10891 - RNA, 19 nt, Artificial Sequence
  Synthetic
caacagauaacugaaaauu

SEQ ID NO: 10892 - RNA, 19 nt, Artificial Sequence
  Synthetic
aacagauaacugaaaauuc

SEQ ID NO: 10893 - RNA, 19 nt, Artificial Sequence
  Synthetic
acagauaacugaaaauuca

SEQ ID NO: 10894 - RNA, 19 nt, Artificial Sequence
  Synthetic
cagauaacugaaaauucag

SEQ ID NO: 10895 - RNA, 19 nt, Artificial Sequence
  Synthetic
agauaacugaaaauucagu

SEQ ID NO: 10896 - RNA, 19 nt, Artificial Sequence
  Synthetic
gauaacugaaaauucaguu

SEQ ID NO: 10897 - RNA, 19 nt, Artificial Sequence
  Synthetic
auaacugaaaauucaguuu

SEQ ID NO: 10898 - RNA, 19 nt, Artificial Sequence
  Synthetic
uaacugaaaauucaguuuc

SEQ ID NO: 10899 - RNA, 19 nt, Artificial Sequence
  Synthetic
aacugaaaauucaguuuca

SEQ ID NO: 10900 - RNA, 19 nt, Artificial Sequence
  Synthetic
acugaaaauucaguuucau

SEQ ID NO: 10901 - RNA, 19 nt, Artificial Sequence
  Synthetic
cugaaaauucaguuucaug

SEQ ID NO: 10902 - RNA, 19 nt, Artificial Sequence
  Synthetic
ugaaaauucaguuucauga

SEQ ID NO: 10903 - RNA, 19 nt, Artificial Sequence
  Synthetic
gaaaauucaguuucaugag

SEQ ID NO: 10904 - RNA, 19 nt, Artificial Sequence
  Synthetic
aaaauucaguuucaugaga

SEQ ID NO: 10905 - RNA, 19 nt, Artificial Sequence
  Synthetic
aaauucaguuucaugagac

SEQ ID NO: 10906 - RNA, 19 nt, Artificial Sequence
  Synthetic
aauucaguuucaugagacg

SEQ ID NO: 10907 - RNA, 19 nt, Artificial Sequence
  Synthetic
auucaguuucaugagacgu

SEQ ID NO: 10908 - RNA, 19 nt, Artificial Sequence
  Synthetic
uucaguuucaugagacgua

SEQ ID NO: 10909 - RNA, 19 nt, Artificial Sequence
  Synthetic
ucaguuucaugagacguaa

SEQ ID NO: 10910 - RNA, 19 nt, Artificial Sequence
  Synthetic
caguuucaugagacguaag

SEQ ID NO: 10911 - RNA, 19 nt, Artificial Sequence
  Synthetic
aguuucaugagacguaagc

SEQ ID NO: 10912 - RNA, 19 nt, Artificial Sequence
  Synthetic
guuucaugagacguaagca

SEQ ID NO: 10913 - RNA, 19 nt, Artificial Sequence
  Synthetic
uuucaugagacguaagcag

SEQ ID NO: 10914 - RNA, 19 nt, Artificial Sequence
  Synthetic
uucaugagacguaagcagc

SEQ ID NO: 10915 - RNA, 19 nt, Artificial Sequence
  Synthetic
ucaugagacguaagcagcu

SEQ ID NO: 10916 - RNA, 19 nt, Artificial Sequence
  Synthetic
caugagacguaagcagcua

SEQ ID NO: 10917 - RNA, 19 nt, Artificial Sequence
  Synthetic
augagacguaagcagcuag

SEQ ID NO: 10918 - RNA, 19 nt, Artificial Sequence
  Synthetic
ugagacguaagcagcuaga

SEQ ID NO: 10919 - RNA, 19 nt, Artificial Sequence
  Synthetic
gagacguaagcagcuagau

SEQ ID NO: 10920 - RNA, 19 nt, Artificial Sequence
  Synthetic
agacguaagcagcuagaug

SEQ ID NO: 10921 - RNA, 19 nt, Artificial Sequence
  Synthetic
gacguaagcagcuagaugu

SEQ ID NO: 10922 - RNA, 19 nt, Artificial Sequence
  Synthetic
acguaagcagcuagaugua

SEQ ID NO: 10923 - RNA, 19 nt, Artificial Sequence
  Synthetic
cguaagcagcuagauguaa

SEQ ID NO: 10924 - RNA, 19 nt, Artificial Sequence
  Synthetic
guaagcagcuagauguaaa

SEQ ID NO: 10925 - RNA, 19 nt, Artificial Sequence
  Synthetic
uaagcagcuagauguaaag

SEQ ID NO: 10926 - RNA, 19 nt, Artificial Sequence
  Synthetic
aagcagcuagauguaaagg

SEQ ID NO: 10927 - RNA, 19 nt, Artificial Sequence
  Synthetic
agcagcuagauguaaaggg

SEQ ID NO: 10928 - RNA, 19 nt, Artificial Sequence
  Synthetic
gcagcuagauguaaagggg

SEQ ID NO: 10929 - RNA, 19 nt, Artificial Sequence
  Synthetic
cagcuagauguaaagggga

SEQ ID NO: 10930 - RNA, 19 nt, Artificial Sequence
  Synthetic
agcuagauguaaaggggau

SEQ ID NO: 10931 - RNA, 19 nt, Artificial Sequence
  Synthetic
gcuagauguaaaggggaua

SEQ ID NO: 10932 - RNA, 19 nt, Artificial Sequence
  Synthetic
cuagauguaaaggggauaa

SEQ ID NO: 10933 - RNA, 19 nt, Artificial Sequence
  Synthetic
uagauguaaaggggauaaa

SEQ ID NO: 10934 - RNA, 19 nt, Artificial Sequence
  Synthetic
agauguaaaggggauaaag

SEQ ID NO: 10935 - RNA, 19 nt, Artificial Sequence
  Synthetic
gauguaaaggggauaaaga

SEQ ID NO: 10936 - RNA, 19 nt, Artificial Sequence
  Synthetic
auguaaaggggauaaagag

SEQ ID NO: 10937 - RNA, 19 nt, Artificial Sequence
  Synthetic
uguaaaggggauaaagagg

SEQ ID NO: 10938 - RNA, 19 nt, Artificial Sequence
  Synthetic
guaaaggggauaaagagga

SEQ ID NO: 10939 - RNA, 19 nt, Artificial Sequence
  Synthetic
uaaaggggauaaagaggac

SEQ ID NO: 10940 - RNA, 19 nt, Artificial Sequence
  Synthetic
aaaggggauaaagaggaca

SEQ ID NO: 10941 - RNA, 19 nt, Artificial Sequence
  Synthetic
aaggggauaaagaggacaa

SEQ ID NO: 10942 - RNA, 19 nt, Artificial Sequence
  Synthetic
aggggauaaagaggacaaa

SEQ ID NO: 10943 - RNA, 19 nt, Artificial Sequence
  Synthetic
ggggauaaagaggacaaag

SEQ ID NO: 10944 - RNA, 19 nt, Artificial Sequence
  Synthetic
gggauaaagaggacaaagu

SEQ ID NO: 10945 - RNA, 19 nt, Artificial Sequence
  Synthetic
ggauaaagaggacaaaguc

SEQ ID NO: 10946 - RNA, 19 nt, Artificial Sequence
  Synthetic
gauaaagaggacaaaguca

SEQ ID NO: 10947 - RNA, 19 nt, Artificial Sequence
  Synthetic
auaaagaggacaaagucau

SEQ ID NO: 10948 - RNA, 19 nt, Artificial Sequence
  Synthetic
uaaagaggacaaagucaug

SEQ ID NO: 10949 - RNA, 19 nt, Artificial Sequence
  Synthetic
aaagaggacaaagucaugc

SEQ ID NO: 10950 - RNA, 19 nt, Artificial Sequence
  Synthetic
aagaggacaaagucaugcg

SEQ ID NO: 10951 - RNA, 19 nt, Artificial Sequence
  Synthetic
agaggacaaagucaugcgc

SEQ ID NO: 10952 - RNA, 19 nt, Artificial Sequence
  Synthetic
gaggacaaagucaugcgcu

SEQ ID NO: 10953 - RNA, 19 nt, Artificial Sequence
  Synthetic
aggacaaagucaugcgcuu

SEQ ID NO: 10954 - RNA, 19 nt, Artificial Sequence
  Synthetic
ggacaaagucaugcgcuuu

SEQ ID NO: 10955 - RNA, 19 nt, Artificial Sequence
  Synthetic
gacaaagucaugcgcuuuu

SEQ ID NO: 10956 - RNA, 19 nt, Artificial Sequence
  Synthetic
acaaagucaugcgcuuuua

SEQ ID NO: 10957 - RNA, 19 nt, Artificial Sequence
  Synthetic
caaagucaugcgcuuuuac

SEQ ID NO: 10958 - RNA, 19 nt, Artificial Sequence
  Synthetic
aaagucaugcgcuuuuaca

SEQ ID NO: 10959 - RNA, 19 nt, Artificial Sequence
  Synthetic
aagucaugcgcuuuuacau

SEQ ID NO: 10960 - RNA, 19 nt, Artificial Sequence
  Synthetic
agucaugcgcuuuuacauu

SEQ ID NO: 10961 - RNA, 19 nt, Artificial Sequence
  Synthetic
gucaugcgcuuuuacauuc

SEQ ID NO: 10962 - RNA, 19 nt, Artificial Sequence
  Synthetic
ucaugcgcuuuuacauucg

SEQ ID NO: 10963 - RNA, 19 nt, Artificial Sequence
  Synthetic
caugcgcuuuuacauucgg

SEQ ID NO: 10964 - RNA, 19 nt, Artificial Sequence
  Synthetic
augcgcuuuuacauucgga

SEQ ID NO: 10965 - RNA, 19 nt, Artificial Sequence
  Synthetic
ugcgcuuuuacauucggaa

SEQ ID NO: 10966 - RNA, 19 nt, Artificial Sequence
  Synthetic
gcgcuuuuacauucggaau

SEQ ID NO: 10967 - RNA, 19 nt, Artificial Sequence
  Synthetic
cgcuuuuacauucggaauu

SEQ ID NO: 10968 - RNA, 19 nt, Artificial Sequence
  Synthetic
gcuuuuacauucggaauuc

SEQ ID NO: 10969 - RNA, 19 nt, Artificial Sequence
  Synthetic
cuuuuacauucggaauucu

SEQ ID NO: 10970 - RNA, 19 nt, Artificial Sequence
  Synthetic
uuuuacauucggaauucug

SEQ ID NO: 10971 - RNA, 19 nt, Artificial Sequence
  Synthetic
uuuacauucggaauucugc

SEQ ID NO: 10972 - RNA, 19 nt, Artificial Sequence
  Synthetic
uuacauucggaauucugca

SEQ ID NO: 10973 - RNA, 19 nt, Artificial Sequence
  Synthetic
uacauucggaauucugcac

SEQ ID NO: 10974 - RNA, 19 nt, Artificial Sequence
  Synthetic
acauucggaauucugcacu

SEQ ID NO: 10975 - RNA, 19 nt, Artificial Sequence
  Synthetic
cauucggaauucugcacuu

SEQ ID NO: 10976 - RNA, 19 nt, Artificial Sequence
  Synthetic
auucggaauucugcacuuc

SEQ ID NO: 10977 - RNA, 19 nt, Artificial Sequence
  Synthetic
uucggaauucugcacuucc

SEQ ID NO: 10978 - RNA, 19 nt, Artificial Sequence
  Synthetic
ucggaauucugcacuucca

SEQ ID NO: 10979 - RNA, 19 nt, Artificial Sequence
  Synthetic
cggaauucugcacuuccag

SEQ ID NO: 10980 - RNA, 19 nt, Artificial Sequence
  Synthetic
ggaauucugcacuuccagc

SEQ ID NO: 10981 - RNA, 19 nt, Artificial Sequence
  Synthetic
gaauucugcacuuccagca

SEQ ID NO: 10982 - RNA, 19 nt, Artificial Sequence
  Synthetic
aauucugcacuuccagcac

SEQ ID NO: 10983 - RNA, 19 nt, Artificial Sequence
  Synthetic
auucugcacuuccagcaca

SEQ ID NO: 10984 - RNA, 19 nt, Artificial Sequence
  Synthetic
uucugcacuuccagcacag

SEQ ID NO: 10985 - RNA, 19 nt, Artificial Sequence
  Synthetic
ucugcacuuccagcacagu

SEQ ID NO: 10986 - RNA, 19 nt, Artificial Sequence
  Synthetic
cugcacuuccagcacaguu

SEQ ID NO: 10987 - RNA, 19 nt, Artificial Sequence
  Synthetic
ugcacuuccagcacaguuc

SEQ ID NO: 10988 - RNA, 19 nt, Artificial Sequence
  Synthetic
gcacuuccagcacaguucu

SEQ ID NO: 10989 - RNA, 19 nt, Artificial Sequence
  Synthetic
cacuuccagcacaguucua

SEQ ID NO: 10990 - RNA, 19 nt, Artificial Sequence
  Synthetic
acuuccagcacaguucuaa

SEQ ID NO: 10991 - RNA, 19 nt, Artificial Sequence
  Synthetic
cuuccagcacaguucuaaa

SEQ ID NO: 10992 - RNA, 19 nt, Artificial Sequence
  Synthetic
uuccagcacaguucuaaac

SEQ ID NO: 10993 - RNA, 19 nt, Artificial Sequence
  Synthetic
uccagcacaguucuaaaca

SEQ ID NO: 10994 - RNA, 19 nt, Artificial Sequence
  Synthetic
ccagcacaguucuaaacau

SEQ ID NO: 10995 - RNA, 19 nt, Artificial Sequence
  Synthetic
cagcacaguucuaaacauc

SEQ ID NO: 10996 - RNA, 19 nt, Artificial Sequence
  Synthetic
agcacaguucuaaacaucu

SEQ ID NO: 10997 - RNA, 19 nt, Artificial Sequence
  Synthetic
gcacaguucuaaacaucuu

SEQ ID NO: 10998 - RNA, 19 nt, Artificial Sequence
  Synthetic
cacaguucuaaacaucuug

SEQ ID NO: 10999 - RNA, 19 nt, Artificial Sequence
  Synthetic
acaguucuaaacaucuugu

SEQ ID NO: 11000 - RNA, 19 nt, Artificial Sequence
  Synthetic
caguucuaaacaucuugua

SEQ ID NO: 11001 - RNA, 19 nt, Artificial Sequence
  Synthetic
aguucuaaacaucuuguau

SEQ ID NO: 11002 - RNA, 19 nt, Artificial Sequence
  Synthetic
guucuaaacaucuuguauu

SEQ ID NO: 11003 - RNA, 19 nt, Artificial Sequence
  Synthetic
uucuaaacaucuuguauug

SEQ ID NO: 11004 - RNA, 19 nt, Artificial Sequence
  Synthetic
ucuaaacaucuuguauuga

SEQ ID NO: 11005 - RNA, 19 nt, Artificial Sequence
  Synthetic
cuaaacaucuuguauugac

SEQ ID NO: 11006 - RNA, 19 nt, Artificial Sequence
  Synthetic
uaaacaucuuguauugacu

SEQ ID NO: 11007 - RNA, 19 nt, Artificial Sequence
  Synthetic
aaacaucuuguauugacuu

SEQ ID NO: 11008 - RNA, 19 nt, Artificial Sequence
  Synthetic
aacaucuuguauugacuuu

SEQ ID NO: 11009 - RNA, 19 nt, Artificial Sequence
  Synthetic
acaucuuguauugacuuug

SEQ ID NO: 11010 - RNA, 19 nt, Artificial Sequence
  Synthetic
caucuuguauugacuuugg

SEQ ID NO: 11011 - RNA, 19 nt, Artificial Sequence
  Synthetic
aucuuguauugacuuugga

SEQ ID NO: 11012 - RNA, 19 nt, Artificial Sequence
  Synthetic
ucuuguauugacuuuggag

SEQ ID NO: 11013 - RNA, 19 nt, Artificial Sequence
  Synthetic
cuuguauugacuuuggagg

SEQ ID NO: 11014 - RNA, 19 nt, Artificial Sequence
  Synthetic
uuguauugacuuuggagga

SEQ ID NO: 11015 - RNA, 19 nt, Artificial Sequence
  Synthetic
uguauugacuuuggaggag

SEQ ID NO: 11016 - RNA, 19 nt, Artificial Sequence
  Synthetic
guauugacuuuggaggaga

SEQ ID NO: 11017 - RNA, 19 nt, Artificial Sequence
  Synthetic
uauugacuuuggaggagaa

SEQ ID NO: 11018 - RNA, 19 nt, Artificial Sequence
  Synthetic
auugacuuuggaggagaau

SEQ ID NO: 11019 - RNA, 19 nt, Artificial Sequence
  Synthetic
uugacuuuggaggagaaug

SEQ ID NO: 11020 - RNA, 19 nt, Artificial Sequence
  Synthetic
ugacuuuggaggagaauga

SEQ ID NO: 11021 - RNA, 19 nt, Artificial Sequence
  Synthetic
gacuuuggaggagaaugaa

SEQ ID NO: 11022 - RNA, 19 nt, Artificial Sequence
  Synthetic
acuuuggaggagaaugaaa

SEQ ID NO: 11023 - RNA, 19 nt, Artificial Sequence
  Synthetic
cuuuggaggagaaugaaaa

SEQ ID NO: 11024 - RNA, 19 nt, Artificial Sequence
  Synthetic
uuuggaggagaaugaaaau

SEQ ID NO: 11025 - RNA, 19 nt, Artificial Sequence
  Synthetic
uuggaggagaaugaaaaua

SEQ ID NO: 11026 - RNA, 19 nt, Artificial Sequence
  Synthetic
uggaggagaaugaaaauag

SEQ ID NO: 11027 - RNA, 19 nt, Artificial Sequence
  Synthetic
ggaggagaaugaaaauagu

SEQ ID NO: 11028 - RNA, 19 nt, Artificial Sequence
  Synthetic
gaggagaaugaaaauagug

SEQ ID NO: 11029 - RNA, 19 nt, Artificial Sequence
  Synthetic
aggagaaugaaaauaguga

SEQ ID NO: 11030 - RNA, 19 nt, Artificial Sequence
  Synthetic
ggagaaugaaaauagugaa

SEQ ID NO: 11031 - RNA, 19 nt, Artificial Sequence
  Synthetic
gagaaugaaaauagugaag

SEQ ID NO: 11032 - RNA, 19 nt, Artificial Sequence
  Synthetic
agaaugaaaauagugaagc

SEQ ID NO: 11033 - RNA, 19 nt, Artificial Sequence
  Synthetic
gaaugaaaauagugaagca

SEQ ID NO: 11034 - RNA, 19 nt, Artificial Sequence
  Synthetic
aaugaaaauagugaagcaa

SEQ ID NO: 11035 - RNA, 19 nt, Artificial Sequence
  Synthetic
augaaaauagugaagcaag

SEQ ID NO: 11036 - RNA, 19 nt, Artificial Sequence
  Synthetic
ugaaaauagugaagcaaga

SEQ ID NO: 11037 - RNA, 19 nt, Artificial Sequence
  Synthetic
gaaaauagugaagcaagag

SEQ ID NO: 11038 - RNA, 19 nt, Artificial Sequence
  Synthetic
aaaauagugaagcaagagu

SEQ ID NO: 11039 - RNA, 19 nt, Artificial Sequence
  Synthetic
aaauagugaagcaagagug

SEQ ID NO: 11040 - RNA, 19 nt, Artificial Sequence
  Synthetic
aauagugaagcaagagugg

SEQ ID NO: 11041 - RNA, 19 nt, Artificial Sequence
  Synthetic
auagugaagcaagagugga

SEQ ID NO: 11042 - RNA, 19 nt, Artificial Sequence
  Synthetic
uagugaagcaagaguggau

SEQ ID NO: 11043 - RNA, 19 nt, Artificial Sequence
  Synthetic
agugaagcaagaguggauu

SEQ ID NO: 11044 - RNA, 19 nt, Artificial Sequence
  Synthetic
gugaagcaagaguggauua

SEQ ID NO: 11045 - RNA, 19 nt, Artificial Sequence
  Synthetic
ugaagcaagaguggauuag

SEQ ID NO: 11046 - RNA, 19 nt, Artificial Sequence
  Synthetic
gaagcaagaguggauuagu

SEQ ID NO: 11047 - RNA, 19 nt, Artificial Sequence
  Synthetic
aagcaagaguggauuagua

SEQ ID NO: 11048 - RNA, 19 nt, Artificial Sequence
  Synthetic
agcaagaguggauuaguaa

SEQ ID NO: 11049 - RNA, 19 nt, Artificial Sequence
  Synthetic
gcaagaguggauuaguaaa

SEQ ID NO: 11050 - RNA, 19 nt, Artificial Sequence
  Synthetic
caagaguggauuaguaaau

SEQ ID NO: 11051 - RNA, 19 nt, Artificial Sequence
  Synthetic
aagaguggauuaguaaaua

SEQ ID NO: 11052 - RNA, 19 nt, Artificial Sequence
  Synthetic
agaguggauuaguaaauau

SEQ ID NO: 11053 - RNA, 19 nt, Artificial Sequence
  Synthetic
gaguggauuaguaaauaua

SEQ ID NO: 11054 - RNA, 19 nt, Artificial Sequence
  Synthetic
aguggauuaguaaauauac

SEQ ID NO: 11055 - RNA, 19 nt, Artificial Sequence
  Synthetic
guggauuaguaaauauacu

SEQ ID NO: 11056 - RNA, 19 nt, Artificial Sequence
  Synthetic
uggauuaguaaauauacuu

SEQ ID NO: 11057 - RNA, 19 nt, Artificial Sequence
  Synthetic
ggauuaguaaauauacuua

SEQ ID NO: 11058 - RNA, 19 nt, Artificial Sequence
  Synthetic
gauuaguaaauauacuuaa

SEQ ID NO: 11059 - RNA, 19 nt, Artificial Sequence
  Synthetic
auuaguaaauauacuuaaa

SEQ ID NO: 11060 - RNA, 19 nt, Artificial Sequence
  Synthetic
uuaguaaauauacuuaaau

SEQ ID NO: 11061 - RNA, 19 nt, Artificial Sequence
  Synthetic
uaguaaauauacuuaaauc

SEQ ID NO: 11062 - RNA, 19 nt, Artificial Sequence
  Synthetic
aguaaauauacuuaaaucg

SEQ ID NO: 11063 - RNA, 19 nt, Artificial Sequence
  Synthetic
guaaauauacuuaaaucgc

SEQ ID NO: 11064 - RNA, 19 nt, Artificial Sequence
  Synthetic
uaaauauacuuaaaucgca

SEQ ID NO: 11065 - RNA, 19 nt, Artificial Sequence
  Synthetic
aaauauacuuaaaucgcaa

SEQ ID NO: 11066 - RNA, 19 nt, Artificial Sequence
  Synthetic
aauauacuuaaaucgcaau

SEQ ID NO: 11067 - RNA, 19 nt, Artificial Sequence
  Synthetic
auauacuuaaaucgcaaua

SEQ ID NO: 11068 - RNA, 19 nt, Artificial Sequence
  Synthetic
uauacuuaaaucgcaauac

SEQ ID NO: 11069 - RNA, 19 nt, Artificial Sequence
  Synthetic
auacuuaaaucgcaauacc

SEQ ID NO: 11070 - RNA, 19 nt, Artificial Sequence
  Synthetic
uacuuaaaucgcaauaccu

SEQ ID NO: 11071 - RNA, 19 nt, Artificial Sequence
  Synthetic
acuuaaaucgcaauaccua

SEQ ID NO: 11072 - RNA, 19 nt, Artificial Sequence
  Synthetic
cuuaaaucgcaauaccuag

SEQ ID NO: 11073 - RNA, 19 nt, Artificial Sequence
  Synthetic
uuaaaucgcaauaccuagg

SEQ ID NO: 11074 - RNA, 19 nt, Artificial Sequence
  Synthetic
uaaaucgcaauaccuagga

SEQ ID NO: 11075 - RNA, 19 nt, Artificial Sequence
  Synthetic
aaaucgcaauaccuaggag

SEQ ID NO: 11076 - RNA, 19 nt, Artificial Sequence
  Synthetic
aaucgcaauaccuaggaga

SEQ ID NO: 11077 - RNA, 19 nt, Artificial Sequence
  Synthetic
aucgcaauaccuaggagaa

SEQ ID NO: 11078 - RNA, 19 nt, Artificial Sequence
  Synthetic
ucgcaauaccuaggagaag

SEQ ID NO: 11079 - RNA, 19 nt, Artificial Sequence
  Synthetic
cgcaauaccuaggagaaga

SEQ ID NO: 11080 - RNA, 19 nt, Artificial Sequence
  Synthetic
gcaauaccuaggagaagag

SEQ ID NO: 11081 - RNA, 19 nt, Artificial Sequence
  Synthetic
caauaccuaggagaagagu

SEQ ID NO: 11082 - RNA, 19 nt, Artificial Sequence
  Synthetic
aauaccuaggagaagagug

SEQ ID NO: 11083 - RNA, 19 nt, Artificial Sequence
  Synthetic
auaccuaggagaagagugu

SEQ ID NO: 11084 - RNA, 19 nt, Artificial Sequence
  Synthetic
uaccuaggagaagaguguu

SEQ ID NO: 11085 - RNA, 19 nt, Artificial Sequence
  Synthetic
accuaggagaagaguguuu

SEQ ID NO: 11086 - RNA, 19 nt, Artificial Sequence
  Synthetic
ccuaggagaagaguguuug

SEQ ID NO: 11087 - RNA, 19 nt, Artificial Sequence
  Synthetic
cuaggagaagaguguuugg

SEQ ID NO: 11088 - RNA, 19 nt, Artificial Sequence
  Synthetic
uaggagaagaguguuuggc

SEQ ID NO: 11089 - RNA, 19 nt, Artificial Sequence
  Synthetic
aggagaagaguguuuggcu

SEQ ID NO: 11090 - RNA, 19 nt, Artificial Sequence
  Synthetic
ggagaagaguguuuggcug

SEQ ID NO: 11091 - RNA, 19 nt, Artificial Sequence
  Synthetic
gagaagaguguuuggcuga

SEQ ID NO: 11092 - RNA, 19 nt, Artificial Sequence
  Synthetic
agaagaguguuuggcugaa

SEQ ID NO: 11093 - RNA, 19 nt, Artificial Sequence
  Synthetic
gaagaguguuuggcugaac

SEQ ID NO: 11094 - RNA, 19 nt, Artificial Sequence
  Synthetic
aagaguguuuggcugaacu

SEQ ID NO: 11095 - RNA, 19 nt, Artificial Sequence
  Synthetic
agaguguuuggcugaacug

SEQ ID NO: 11096 - RNA, 19 nt, Artificial Sequence
  Synthetic
gaguguuuggcugaacuga

SEQ ID NO: 11097 - RNA, 19 nt, Artificial Sequence
  Synthetic
aguguuuggcugaacugaa

SEQ ID NO: 11098 - RNA, 19 nt, Artificial Sequence
  Synthetic
guguuuggcugaacugaaa

SEQ ID NO: 11099 - RNA, 19 nt, Artificial Sequence
  Synthetic
uguuuggcugaacugaaau

SEQ ID NO: 11100 - RNA, 19 nt, Artificial Sequence
  Synthetic
guuuggcugaacugaaaua

SEQ ID NO: 11101 - RNA, 19 nt, Artificial Sequence
  Synthetic
uuuggcugaacugaaauac

SEQ ID NO: 11102 - RNA, 19 nt, Artificial Sequence
  Synthetic
uuggcugaacugaaauacu

SEQ ID NO: 11103 - RNA, 19 nt, Artificial Sequence
  Synthetic
uggcugaacugaaauacuu

SEQ ID NO: 11104 - RNA, 19 nt, Artificial Sequence
  Synthetic
ggcugaacugaaauacuuu

SEQ ID NO: 11105 - RNA, 19 nt, Artificial Sequence
  Synthetic
gcugaacugaaauacuuuu

SEQ ID NO: 11106 - RNA, 19 nt, Artificial Sequence
  Synthetic
cugaacugaaauacuuuua

SEQ ID NO: 11107 - RNA, 19 nt, Artificial Sequence
  Synthetic
ugaacugaaauacuuuuaa

SEQ ID NO: 11108 - RNA, 19 nt, Artificial Sequence
  Synthetic
gaacugaaauacuuuuaac

SEQ ID NO: 11109 - RNA, 19 nt, Artificial Sequence
  Synthetic
aacugaaauacuuuuaaca

SEQ ID NO: 11110 - RNA, 19 nt, Artificial Sequence
  Synthetic
acugaaauacuuuuaacac

SEQ ID NO: 11111 - RNA, 19 nt, Artificial Sequence
  Synthetic
cugaaauacuuuuaacaca

SEQ ID NO: 11112 - RNA, 19 nt, Artificial Sequence
  Synthetic
ugaaauacuuuuaacacac

SEQ ID NO: 11113 - RNA, 19 nt, Artificial Sequence
  Synthetic
gaaauacuuuuaacacaca

SEQ ID NO: 11114 - RNA, 19 nt, Artificial Sequence
  Synthetic
aaauacuuuuaacacacag

SEQ ID NO: 11115 - RNA, 19 nt, Artificial Sequence
  Synthetic
aauacuuuuaacacacagu

SEQ ID NO: 11116 - RNA, 19 nt, Artificial Sequence
  Synthetic
auacuuuuaacacacagug

SEQ ID NO: 11117 - RNA, 19 nt, Artificial Sequence
  Synthetic
uacuuuuaacacacagugc

SEQ ID NO: 11118 - RNA, 19 nt, Artificial Sequence
  Synthetic
acuuuuaacacacagugca

SEQ ID NO: 11119 - RNA, 19 nt, Artificial Sequence
  Synthetic
cuuuuaacacacagugcag

SEQ ID NO: 11120 - RNA, 19 nt, Artificial Sequence
  Synthetic
uuuuaacacacagugcagu

SEQ ID NO: 11121 - RNA, 19 nt, Artificial Sequence
  Synthetic
uuuaacacacagugcaguu

SEQ ID NO: 11122 - RNA, 19 nt, Artificial Sequence
  Synthetic
uuaacacacagugcaguua

SEQ ID NO: 11123 - RNA, 19 nt, Artificial Sequence
  Synthetic
uaacacacagugcaguuac

SEQ ID NO: 11124 - RNA, 19 nt, Artificial Sequence
  Synthetic
aacacacagugcaguuaca

SEQ ID NO: 11125 - RNA, 19 nt, Artificial Sequence
  Synthetic
acacacagugcaguuacau

SEQ ID NO: 11126 - RNA, 19 nt, Artificial Sequence
  Synthetic
cacacagugcaguuacaug

SEQ ID NO: 11127 - RNA, 19 nt, Artificial Sequence
  Synthetic
acacagugcaguuacauga

SEQ ID NO: 11128 - RNA, 19 nt, Artificial Sequence
  Synthetic
cacagugcaguuacaugag

SEQ ID NO: 11129 - RNA, 19 nt, Artificial Sequence
  Synthetic
acagugcaguuacaugagu

SEQ ID NO: 11130 - RNA, 19 nt, Artificial Sequence
  Synthetic
cagugcaguuacaugagug

SEQ ID NO: 11131 - RNA, 19 nt, Artificial Sequence
  Synthetic
agugcaguuacaugaguga

SEQ ID NO: 11132 - RNA, 19 nt, Artificial Sequence
  Synthetic
gugcaguuacaugagugac

SEQ ID NO: 11133 - RNA, 19 nt, Artificial Sequence
  Synthetic
ugcaguuacaugagugacu

SEQ ID NO: 11134 - RNA, 19 nt, Artificial Sequence
  Synthetic
gcaguuacaugagugacuu

SEQ ID NO: 11135 - RNA, 19 nt, Artificial Sequence
  Synthetic
caguuacaugagugacuua

SEQ ID NO: 11136 - RNA, 19 nt, Artificial Sequence
  Synthetic
aguuacaugagugacuuaa

SEQ ID NO: 11137 - RNA, 19 nt, Artificial Sequence
  Synthetic
guuacaugagugacuuaag

SEQ ID NO: 11138 - RNA, 19 nt, Artificial Sequence
  Synthetic
uuacaugagugacuuaagg

SEQ ID NO: 11139 - RNA, 19 nt, Artificial Sequence
  Synthetic
uacaugagugacuuaaggg

SEQ ID NO: 11140 - RNA, 19 nt, Artificial Sequence
  Synthetic
acaugagugacuuaagggu

SEQ ID NO: 11141 - RNA, 19 nt, Artificial Sequence
  Synthetic
caugagugacuuaaggguu

SEQ ID NO: 11142 - RNA, 19 nt, Artificial Sequence
  Synthetic
augagugacuuaaggguuc

SEQ ID NO: 11143 - RNA, 19 nt, Artificial Sequence
  Synthetic
ugagugacuuaaggguucu

SEQ ID NO: 11144 - RNA, 19 nt, Artificial Sequence
  Synthetic
gagugacuuaaggguucuu

SEQ ID NO: 11145 - RNA, 19 nt, Artificial Sequence
  Synthetic
agugacuuaaggguucuua

SEQ ID NO: 11146 - RNA, 19 nt, Artificial Sequence
  Synthetic
gugacuuaaggguucuuau

SEQ ID NO: 11147 - RNA, 19 nt, Artificial Sequence
  Synthetic
ugacuuaaggguucuuauc

SEQ ID NO: 11148 - RNA, 19 nt, Artificial Sequence
  Synthetic
gacuuaaggguucuuaucu

SEQ ID NO: 11149 - RNA, 19 nt, Artificial Sequence
  Synthetic
acuuaaggguucuuaucuc

SEQ ID NO: 11150 - RNA, 19 nt, Artificial Sequence
  Synthetic
cuuaaggguucuuaucucu

SEQ ID NO: 11151 - RNA, 19 nt, Artificial Sequence
  Synthetic
uuaaggguucuuaucucug

SEQ ID NO: 11152 - RNA, 19 nt, Artificial Sequence
  Synthetic
uaaggguucuuaucucugg

SEQ ID NO: 11153 - RNA, 19 nt, Artificial Sequence
  Synthetic
aaggguucuuaucucugga

SEQ ID NO: 11154 - RNA, 19 nt, Artificial Sequence
  Synthetic
aggguucuuaucucuggac

SEQ ID NO: 11155 - RNA, 19 nt, Artificial Sequence
  Synthetic
ggguucuuaucucuggacu

SEQ ID NO: 11156 - RNA, 19 nt, Artificial Sequence
  Synthetic
gguucuuaucucuggacuu

SEQ ID NO: 11157 - RNA, 19 nt, Artificial Sequence
  Synthetic
guucuuaucucuggacuuu

SEQ ID NO: 11158 - RNA, 19 nt, Artificial Sequence
  Synthetic
uucuuaucucuggacuuug

SEQ ID NO: 11159 - RNA, 19 nt, Artificial Sequence
  Synthetic
ucuuaucucuggacuuuga

SEQ ID NO: 11160 - RNA, 19 nt, Artificial Sequence
  Synthetic
cuuaucucuggacuuugag

SEQ ID NO: 11161 - RNA, 19 nt, Artificial Sequence
  Synthetic
uuaucucuggacuuugagu

SEQ ID NO: 11162 - RNA, 19 nt, Artificial Sequence
  Synthetic
uaucucuggacuuugaguu

SEQ ID NO: 11163 - RNA, 19 nt, Artificial Sequence
  Synthetic
aucucuggacuuugaguuu

SEQ ID NO: 11164 - RNA, 19 nt, Artificial Sequence
  Synthetic
ucucuggacuuugaguuuu

SEQ ID NO: 11165 - RNA, 19 nt, Artificial Sequence
  Synthetic
cucuggacuuugaguuuug

SEQ ID NO: 11166 - RNA, 19 nt, Artificial Sequence
  Synthetic
ucuggacuuugaguuuugg

SEQ ID NO: 11167 - RNA, 19 nt, Artificial Sequence
  Synthetic
cuggacuuugaguuuuggc

SEQ ID NO: 11168 - RNA, 19 nt, Artificial Sequence
  Synthetic
uggacuuugaguuuuggcc

SEQ ID NO: 11169 - RNA, 19 nt, Artificial Sequence
  Synthetic
ggacuuugaguuuuggccu

SEQ ID NO: 11170 - RNA, 19 nt, Artificial Sequence
  Synthetic
gacuuugaguuuuggccua

SEQ ID NO: 11171 - RNA, 19 nt, Artificial Sequence
  Synthetic
acuuugaguuuuggccuaa

SEQ ID NO: 11172 - RNA, 19 nt, Artificial Sequence
  Synthetic
cuuugaguuuuggccuaaa

SEQ ID NO: 11173 - RNA, 19 nt, Artificial Sequence
  Synthetic
uuugaguuuuggccuaaaa

SEQ ID NO: 11174 - RNA, 19 nt, Artificial Sequence
  Synthetic
uugaguuuuggccuaaaau

SEQ ID NO: 11175 - RNA, 19 nt, Artificial Sequence
  Synthetic
ugaguuuuggccuaaaaug

SEQ ID NO: 11176 - RNA, 19 nt, Artificial Sequence
  Synthetic
gaguuuuggccuaaaauga

SEQ ID NO: 11177 - RNA, 19 nt, Artificial Sequence
  Synthetic
aguuuuggccuaaaaugau

SEQ ID NO: 11178 - RNA, 19 nt, Artificial Sequence
  Synthetic
guuuuggccuaaaaugaug

SEQ ID NO: 11179 - RNA, 19 nt, Artificial Sequence
  Synthetic
uuuuggccuaaaaugaugu

SEQ ID NO: 11180 - RNA, 19 nt, Artificial Sequence
  Synthetic
uuuggccuaaaaugaugua

SEQ ID NO: 11181 - RNA, 19 nt, Artificial Sequence
  Synthetic
uuggccuaaaaugauguaa

SEQ ID NO: 11182 - RNA, 19 nt, Artificial Sequence
  Synthetic
uggccuaaaaugauguaau

SEQ ID NO: 11183 - RNA, 19 nt, Artificial Sequence
  Synthetic
ggccuaaaaugauguaaug

SEQ ID NO: 11184 - RNA, 19 nt, Artificial Sequence
  Synthetic
gccuaaaaugauguaauga

SEQ ID NO: 11185 - RNA, 19 nt, Artificial Sequence
  Synthetic
ccuaaaaugauguaaugau

SEQ ID NO: 11186 - RNA, 19 nt, Artificial Sequence
  Synthetic
cuaaaaugauguaaugaug

SEQ ID NO: 11187 - RNA, 19 nt, Artificial Sequence
  Synthetic
uaaaaugauguaaugaugu

SEQ ID NO: 11188 - RNA, 19 nt, Artificial Sequence
  Synthetic
aaaaugauguaaugauguu

SEQ ID NO: 11189 - RNA, 19 nt, Artificial Sequence
  Synthetic
aaaugauguaaugauguug

SEQ ID NO: 11190 - RNA, 19 nt, Artificial Sequence
  Synthetic
aaugauguaaugauguugc

SEQ ID NO: 11191 - RNA, 19 nt, Artificial Sequence
  Synthetic
augauguaaugauguugcu

SEQ ID NO: 11192 - RNA, 19 nt, Artificial Sequence
  Synthetic
ugauguaaugauguugcua

SEQ ID NO: 11193 - RNA, 19 nt, Artificial Sequence
  Synthetic
gauguaaugauguugcuaa

SEQ ID NO: 11194 - RNA, 19 nt, Artificial Sequence
  Synthetic
auguaaugauguugcuaaa

SEQ ID NO: 11195 - RNA, 19 nt, Artificial Sequence
  Synthetic
uguaaugauguugcuaaaa

SEQ ID NO: 11196 - RNA, 19 nt, Artificial Sequence
  Synthetic
guaaugauguugcuaaaaa

SEQ ID NO: 11197 - RNA, 19 nt, Artificial Sequence
  Synthetic
uaaugauguugcuaaaaag

SEQ ID NO: 11198 - RNA, 19 nt, Artificial Sequence
  Synthetic
aaugauguugcuaaaaaga

SEQ ID NO: 11199 - RNA, 19 nt, Artificial Sequence
  Synthetic
augauguugcuaaaaagac

SEQ ID NO: 11200 - RNA, 19 nt, Artificial Sequence
  Synthetic
ugauguugcuaaaaagaca

SEQ ID NO: 11201 - RNA, 19 nt, Artificial Sequence
  Synthetic
gauguugcuaaaaagacau

SEQ ID NO: 11202 - RNA, 19 nt, Artificial Sequence
  Synthetic
auguugcuaaaaagacauu

SEQ ID NO: 11203 - RNA, 19 nt, Artificial Sequence
  Synthetic
uguugcuaaaaagacauug

SEQ ID NO: 11204 - RNA, 19 nt, Artificial Sequence
  Synthetic
guugcuaaaaagacauugu

SEQ ID NO: 11205 - RNA, 19 nt, Artificial Sequence
  Synthetic
uugcuaaaaagacauuguu

SEQ ID NO: 11206 - RNA, 19 nt, Artificial Sequence
  Synthetic
ugcuaaaaagacauuguua

SEQ ID NO: 11207 - RNA, 19 nt, Artificial Sequence
  Synthetic
gcuaaaaagacauuguuaa

SEQ ID NO: 11208 - RNA, 19 nt, Artificial Sequence
  Synthetic
cuaaaaagacauuguuaaa

SEQ ID NO: 11209 - RNA, 19 nt, Artificial Sequence
  Synthetic
uaaaaagacauuguuaaag

SEQ ID NO: 11210 - RNA, 19 nt, Artificial Sequence
  Synthetic
aaaaagacauuguuaaaga

SEQ ID NO: 11211 - RNA, 19 nt, Artificial Sequence
  Synthetic
aaaagacauuguuaaagaa

SEQ ID NO: 11212 - RNA, 19 nt, Artificial Sequence
  Synthetic
aaagacauuguuaaagaac

SEQ ID NO: 11213 - RNA, 19 nt, Artificial Sequence
  Synthetic
aagacauuguuaaagaacu

SEQ ID NO: 11214 - RNA, 19 nt, Artificial Sequence
  Synthetic
agacauuguuaaagaacuu

SEQ ID NO: 11215 - RNA, 19 nt, Artificial Sequence
  Synthetic
gacauuguuaaagaacuua

SEQ ID NO: 11216 - RNA, 19 nt, Artificial Sequence
  Synthetic
acauuguuaaagaacuuaa

SEQ ID NO: 11217 - RNA, 19 nt, Artificial Sequence
  Synthetic
cauuguuaaagaacuuaaa

SEQ ID NO: 11218 - RNA, 19 nt, Artificial Sequence
  Synthetic
auuguuaaagaacuuaaag

SEQ ID NO: 11219 - RNA, 19 nt, Artificial Sequence
  Synthetic
uuguuaaagaacuuaaagc

SEQ ID NO: 11220 - RNA, 19 nt, Artificial Sequence
  Synthetic
uguuaaagaacuuaaagcc

SEQ ID NO: 11221 - RNA, 19 nt, Artificial Sequence
  Synthetic
guuaaagaacuuaaagccg

SEQ ID NO: 11222 - RNA, 19 nt, Artificial Sequence
  Synthetic
uuaaagaacuuaaagccga

SEQ ID NO: 11223 - RNA, 19 nt, Artificial Sequence
  Synthetic
uaaagaacuuaaagccgaa

SEQ ID NO: 11224 - RNA, 19 nt, Artificial Sequence
  Synthetic
aaagaacuuaaagccgaaa

SEQ ID NO: 11225 - RNA, 19 nt, Artificial Sequence
  Synthetic
aagaacuuaaagccgaaac

SEQ ID NO: 11226 - RNA, 19 nt, Artificial Sequence
  Synthetic
agaacuuaaagccgaaaca

SEQ ID NO: 11227 - RNA, 19 nt, Artificial Sequence
  Synthetic
gaacuuaaagccgaaacag

SEQ ID NO: 11228 - RNA, 19 nt, Artificial Sequence
  Synthetic
aacuuaaagccgaaacagc

SEQ ID NO: 11229 - RNA, 19 nt, Artificial Sequence
  Synthetic
acuuaaagccgaaacagcu

SEQ ID NO: 11230 - RNA, 19 nt, Artificial Sequence
  Synthetic
cuuaaagccgaaacagcuc

SEQ ID NO: 11231 - RNA, 19 nt, Artificial Sequence
  Synthetic
uuaaagccgaaacagcuca

SEQ ID NO: 11232 - RNA, 19 nt, Artificial Sequence
  Synthetic
uaaagccgaaacagcucag

SEQ ID NO: 11233 - RNA, 19 nt, Artificial Sequence
  Synthetic
aaagccgaaacagcucagc

SEQ ID NO: 11234 - RNA, 19 nt, Artificial Sequence
  Synthetic
aagccgaaacagcucagca

SEQ ID NO: 11235 - RNA, 19 nt, Artificial Sequence
  Synthetic
agccgaaacagcucagcag

SEQ ID NO: 11236 - RNA, 19 nt, Artificial Sequence
  Synthetic
gccgaaacagcucagcagg

SEQ ID NO: 11237 - RNA, 19 nt, Artificial Sequence
  Synthetic
ccgaaacagcucagcagga

SEQ ID NO: 11238 - RNA, 19 nt, Artificial Sequence
  Synthetic
cgaaacagcucagcaggau

SEQ ID NO: 11239 - RNA, 19 nt, Artificial Sequence
  Synthetic
gaaacagcucagcaggaug

SEQ ID NO: 11240 - RNA, 19 nt, Artificial Sequence
  Synthetic
aaacagcucagcaggauga

SEQ ID NO: 11241 - RNA, 19 nt, Artificial Sequence
  Synthetic
aacagcucagcaggaugaa

SEQ ID NO: 11242 - RNA, 19 nt, Artificial Sequence
  Synthetic
acagcucagcaggaugaau

SEQ ID NO: 11243 - RNA, 19 nt, Artificial Sequence
  Synthetic
cagcucagcaggaugaaug

SEQ ID NO: 11244 - RNA, 19 nt, Artificial Sequence
  Synthetic
agcucagcaggaugaauga

SEQ ID NO: 11245 - RNA, 19 nt, Artificial Sequence
  Synthetic
gcucagcaggaugaaugaa

SEQ ID NO: 11246 - RNA, 19 nt, Artificial Sequence
  Synthetic
cucagcaggaugaaugaag

SEQ ID NO: 11247 - RNA, 19 nt, Artificial Sequence
  Synthetic
ucagcaggaugaaugaaga

SEQ ID NO: 11248 - RNA, 19 nt, Artificial Sequence
  Synthetic
cagcaggaugaaugaagau

SEQ ID NO: 11249 - RNA, 19 nt, Artificial Sequence
  Synthetic
agcaggaugaaugaagaug

SEQ ID NO: 11250 - RNA, 19 nt, Artificial Sequence
  Synthetic
gcaggaugaaugaagauga

SEQ ID NO: 11251 - RNA, 19 nt, Artificial Sequence
  Synthetic
caggaugaaugaagaugaa

SEQ ID NO: 11252 - RNA, 19 nt, Artificial Sequence
  Synthetic
aggaugaaugaagaugaag

SEQ ID NO: 11253 - RNA, 19 nt, Artificial Sequence
  Synthetic
ggaugaaugaagaugaagg

SEQ ID NO: 11254 - RNA, 19 nt, Artificial Sequence
  Synthetic
gaugaaugaagaugaaggu

SEQ ID NO: 11255 - RNA, 19 nt, Artificial Sequence
  Synthetic
augaaugaagaugaaggua

SEQ ID NO: 11256 - RNA, 19 nt, Artificial Sequence
  Synthetic
ugaaugaagaugaagguac

SEQ ID NO: 11257 - RNA, 19 nt, Artificial Sequence
  Synthetic
gaaugaagaugaagguacu

SEQ ID NO: 11258 - RNA, 19 nt, Artificial Sequence
  Synthetic
aaugaagaugaagguacug

SEQ ID NO: 11259 - RNA, 19 nt, Artificial Sequence
  Synthetic
augaagaugaagguacugg

SEQ ID NO: 11260 - RNA, 19 nt, Artificial Sequence
  Synthetic
ugaagaugaagguacuggc

SEQ ID NO: 11261 - RNA, 19 nt, Artificial Sequence
  Synthetic
gaagaugaagguacuggcu

SEQ ID NO: 11262 - RNA, 19 nt, Artificial Sequence
  Synthetic
aagaugaagguacuggcua

SEQ ID NO: 11263 - RNA, 19 nt, Artificial Sequence
  Synthetic
agaugaagguacuggcuau

SEQ ID NO: 11264 - RNA, 19 nt, Artificial Sequence
  Synthetic
gaugaagguacuggcuauc

SEQ ID NO: 11265 - RNA, 19 nt, Artificial Sequence
  Synthetic
augaagguacuggcuaucc

SEQ ID NO: 11266 - RNA, 19 nt, Artificial Sequence
  Synthetic
ugaagguacuggcuauccc

SEQ ID NO: 11267 - RNA, 19 nt, Artificial Sequence
  Synthetic
gaagguacuggcuauccca

SEQ ID NO: 11268 - RNA, 19 nt, Artificial Sequence
  Synthetic
aagguacuggcuaucccaa

SEQ ID NO: 11269 - RNA, 19 nt, Artificial Sequence
  Synthetic
agguacuggcuaucccaag

SEQ ID NO: 11270 - RNA, 19 nt, Artificial Sequence
  Synthetic
gguacuggcuaucccaagg

SEQ ID NO: 11271 - RNA, 19 nt, Artificial Sequence
  Synthetic
guacuggcuaucccaagga

SEQ ID NO: 11272 - RNA, 19 nt, Artificial Sequence
  Synthetic
uacuggcuaucccaaggag

SEQ ID NO: 11273 - RNA, 19 nt, Artificial Sequence
  Synthetic
acuggcuaucccaaggagc

SEQ ID NO: 11274 - RNA, 19 nt, Artificial Sequence
  Synthetic
cuggcuaucccaaggagcc

SEQ ID NO: 11275 - RNA, 19 nt, Artificial Sequence
  Synthetic
uggcuaucccaaggagccc

SEQ ID NO: 11276 - RNA, 19 nt, Artificial Sequence
  Synthetic
ggcuaucccaaggagccca

SEQ ID NO: 11277 - RNA, 19 nt, Artificial Sequence
  Synthetic
gcuaucccaaggagcccau

SEQ ID NO: 11278 - RNA, 19 nt, Artificial Sequence
  Synthetic
cuaucccaaggagcccauu

SEQ ID NO: 11279 - RNA, 19 nt, Artificial Sequence
  Synthetic
uaucccaaggagcccauuc

SEQ ID NO: 11280 - RNA, 19 nt, Artificial Sequence
  Synthetic
aucccaaggagcccauuca

SEQ ID NO: 11281 - RNA, 19 nt, Artificial Sequence
  Synthetic
ucccaaggagcccauucaa

SEQ ID NO: 11282 - RNA, 19 nt, Artificial Sequence
  Synthetic
cccaaggagcccauucaac

SEQ ID NO: 11283 - RNA, 19 nt, Artificial Sequence
  Synthetic
ccaaggagcccauucaaca

SEQ ID NO: 11284 - RNA, 19 nt, Artificial Sequence
  Synthetic
caaggagcccauucaacag

SEQ ID NO: 11285 - RNA, 19 nt, Artificial Sequence
  Synthetic
aaggagcccauucaacagc

SEQ ID NO: 11286 - RNA, 19 nt, Artificial Sequence
  Synthetic
aggagcccauucaacagca

SEQ ID NO: 11287 - RNA, 19 nt, Artificial Sequence
  Synthetic
ggagcccauucaacagcag

SEQ ID NO: 11288 - RNA, 19 nt, Artificial Sequence
  Synthetic
gagcccauucaacagcagc

SEQ ID NO: 11289 - RNA, 19 nt, Artificial Sequence
  Synthetic
agcccauucaacagcagcu

SEQ ID NO: 11290 - RNA, 19 nt, Artificial Sequence
  Synthetic
gcccauucaacagcagcuu

SEQ ID NO: 11291 - RNA, 19 nt, Artificial Sequence
  Synthetic
cccauucaacagcagcuua

SEQ ID NO: 11292 - RNA, 19 nt, Artificial Sequence
  Synthetic
ccauucaacagcagcuuac

SEQ ID NO: 11293 - RNA, 19 nt, Artificial Sequence
  Synthetic
cauucaacagcagcuuacc

SEQ ID NO: 11294 - RNA, 19 nt, Artificial Sequence
  Synthetic
auucaacagcagcuuaccu

SEQ ID NO: 11295 - RNA, 19 nt, Artificial Sequence
  Synthetic
uucaacagcagcuuaccuc

SEQ ID NO: 11296 - RNA, 19 nt, Artificial Sequence
  Synthetic
ucaacagcagcuuaccucu

SEQ ID NO: 11297 - RNA, 19 nt, Artificial Sequence
  Synthetic
caacagcagcuuaccucuu

SEQ ID NO: 11298 - RNA, 19 nt, Artificial Sequence
  Synthetic
aacagcagcuuaccucuuc

SEQ ID NO: 11299 - RNA, 19 nt, Artificial Sequence
  Synthetic
acagcagcuuaccucuucu

SEQ ID NO: 11300 - RNA, 19 nt, Artificial Sequence
  Synthetic
cagcagcuuaccucuucuc

SEQ ID NO: 11301 - RNA, 19 nt, Artificial Sequence
  Synthetic
agcagcuuaccucuucuca

SEQ ID NO: 11302 - RNA, 19 nt, Artificial Sequence
  Synthetic
gcagcuuaccucuucucag

SEQ ID NO: 11303 - RNA, 19 nt, Artificial Sequence
  Synthetic
cagcuuaccucuucucagc

SEQ ID NO: 11304 - RNA, 19 nt, Artificial Sequence
  Synthetic
agcuuaccucuucucagcu

SEQ ID NO: 11305 - RNA, 19 nt, Artificial Sequence
  Synthetic
gcuuaccucuucucagcuc

SEQ ID NO: 11306 - RNA, 19 nt, Artificial Sequence
  Synthetic
cuuaccucuucucagcucc

SEQ ID NO: 11307 - RNA, 19 nt, Artificial Sequence
  Synthetic
uuaccucuucucagcucca

SEQ ID NO: 11308 - RNA, 19 nt, Artificial Sequence
  Synthetic
uaccucuucucagcuccau

SEQ ID NO: 11309 - RNA, 19 nt, Artificial Sequence
  Synthetic
accucuucucagcuccaua

SEQ ID NO: 11310 - RNA, 19 nt, Artificial Sequence
  Synthetic
ccucuucucagcuccauau

SEQ ID NO: 11311 - RNA, 19 nt, Artificial Sequence
  Synthetic
cucuucucagcuccauauu

SEQ ID NO: 11312 - RNA, 19 nt, Artificial Sequence
  Synthetic
ucuucucagcuccauauuu

SEQ ID NO: 11313 - RNA, 19 nt, Artificial Sequence
  Synthetic
cuucucagcuccauauuuu

SEQ ID NO: 11314 - RNA, 19 nt, Artificial Sequence
  Synthetic
uucucagcuccauauuuuc

SEQ ID NO: 11315 - RNA, 19 nt, Artificial Sequence
  Synthetic
ucucagcuccauauuuuca

SEQ ID NO: 11316 - RNA, 19 nt, Artificial Sequence
  Synthetic
cucagcuccauauuuucaa

SEQ ID NO: 11317 - RNA, 19 nt, Artificial Sequence
  Synthetic
ucagcuccauauuuucaau

SEQ ID NO: 11318 - RNA, 19 nt, Artificial Sequence
  Synthetic
cagcuccauauuuucaaug

SEQ ID NO: 11319 - RNA, 19 nt, Artificial Sequence
  Synthetic
agcuccauauuuucaaugu

SEQ ID NO: 11320 - RNA, 19 nt, Artificial Sequence
  Synthetic
gcuccauauuuucaaugug

SEQ ID NO: 11321 - RNA, 19 nt, Artificial Sequence
  Synthetic
cuccauauuuucaauguga

SEQ ID NO: 11322 - RNA, 19 nt, Artificial Sequence
  Synthetic
uccauauuuucaaugugac

SEQ ID NO: 11323 - RNA, 19 nt, Artificial Sequence
  Synthetic
ccauauuuucaaugugacu

SEQ ID NO: 11324 - RNA, 19 nt, Artificial Sequence
  Synthetic
cauauuuucaaugugacug

SEQ ID NO: 11325 - RNA, 19 nt, Artificial Sequence
  Synthetic
auauuuucaaugugacugg

SEQ ID NO: 11326 - RNA, 19 nt, Artificial Sequence
  Synthetic
uauuuucaaugugacuggg

SEQ ID NO: 11327 - RNA, 19 nt, Artificial Sequence
  Synthetic
auuuucaaugugacugggu

SEQ ID NO: 11328 - RNA, 19 nt, Artificial Sequence
  Synthetic
uuuucaaugugacuggguc

SEQ ID NO: 11329 - RNA, 19 nt, Artificial Sequence
  Synthetic
uuucaaugugacugggucu

SEQ ID NO: 11330 - RNA, 19 nt, Artificial Sequence
  Synthetic
uucaaugugacugggucuu

SEQ ID NO: 11331 - RNA, 19 nt, Artificial Sequence
  Synthetic
ucaaugugacugggucuua

SEQ ID NO: 11332 - RNA, 19 nt, Artificial Sequence
  Synthetic
caaugugacugggucuuau

SEQ ID NO: 11333 - RNA, 19 nt, Artificial Sequence
  Synthetic
aaugugacugggucuuaua

SEQ ID NO: 11334 - RNA, 19 nt, Artificial Sequence
  Synthetic
augugacugggucuuauag

SEQ ID NO: 11335 - RNA, 19 nt, Artificial Sequence
  Synthetic
ugugacugggucuuauagu

SEQ ID NO: 11336 - RNA, 19 nt, Artificial Sequence
  Synthetic
gugacugggucuuauagua

SEQ ID NO: 11337 - RNA, 19 nt, Artificial Sequence
  Synthetic
ugacugggucuuauaguac

SEQ ID NO: 11338 - RNA, 19 nt, Artificial Sequence
  Synthetic
gacugggucuuauaguaca

SEQ ID NO: 11339 - RNA, 19 nt, Artificial Sequence
  Synthetic
acugggucuuauaguacag

SEQ ID NO: 11340 - RNA, 19 nt, Artificial Sequence
  Synthetic
cugggucuuauaguacagg

SEQ ID NO: 11341 - RNA, 19 nt, Artificial Sequence
  Synthetic
ugggucuuauaguacaggc

SEQ ID NO: 11342 - RNA, 19 nt, Artificial Sequence
  Synthetic
gggucuuauaguacaggcu

SEQ ID NO: 11343 - RNA, 19 nt, Artificial Sequence
  Synthetic
ggucuuauaguacaggcuu

SEQ ID NO: 11344 - RNA, 19 nt, Artificial Sequence
  Synthetic
gucuuauaguacaggcuug

SEQ ID NO: 11345 - RNA, 19 nt, Artificial Sequence
  Synthetic
ucuuauaguacaggcuugu

SEQ ID NO: 11346 - RNA, 19 nt, Artificial Sequence
  Synthetic
cuuauaguacaggcuugua

SEQ ID NO: 11347 - RNA, 19 nt, Artificial Sequence
  Synthetic
uuauaguacaggcuuguau

SEQ ID NO: 11348 - RNA, 19 nt, Artificial Sequence
  Synthetic
uauaguacaggcuuguauu

SEQ ID NO: 11349 - RNA, 19 nt, Artificial Sequence
  Synthetic
auaguacaggcuuguauuc

SEQ ID NO: 11350 - RNA, 19 nt, Artificial Sequence
  Synthetic
uaguacaggcuuguauuca

SEQ ID NO: 11351 - RNA, 19 nt, Artificial Sequence
  Synthetic
aguacaggcuuguauucau

SEQ ID NO: 11352 - RNA, 19 nt, Artificial Sequence
  Synthetic
guacaggcuuguauucauc

SEQ ID NO: 11353 - RNA, 19 nt, Artificial Sequence
  Synthetic
uacaggcuuguauucauca

SEQ ID NO: 11354 - RNA, 19 nt, Artificial Sequence
  Synthetic
acaggcuuguauucaucac

SEQ ID NO: 11355 - RNA, 19 nt, Artificial Sequence
  Synthetic
caggcuuguauucaucaca

SEQ ID NO: 11356 - RNA, 19 nt, Artificial Sequence
  Synthetic
aggcuuguauucaucacag

SEQ ID NO: 11357 - RNA, 19 nt, Artificial Sequence
  Synthetic
ggcuuguauucaucacaga

SEQ ID NO: 11358 - RNA, 19 nt, Artificial Sequence
  Synthetic
gcuuguauucaucacagau

SEQ ID NO: 11359 - RNA, 19 nt, Artificial Sequence
  Synthetic
cuuguauucaucacagaug

SEQ ID NO: 11360 - RNA, 19 nt, Artificial Sequence
  Synthetic
uuguauucaucacagaugu

SEQ ID NO: 11361 - RNA, 19 nt, Artificial Sequence
  Synthetic
uguauucaucacagauguu

SEQ ID NO: 11362 - RNA, 19 nt, Artificial Sequence
  Synthetic
guauucaucacagauguuu

SEQ ID NO: 11363 - RNA, 19 nt, Artificial Sequence
  Synthetic
uauucaucacagauguuug

SEQ ID NO: 11364 - RNA, 19 nt, Artificial Sequence
  Synthetic
auucaucacagauguuugg

SEQ ID NO: 11365 - RNA, 19 nt, Artificial Sequence
  Synthetic
uucaucacagauguuugga

SEQ ID NO: 11366 - RNA, 19 nt, Artificial Sequence
  Synthetic
ucaucacagauguuuggaa

SEQ ID NO: 11367 - RNA, 19 nt, Artificial Sequence
  Synthetic
caucacagauguuuggaac

SEQ ID NO: 11368 - RNA, 19 nt, Artificial Sequence
  Synthetic
aucacagauguuuggaacu

SEQ ID NO: 11369 - RNA, 19 nt, Artificial Sequence
  Synthetic
ucacagauguuuggaacuu

SEQ ID NO: 11370 - RNA, 19 nt, Artificial Sequence
  Synthetic
cacagauguuuggaacuuc

SEQ ID NO: 11371 - RNA, 19 nt, Artificial Sequence
  Synthetic
acagauguuuggaacuuca

SEQ ID NO: 11372 - RNA, 19 nt, Artificial Sequence
  Synthetic
cagauguuuggaacuucag

SEQ ID NO: 11373 - RNA, 19 nt, Artificial Sequence
  Synthetic
agauguuuggaacuucaga

SEQ ID NO: 11374 - RNA, 19 nt, Artificial Sequence
  Synthetic
gauguuuggaacuucagaa

SEQ ID NO: 11375 - RNA, 19 nt, Artificial Sequence
  Synthetic
auguuuggaacuucagaau

SEQ ID NO: 11376 - RNA, 19 nt, Artificial Sequence
  Synthetic
uguuuggaacuucagaaua

SEQ ID NO: 11377 - RNA, 19 nt, Artificial Sequence
  Synthetic
guuuggaacuucagaauaa

SEQ ID NO: 11378 - RNA, 19 nt, Artificial Sequence
  Synthetic
uuuggaacuucagaauaau

SEQ ID NO: 11379 - RNA, 19 nt, Artificial Sequence
  Synthetic
uuggaacuucagaauaaua

SEQ ID NO: 11380 - RNA, 19 nt, Artificial Sequence
  Synthetic
uggaacuucagaauaauac

SEQ ID NO: 11381 - RNA, 19 nt, Artificial Sequence
  Synthetic
ggaacuucagaauaauaca

SEQ ID NO: 11382 - RNA, 19 nt, Artificial Sequence
  Synthetic
gaacuucagaauaauacau

SEQ ID NO: 11383 - RNA, 19 nt, Artificial Sequence
  Synthetic
aacuucagaauaauacaug

SEQ ID NO: 11384 - RNA, 19 nt, Artificial Sequence
  Synthetic
acuucagaauaauacaugg

SEQ ID NO: 11385 - RNA, 19 nt, Artificial Sequence
  Synthetic
cuucagaauaauacauggu

SEQ ID NO: 11386 - RNA, 19 nt, Artificial Sequence
  Synthetic
uucagaauaauacauggug

SEQ ID NO: 11387 - RNA, 19 nt, Artificial Sequence
  Synthetic
ucagaauaauacauggugc

SEQ ID NO: 11388 - RNA, 19 nt, Artificial Sequence
  Synthetic
cagaauaauacauggugca

SEQ ID NO: 11389 - RNA, 19 nt, Artificial Sequence
  Synthetic
agaauaauacauggugcaa

SEQ ID NO: 11390 - RNA, 19 nt, Artificial Sequence
  Synthetic
gaauaauacauggugcaaa

SEQ ID NO: 11391 - RNA, 19 nt, Artificial Sequence
  Synthetic
aauaauacauggugcaaau

SEQ ID NO: 11392 - RNA, 19 nt, Artificial Sequence
  Synthetic
auaauacauggugcaaauu

SEQ ID NO: 11393 - RNA, 19 nt, Artificial Sequence
  Synthetic
uaauacauggugcaaauuu

SEQ ID NO: 11394 - RNA, 19 nt, Artificial Sequence
  Synthetic
aauacauggugcaaauuug

SEQ ID NO: 11395 - RNA, 19 nt, Artificial Sequence
  Synthetic
auacauggugcaaauuugc

SEQ ID NO: 11396 - RNA, 19 nt, Artificial Sequence
  Synthetic
uacauggugcaaauuugca

SEQ ID NO: 11397 - RNA, 19 nt, Artificial Sequence
  Synthetic
acauggugcaaauuugcau

SEQ ID NO: 11398 - RNA, 19 nt, Artificial Sequence
  Synthetic
cauggugcaaauuugcauu

SEQ ID NO: 11399 - RNA, 19 nt, Artificial Sequence
  Synthetic
auggugcaaauuugcauuu

SEQ ID NO: 11400 - RNA, 19 nt, Artificial Sequence
  Synthetic
uggugcaaauuugcauuua

SEQ ID NO: 11401 - RNA, 19 nt, Artificial Sequence
  Synthetic
ggugcaaauuugcauuuac

SEQ ID NO: 11402 - RNA, 19 nt, Artificial Sequence
  Synthetic
gugcaaauuugcauuuacc

SEQ ID NO: 11403 - RNA, 19 nt, Artificial Sequence
  Synthetic
ugcaaauuugcauuuaccu

SEQ ID NO: 11404 - RNA, 19 nt, Artificial Sequence
  Synthetic
gcaaauuugcauuuaccuu

SEQ ID NO: 11405 - RNA, 19 nt, Artificial Sequence
  Synthetic
caaauuugcauuuaccuuc

SEQ ID NO: 11406 - RNA, 19 nt, Artificial Sequence
  Synthetic
aaauuugcauuuaccuucc

SEQ ID NO: 11407 - RNA, 19 nt, Artificial Sequence
  Synthetic
aauuugcauuuaccuucca

SEQ ID NO: 11408 - RNA, 19 nt, Artificial Sequence
  Synthetic
auuugcauuuaccuuccau

SEQ ID NO: 11409 - RNA, 19 nt, Artificial Sequence
  Synthetic
uuugcauuuaccuuccauu

SEQ ID NO: 11410 - RNA, 19 nt, Artificial Sequence
  Synthetic
uugcauuuaccuuccauug

SEQ ID NO: 11411 - RNA, 19 nt, Artificial Sequence
  Synthetic
ugcauuuaccuuccauugu

SEQ ID NO: 11412 - RNA, 19 nt, Artificial Sequence
  Synthetic
gcauuuaccuuccauugua

SEQ ID NO: 11413 - RNA, 19 nt, Artificial Sequence
  Synthetic
cauuuaccuuccauuguaa

SEQ ID NO: 11414 - RNA, 19 nt, Artificial Sequence
  Synthetic
auuuaccuuccauuguaaa

SEQ ID NO: 11415 - RNA, 19 nt, Artificial Sequence
  Synthetic
uuuaccuuccauuguaaau

SEQ ID NO: 11416 - RNA, 19 nt, Artificial Sequence
  Synthetic
uuaccuuccauuguaaauc

SEQ ID NO: 11417 - RNA, 19 nt, Artificial Sequence
  Synthetic
uaccuuccauuguaaauca

SEQ ID NO: 11418 - RNA, 19 nt, Artificial Sequence
  Synthetic
accuuccauuguaaaucag

SEQ ID NO: 11419 - RNA, 19 nt, Artificial Sequence
  Synthetic
ccuuccauuguaaaucagu

SEQ ID NO: 11420 - RNA, 19 nt, Artificial Sequence
  Synthetic
cuuccauuguaaaucaguu

SEQ ID NO: 11421 - RNA, 19 nt, Artificial Sequence
  Synthetic
uuccauuguaaaucaguuc

SEQ ID NO: 11422 - RNA, 19 nt, Artificial Sequence
  Synthetic
uccauuguaaaucaguucc

SEQ ID NO: 11423 - RNA, 19 nt, Artificial Sequence
  Synthetic
ccauuguaaaucaguucca

SEQ ID NO: 11424 - RNA, 19 nt, Artificial Sequence
  Synthetic
cauuguaaaucaguuccaa

SEQ ID NO: 11425 - RNA, 19 nt, Artificial Sequence
  Synthetic
auuguaaaucaguuccaau

SEQ ID NO: 11426 - RNA, 19 nt, Artificial Sequence
  Synthetic
uuguaaaucaguuccaaua

SEQ ID NO: 11427 - RNA, 19 nt, Artificial Sequence
  Synthetic
uguaaaucaguuccaauaa

SEQ ID NO: 11428 - RNA, 19 nt, Artificial Sequence
  Synthetic
guaaaucaguuccaauaaa

SEQ ID NO: 11429 - RNA, 19 nt, Artificial Sequence
  Synthetic
uaaaucaguuccaauaaaa

SEQ ID NO: 11430 - RNA, 19 nt, Artificial Sequence
  Synthetic
aaaucaguuccaauaaaag

SEQ ID NO: 11431 - RNA, 19 nt, Artificial Sequence
  Synthetic
aaucaguuccaauaaaaga

SEQ ID NO: 11432 - RNA, 19 nt, Artificial Sequence
  Synthetic
aucaguuccaauaaaagau

SEQ ID NO: 11433 - RNA, 19 nt, Artificial Sequence
  Synthetic
ucaguuccaauaaaagaua

SEQ ID NO: 11434 - RNA, 19 nt, Artificial Sequence
  Synthetic
caguuccaauaaaagauaa

SEQ ID NO: 11435 - RNA, 19 nt, Artificial Sequence
  Synthetic
aguuccaauaaaagauaau

SEQ ID NO: 11436 - RNA, 19 nt, Artificial Sequence
  Synthetic
guuccaauaaaagauaaua

SEQ ID NO: 11437 - RNA, 19 nt, Artificial Sequence
  Synthetic
uuccaauaaaagauaauau

SEQ ID NO: 11438 - RNA, 19 nt, Artificial Sequence
  Synthetic
uccaauaaaagauaauaua

SEQ ID NO: 11439 - RNA, 19 nt, Artificial Sequence
  Synthetic
ccaauaaaagauaauauaa

SEQ ID NO: 11440 - RNA, 19 nt, Artificial Sequence
  Synthetic
caauaaaagauaauauaaa

SEQ ID NO: 11441 - RNA, 19 nt, Artificial Sequence
  Synthetic
aauaaaagauaauauaaaa

SEQ ID NO: 11442 - RNA, 19 nt, Artificial Sequence
  Synthetic
auaaaagauaauauaaaag

SEQ ID NO: 11443 - RNA, 19 nt, Artificial Sequence
  Synthetic
uaaaagauaauauaaaagg

SEQ ID NO: 11444 - RNA, 19 nt, Artificial Sequence
  Synthetic
aaaagauaauauaaaaggc

SEQ ID NO: 11445 - RNA, 19 nt, Artificial Sequence
  Synthetic
aaagauaauauaaaaggca

SEQ ID NO: 11446 - RNA, 19 nt, Artificial Sequence
  Synthetic
aagauaauauaaaaggcag

SEQ ID NO: 11447 - RNA, 19 nt, Artificial Sequence
  Synthetic
agauaauauaaaaggcaga

SEQ ID NO: 11448 - RNA, 19 nt, Artificial Sequence
  Synthetic
gauaauauaaaaggcagag

SEQ ID NO: 11449 - RNA, 19 nt, Artificial Sequence
  Synthetic
auaauauaaaaggcagagc

SEQ ID NO: 11450 - RNA, 19 nt, Artificial Sequence
  Synthetic
uaauauaaaaggcagagcu

SEQ ID NO: 11451 - RNA, 19 nt, Artificial Sequence
  Synthetic
aauauaaaaggcagagcuu

SEQ ID NO: 11452 - RNA, 19 nt, Artificial Sequence
  Synthetic
auauaaaaggcagagcuuc

SEQ ID NO: 11453 - RNA, 19 nt, Artificial Sequence
  Synthetic
uauaaaaggcagagcuucu

SEQ ID NO: 11454 - RNA, 19 nt, Artificial Sequence
  Synthetic
auaaaaggcagagcuucug

SEQ ID NO: 11455 - RNA, 19 nt, Artificial Sequence
  Synthetic
uaaaaggcagagcuucugc

SEQ ID NO: 11456 - RNA, 19 nt, Artificial Sequence
  Synthetic
aaaaggcagagcuucugcc

SEQ ID NO: 11457 - RNA, 19 nt, Artificial Sequence
  Synthetic
aaaggcagagcuucugccu

SEQ ID NO: 11458 - RNA, 19 nt, Artificial Sequence
  Synthetic
aaggcagagcuucugccuu

SEQ ID NO: 11459 - RNA, 19 nt, Artificial Sequence
  Synthetic
aggcagagcuucugccuug

SEQ ID NO: 11460 - RNA, 19 nt, Artificial Sequence
  Synthetic
ggcagagcuucugccuugg

SEQ ID NO: 11461 - RNA, 19 nt, Artificial Sequence
  Synthetic
gcagagcuucugccuugga

SEQ ID NO: 11462 - RNA, 19 nt, Artificial Sequence
  Synthetic
cagagcuucugccuuggau

SEQ ID NO: 11463 - RNA, 19 nt, Artificial Sequence
  Synthetic
agagcuucugccuuggauu

SEQ ID NO: 11464 - RNA, 19 nt, Artificial Sequence
  Synthetic
gagcuucugccuuggauuu

SEQ ID NO: 11465 - RNA, 19 nt, Artificial Sequence
  Synthetic
agcuucugccuuggauuuu

SEQ ID NO: 11466 - RNA, 19 nt, Artificial Sequence
  Synthetic
gcuucugccuuggauuuug

SEQ ID NO: 11467 - RNA, 19 nt, Artificial Sequence
  Synthetic
cuucugccuuggauuuugu

SEQ ID NO: 11468 - RNA, 19 nt, Artificial Sequence
  Synthetic
uucugccuuggauuuugug

SEQ ID NO: 11469 - RNA, 19 nt, Artificial Sequence
  Synthetic
ucugccuuggauuuugugu

SEQ ID NO: 11470 - RNA, 19 nt, Artificial Sequence
  Synthetic
cugccuuggauuuuguguu

SEQ ID NO: 11471 - RNA, 19 nt, Artificial Sequence
  Synthetic
ugccuuggauuuuguguuc

SEQ ID NO: 11472 - RNA, 19 nt, Artificial Sequence
  Synthetic
gccuuggauuuuguguucu

SEQ ID NO: 11473 - RNA, 19 nt, Artificial Sequence
  Synthetic
ccuuggauuuuguguucuu

SEQ ID NO: 11474 - RNA, 19 nt, Artificial Sequence
  Synthetic
cuuggauuuuguguucuuu

SEQ ID NO: 11475 - RNA, 19 nt, Artificial Sequence
  Synthetic
uuggauuuuguguucuuua

SEQ ID NO: 11476 - RNA, 19 nt, Artificial Sequence
  Synthetic
uggauuuuguguucuuuaa

SEQ ID NO: 11477 - RNA, 19 nt, Artificial Sequence
  Synthetic
ggauuuuguguucuuuaaa

SEQ ID NO: 11478 - RNA, 19 nt, Artificial Sequence
  Synthetic
gauuuuguguucuuuaaau

SEQ ID NO: 11479 - RNA, 19 nt, Artificial Sequence
  Synthetic
auuuuguguucuuuaaauu

SEQ ID NO: 11480 - RNA, 19 nt, Artificial Sequence
  Synthetic
uuuuguguucuuuaaauuu

SEQ ID NO: 11481 - RNA, 19 nt, Artificial Sequence
  Synthetic
uuuguguucuuuaaauuuu

SEQ ID NO: 11482 - RNA, 19 nt, Artificial Sequence
  Synthetic
uuguguucuuuaaauuuuu

SEQ ID NO: 11483 - RNA, 19 nt, Artificial Sequence
  Synthetic
uguguucuuuaaauuuuuu

SEQ ID NO: 11484 - RNA, 19 nt, Artificial Sequence
  Synthetic
guguucuuuaaauuuuuug

SEQ ID NO: 11485 - RNA, 19 nt, Artificial Sequence
  Synthetic
uguucuuuaaauuuuuugg

SEQ ID NO: 11486 - RNA, 19 nt, Artificial Sequence
  Synthetic
guucuuuaaauuuuuuggu

SEQ ID NO: 11487 - RNA, 19 nt, Artificial Sequence
  Synthetic
uucuuuaaauuuuuuggug

SEQ ID NO: 11488 - RNA, 19 nt, Artificial Sequence
  Synthetic
ucuuuaaauuuuuuggugc

SEQ ID NO: 11489 - RNA, 19 nt, Artificial Sequence
  Synthetic
cuuuaaauuuuuuggugca

SEQ ID NO: 11490 - RNA, 19 nt, Artificial Sequence
  Synthetic
uuuaaauuuuuuggugcau

SEQ ID NO: 11491 - RNA, 19 nt, Artificial Sequence
  Synthetic
uuaaauuuuuuggugcauu

SEQ ID NO: 11492 - RNA, 19 nt, Artificial Sequence
  Synthetic
uaaauuuuuuggugcauuc

SEQ ID NO: 11493 - RNA, 19 nt, Artificial Sequence
  Synthetic
aaauuuuuuggugcauucu

SEQ ID NO: 11494 - RNA, 19 nt, Artificial Sequence
  Synthetic
aauuuuuuggugcauucug

SEQ ID NO: 11495 - RNA, 19 nt, Artificial Sequence
  Synthetic
auuuuuuggugcauucugu

SEQ ID NO: 11496 - RNA, 19 nt, Artificial Sequence
  Synthetic
uuuuuuggugcauucuguc

SEQ ID NO: 11497 - RNA, 19 nt, Artificial Sequence
  Synthetic
uuuuuggugcauucugucu

SEQ ID NO: 11498 - RNA, 19 nt, Artificial Sequence
  Synthetic
uuuuggugcauucugucuu

SEQ ID NO: 11499 - RNA, 19 nt, Artificial Sequence
  Synthetic
uuuggugcauucugucuuu

SEQ ID NO: 11500 - RNA, 19 nt, Artificial Sequence
  Synthetic
uuggugcauucugucuuua

SEQ ID NO: 11501 - RNA, 19 nt, Artificial Sequence
  Synthetic
uggugcauucugucuuuaa

SEQ ID NO: 11502 - RNA, 19 nt, Artificial Sequence
  Synthetic
ggugcauucugucuuuaaa

SEQ ID NO: 11503 - RNA, 19 nt, Artificial Sequence
  Synthetic
gugcauucugucuuuaaaa

SEQ ID NO: 11504 - RNA, 19 nt, Artificial Sequence
  Synthetic
ugcauucugucuuuaaaau

SEQ ID NO: 11505 - RNA, 19 nt, Artificial Sequence
  Synthetic
gcauucugucuuuaaaaua

SEQ ID NO: 11506 - RNA, 19 nt, Artificial Sequence
  Synthetic
cauucugucuuuaaaauau

SEQ ID NO: 11507 - RNA, 19 nt, Artificial Sequence
  Synthetic
auucugucuuuaaaauaua

SEQ ID NO: 11508 - RNA, 19 nt, Artificial Sequence
  Synthetic
uucugucuuuaaaauauaa

SEQ ID NO: 11509 - RNA, 19 nt, Artificial Sequence
  Synthetic
ucugucuuuaaaauauaag

SEQ ID NO: 11510 - RNA, 19 nt, Artificial Sequence
  Synthetic
cugucuuuaaaauauaaga

SEQ ID NO: 11511 - RNA, 19 nt, Artificial Sequence
  Synthetic
ugucuuuaaaauauaagaa

SEQ ID NO: 11512 - RNA, 19 nt, Artificial Sequence
  Synthetic
gucuuuaaaauauaagaag

SEQ ID NO: 11513 - RNA, 19 nt, Artificial Sequence
  Synthetic
ucuuuaaaauauaagaagu

SEQ ID NO: 11514 - RNA, 19 nt, Artificial Sequence
  Synthetic
cuuuaaaauauaagaagua

SEQ ID NO: 11515 - RNA, 19 nt, Artificial Sequence
  Synthetic
uuuaaaauauaagaaguac

SEQ ID NO: 11516 - RNA, 19 nt, Artificial Sequence
  Synthetic
uuaaaauauaagaaguacc

SEQ ID NO: 11517 - RNA, 19 nt, Artificial Sequence
  Synthetic
uaaaauauaagaaguaccu

SEQ ID NO: 11518 - RNA, 19 nt, Artificial Sequence
  Synthetic
aaaauauaagaaguaccuc

SEQ ID NO: 11519 - RNA, 19 nt, Artificial Sequence
  Synthetic
aaauauaagaaguaccuca

SEQ ID NO: 11520 - RNA, 19 nt, Artificial Sequence
  Synthetic
aauauaagaaguaccucac

SEQ ID NO: 11521 - RNA, 19 nt, Artificial Sequence
  Synthetic
auauaagaaguaccucacu

SEQ ID NO: 11522 - RNA, 19 nt, Artificial Sequence
  Synthetic
uauaagaaguaccucacua

SEQ ID NO: 11523 - RNA, 19 nt, Artificial Sequence
  Synthetic
auaagaaguaccucacuau

SEQ ID NO: 11524 - RNA, 19 nt, Artificial Sequence
  Synthetic
uaagaaguaccucacuaua

SEQ ID NO: 11525 - RNA, 19 nt, Artificial Sequence
  Synthetic
aagaaguaccucacuauau

SEQ ID NO: 11526 - RNA, 19 nt, Artificial Sequence
  Synthetic
agaaguaccucacuauauu

SEQ ID NO: 11527 - RNA, 19 nt, Artificial Sequence
  Synthetic
gaaguaccucacuauauuc

SEQ ID NO: 11528 - RNA, 19 nt, Artificial Sequence
  Synthetic
aaguaccucacuauauuca

SEQ ID NO: 11529 - RNA, 19 nt, Artificial Sequence
  Synthetic
aguaccucacuauauucag

SEQ ID NO: 11530 - RNA, 19 nt, Artificial Sequence
  Synthetic
guaccucacuauauucagu

SEQ ID NO: 11531 - RNA, 19 nt, Artificial Sequence
  Synthetic
uaccucacuauauucagug

SEQ ID NO: 11532 - RNA, 19 nt, Artificial Sequence
  Synthetic
accucacuauauucagugu

SEQ ID NO: 11533 - RNA, 19 nt, Artificial Sequence
  Synthetic
ccucacuauauucagugua

SEQ ID NO: 11534 - RNA, 19 nt, Artificial Sequence
  Synthetic
cucacuauauucaguguaa

SEQ ID NO: 11535 - RNA, 19 nt, Artificial Sequence
  Synthetic
ucacuauauucaguguaac

SEQ ID NO: 11536 - RNA, 19 nt, Artificial Sequence
  Synthetic
cacuauauucaguguaaca

SEQ ID NO: 11537 - RNA, 19 nt, Artificial Sequence
  Synthetic
acuauauucaguguaacac

SEQ ID NO: 11538 - RNA, 19 nt, Artificial Sequence
  Synthetic
cuauauucaguguaacacu

SEQ ID NO: 11539 - RNA, 19 nt, Artificial Sequence
  Synthetic
uauauucaguguaacacuc

SEQ ID NO: 11540 - RNA, 19 nt, Artificial Sequence
  Synthetic
auauucaguguaacacuca

SEQ ID NO: 11541 - RNA, 19 nt, Artificial Sequence
  Synthetic
uauucaguguaacacucaa

SEQ ID NO: 11542 - RNA, 19 nt, Artificial Sequence
  Synthetic
auucaguguaacacucaac

SEQ ID NO: 11543 - RNA, 19 nt, Artificial Sequence
  Synthetic
uucaguguaacacucaacc

SEQ ID NO: 11544 - RNA, 19 nt, Artificial Sequence
  Synthetic
ucaguguaacacucaaccg

SEQ ID NO: 11545 - RNA, 19 nt, Artificial Sequence
  Synthetic
caguguaacacucaaccgu

SEQ ID NO: 11546 - RNA, 19 nt, Artificial Sequence
  Synthetic
aguguaacacucaaccguc

SEQ ID NO: 11547 - RNA, 19 nt, Artificial Sequence
  Synthetic
guguaacacucaaccgucc

SEQ ID NO: 11548 - RNA, 19 nt, Artificial Sequence
  Synthetic
uguaacacucaaccguccc

SEQ ID NO: 11549 - RNA, 19 nt, Artificial Sequence
  Synthetic
guaacacucaaccgucccu

SEQ ID NO: 11550 - RNA, 19 nt, Artificial Sequence
  Synthetic
uaacacucaaccgucccug

SEQ ID NO: 11551 - RNA, 19 nt, Artificial Sequence
  Synthetic
aacacucaaccgucccugu

SEQ ID NO: 11552 - RNA, 19 nt, Artificial Sequence
  Synthetic
acacucaaccgucccuguc

SEQ ID NO: 11553 - RNA, 19 nt, Artificial Sequence
  Synthetic
cacucaaccgucccuguca

SEQ ID NO: 11554 - RNA, 19 nt, Artificial Sequence
  Synthetic
acucaaccgucccugucau

SEQ ID NO: 11555 - RNA, 19 nt, Artificial Sequence
  Synthetic
cucaaccgucccugucaug

SEQ ID NO: 11556 - RNA, 19 nt, Artificial Sequence
  Synthetic
ucaaccgucccugucauga

SEQ ID NO: 11557 - RNA, 19 nt, Artificial Sequence
  Synthetic
caaccgucccugucaugag

SEQ ID NO: 11558 - RNA, 19 nt, Artificial Sequence
  Synthetic
aaccgucccugucaugagc

SEQ ID NO: 11559 - RNA, 19 nt, Artificial Sequence
  Synthetic
accgucccugucaugagcu

SEQ ID NO: 11560 - RNA, 19 nt, Artificial Sequence
  Synthetic
ccgucccugucaugagcug

SEQ ID NO: 11561 - RNA, 19 nt, Artificial Sequence
  Synthetic
cgucccugucaugagcugg

SEQ ID NO: 11562 - RNA, 19 nt, Artificial Sequence
  Synthetic
gucccugucaugagcuggg

SEQ ID NO: 11563 - RNA, 19 nt, Artificial Sequence
  Synthetic
ucccugucaugagcugggu

SEQ ID NO: 11564 - RNA, 19 nt, Artificial Sequence
  Synthetic
cccugucaugagcugggug

SEQ ID NO: 11565 - RNA, 19 nt, Artificial Sequence
  Synthetic
ccugucaugagcuggguga

SEQ ID NO: 11566 - RNA, 19 nt, Artificial Sequence
  Synthetic
cugucaugagcugggugac

SEQ ID NO: 11567 - RNA, 19 nt, Artificial Sequence
  Synthetic
ugucaugagcugggugacc

SEQ ID NO: 11568 - RNA, 19 nt, Artificial Sequence
  Synthetic
gucaugagcugggugaccu

SEQ ID NO: 11569 - RNA, 19 nt, Artificial Sequence
  Synthetic
ucaugagcugggugaccuu

SEQ ID NO: 11570 - RNA, 19 nt, Artificial Sequence
  Synthetic
caugagcugggugaccuug

SEQ ID NO: 11571 - RNA, 19 nt, Artificial Sequence
  Synthetic
augagcugggugaccuugg

SEQ ID NO: 11572 - RNA, 19 nt, Artificial Sequence
  Synthetic
ugagcugggugaccuuggu

SEQ ID NO: 11573 - RNA, 19 nt, Artificial Sequence
  Synthetic
gagcugggugaccuugguc

SEQ ID NO: 11574 - RNA, 19 nt, Artificial Sequence
  Synthetic
agcugggugaccuugguca

SEQ ID NO: 11575 - RNA, 19 nt, Artificial Sequence
  Synthetic
gcugggugaccuuggucau

SEQ ID NO: 11576 - RNA, 19 nt, Artificial Sequence
  Synthetic
cugggugaccuuggucauu

SEQ ID NO: 11577 - RNA, 19 nt, Artificial Sequence
  Synthetic
ugggugaccuuggucauuc

SEQ ID NO: 11578 - RNA, 19 nt, Artificial Sequence
  Synthetic
gggugaccuuggucauuca

SEQ ID NO: 11579 - RNA, 19 nt, Artificial Sequence
  Synthetic
ggugaccuuggucauucau

SEQ ID NO: 11580 - RNA, 19 nt, Artificial Sequence
  Synthetic
gugaccuuggucauucauu

SEQ ID NO: 11581 - RNA, 19 nt, Artificial Sequence
  Synthetic
ugaccuuggucauucauuu

SEQ ID NO: 11582 - RNA, 19 nt, Artificial Sequence
  Synthetic
gaccuuggucauucauuua

SEQ ID NO: 11583 - RNA, 19 nt, Artificial Sequence
  Synthetic
accuuggucauucauuuau

SEQ ID NO: 11584 - RNA, 19 nt, Artificial Sequence
  Synthetic
ccuuggucauucauuuauc

SEQ ID NO: 11585 - RNA, 19 nt, Artificial Sequence
  Synthetic
cuuggucauucauuuaucc

SEQ ID NO: 11586 - RNA, 19 nt, Artificial Sequence
  Synthetic
uuggucauucauuuauccu

SEQ ID NO: 11587 - RNA, 19 nt, Artificial Sequence
  Synthetic
uggucauucauuuauccuc

SEQ ID NO: 11588 - RNA, 19 nt, Artificial Sequence
  Synthetic
ggucauucauuuauccucu

SEQ ID NO: 11589 - RNA, 19 nt, Artificial Sequence
  Synthetic
gucauucauuuauccucug

SEQ ID NO: 11590 - RNA, 19 nt, Artificial Sequence
  Synthetic
ucauucauuuauccucugg

SEQ ID NO: 11591 - RNA, 19 nt, Artificial Sequence
  Synthetic
cauucauuuauccucuggu

SEQ ID NO: 11592 - RNA, 19 nt, Artificial Sequence
  Synthetic
auucauuuauccucuggug

SEQ ID NO: 11593 - RNA, 19 nt, Artificial Sequence
  Synthetic
uucauuuauccucuggugg

SEQ ID NO: 11594 - RNA, 19 nt, Artificial Sequence
  Synthetic
ucauuuauccucugguggg

SEQ ID NO: 11595 - RNA, 19 nt, Artificial Sequence
  Synthetic
cauuuauccucuggugggc

SEQ ID NO: 11596 - RNA, 19 nt, Artificial Sequence
  Synthetic
auuuauccucuggugggcu

SEQ ID NO: 11597 - RNA, 19 nt, Artificial Sequence
  Synthetic
uuuauccucuggugggcuc

SEQ ID NO: 11598 - RNA, 19 nt, Artificial Sequence
  Synthetic
uuauccucuggugggcuca

SEQ ID NO: 11599 - RNA, 19 nt, Artificial Sequence
  Synthetic
uauccucuggugggcucaa

SEQ ID NO: 11600 - RNA, 19 nt, Artificial Sequence
  Synthetic
auccucuggugggcucaaa

SEQ ID NO: 11601 - RNA, 19 nt, Artificial Sequence
  Synthetic
uccucuggugggcucaaau

SEQ ID NO: 11602 - RNA, 19 nt, Artificial Sequence
  Synthetic
ccucuggugggcucaaauu

SEQ ID NO: 11603 - RNA, 19 nt, Artificial Sequence
  Synthetic
cucuggugggcucaaauua

SEQ ID NO: 11604 - RNA, 19 nt, Artificial Sequence
  Synthetic
ucuggugggcucaaauuau

SEQ ID NO: 11605 - RNA, 19 nt, Artificial Sequence
  Synthetic
cuggugggcucaaauuauu

SEQ ID NO: 11606 - RNA, 19 nt, Artificial Sequence
  Synthetic
uggugggcucaaauuauuc

SEQ ID NO: 11607 - RNA, 19 nt, Artificial Sequence
  Synthetic
ggugggcucaaauuauuca

SEQ ID NO: 11608 - RNA, 19 nt, Artificial Sequence
  Synthetic
gugggcucaaauuauucau

SEQ ID NO: 11609 - RNA, 19 nt, Artificial Sequence
  Synthetic
ugggcucaaauuauucauc

SEQ ID NO: 11610 - RNA, 19 nt, Artificial Sequence
  Synthetic
gggcucaaauuauucauca

SEQ ID NO: 11611 - RNA, 19 nt, Artificial Sequence
  Synthetic
ggcucaaauuauucaucag

SEQ ID NO: 11612 - RNA, 19 nt, Artificial Sequence
  Synthetic
gcucaaauuauucaucagu

SEQ ID NO: 11613 - RNA, 19 nt, Artificial Sequence
  Synthetic
cucaaauuauucaucagua

SEQ ID NO: 11614 - RNA, 19 nt, Artificial Sequence
  Synthetic
ucaaauuauucaucaguaa

SEQ ID NO: 11615 - RNA, 19 nt, Artificial Sequence
  Synthetic
caaauuauucaucaguaaa

SEQ ID NO: 11616 - RNA, 19 nt, Artificial Sequence
  Synthetic
aaauuauucaucaguaaaa

SEQ ID NO: 11617 - RNA, 19 nt, Artificial Sequence
  Synthetic
aauuauucaucaguaaaau

SEQ ID NO: 11618 - RNA, 19 nt, Artificial Sequence
  Synthetic
auuauucaucaguaaaaua

SEQ ID NO: 11619 - RNA, 19 nt, Artificial Sequence
  Synthetic
uuauucaucaguaaaauaa

SEQ ID NO: 11620 - RNA, 19 nt, Artificial Sequence
  Synthetic
uauucaucaguaaaauaac

SEQ ID NO: 11621 - RNA, 19 nt, Artificial Sequence
  Synthetic
auucaucaguaaaauaacg

SEQ ID NO: 11622 - RNA, 19 nt, Artificial Sequence
  Synthetic
uucaucaguaaaauaacga

SEQ ID NO: 11623 - RNA, 19 nt, Artificial Sequence
  Synthetic
ucaucaguaaaauaacgag

SEQ ID NO: 11624 - RNA, 19 nt, Artificial Sequence
  Synthetic
caucaguaaaauaacgagc

SEQ ID NO: 11625 - RNA, 19 nt, Artificial Sequence
  Synthetic
aucaguaaaauaacgagcc

SEQ ID NO: 11626 - RNA, 19 nt, Artificial Sequence
  Synthetic
ucaguaaaauaacgagccu

SEQ ID NO: 11627 - RNA, 19 nt, Artificial Sequence
  Synthetic
caguaaaauaacgagccug

SEQ ID NO: 11628 - RNA, 19 nt, Artificial Sequence
  Synthetic
aguaaaauaacgagccugu

SEQ ID NO: 11629 - RNA, 19 nt, Artificial Sequence
  Synthetic
guaaaauaacgagccugua

SEQ ID NO: 11630 - RNA, 19 nt, Artificial Sequence
  Synthetic
uaaaauaacgagccuguac

SEQ ID NO: 11631 - RNA, 19 nt, Artificial Sequence
  Synthetic
aaaauaacgagccuguaca

SEQ ID NO: 11632 - RNA, 19 nt, Artificial Sequence
  Synthetic
aaauaacgagccuguacaa

SEQ ID NO: 11633 - RNA, 19 nt, Artificial Sequence
  Synthetic
aauaacgagccuguacaaa

SEQ ID NO: 11634 - RNA, 19 nt, Artificial Sequence
  Synthetic
auaacgagccuguacaaau

SEQ ID NO: 11635 - RNA, 19 nt, Artificial Sequence
  Synthetic
uaacgagccuguacaaaua

SEQ ID NO: 11636 - RNA, 19 nt, Artificial Sequence
  Synthetic
aacgagccuguacaaauaa

SEQ ID NO: 11637 - RNA, 19 nt, Artificial Sequence
  Synthetic
acgagccuguacaaauaaa

SEQ ID NO: 11638 - RNA, 19 nt, Artificial Sequence
  Synthetic
cgagccuguacaaauaaaa

SEQ ID NO: 11639 - RNA, 19 nt, Artificial Sequence
  Synthetic
gagccuguacaaauaaaau

SEQ ID NO: 11640 - RNA, 19 nt, Artificial Sequence
  Synthetic
agccuguacaaauaaaaug

SEQ ID NO: 11641 - RNA, 19 nt, Artificial Sequence
  Synthetic
gccuguacaaauaaaaugu

SEQ ID NO: 11642 - RNA, 19 nt, Artificial Sequence
  Synthetic
ccuguacaaauaaaaugua

SEQ ID NO: 11643 - RNA, 19 nt, Artificial Sequence
  Synthetic
cuguacaaauaaaauguaa

SEQ ID NO: 11644 - RNA, 19 nt, Artificial Sequence
  Synthetic
uguacaaauaaaauguaau

SEQ ID NO: 11645 - RNA, 19 nt, Artificial Sequence
  Synthetic
guacaaauaaaauguaauu

SEQ ID NO: 11646 - RNA, 19 nt, Artificial Sequence
  Synthetic
uacaaauaaaauguaauuu

SEQ ID NO: 11647 - RNA, 19 nt, Artificial Sequence
  Synthetic
acaaauaaaauguaauuuu

SEQ ID NO: 11648 - RNA, 19 nt, Artificial Sequence
  Synthetic
caaauaaaauguaauuuuu

SEQ ID NO: 11649 - RNA, 19 nt, Artificial Sequence
  Synthetic
aaauaaaauguaauuuuuu

SEQ ID NO: 11650 - RNA, 19 nt, Artificial Sequence
  Synthetic
aauaaaauguaauuuuuuu

SEQ ID NO: 11651 - RNA, 19 nt, Artificial Sequence
  Synthetic
auaaaauguaauuuuuuuc

SEQ ID NO: 11652 - RNA, 19 nt, Artificial Sequence
  Synthetic
uaaaauguaauuuuuuuca

SEQ ID NO: 11653 - RNA, 19 nt, Artificial Sequence
  Synthetic
aaaauguaauuuuuuucac

SEQ ID NO: 11654 - RNA, 19 nt, Artificial Sequence
  Synthetic
aaauguaauuuuuuucaca

SEQ ID NO: 11655 - RNA, 19 nt, Artificial Sequence
  Synthetic
aauguaauuuuuuucacau

SEQ ID NO: 11656 - RNA, 19 nt, Artificial Sequence
  Synthetic
auguaauuuuuuucacauc

SEQ ID NO: 11657 - RNA, 19 nt, Artificial Sequence
  Synthetic
uguaauuuuuuucacauca

SEQ ID NO: 11658 - RNA, 19 nt, Artificial Sequence
  Synthetic
guaauuuuuuucacaucag

SEQ ID NO: 11659 - RNA, 19 nt, Artificial Sequence
  Synthetic
uaauuuuuuucacaucaga

SEQ ID NO: 11660 - RNA, 19 nt, Artificial Sequence
  Synthetic
aauuuuuuucacaucagau

SEQ ID NO: 11661 - RNA, 19 nt, Artificial Sequence
  Synthetic
auuuuuuucacaucagaug

SEQ ID NO: 11662 - RNA, 19 nt, Artificial Sequence
  Synthetic
uuuuuuucacaucagaugg

SEQ ID NO: 11663 - RNA, 19 nt, Artificial Sequence
  Synthetic
uuuuuucacaucagauggg

SEQ ID NO: 11664 - RNA, 19 nt, Artificial Sequence
  Synthetic
uuuuucacaucagaugggu

SEQ ID NO: 11665 - RNA, 19 nt, Artificial Sequence
  Synthetic
uuuucacaucagaugggua

SEQ ID NO: 11666 - RNA, 19 nt, Artificial Sequence
  Synthetic
uuucacaucagauggguaa

SEQ ID NO: 11667 - RNA, 19 nt, Artificial Sequence
  Synthetic
uucacaucagauggguaac

SEQ ID NO: 11668 - RNA, 19 nt, Artificial Sequence
  Synthetic
ucacaucagauggguaacg

SEQ ID NO: 11669 - RNA, 19 nt, Artificial Sequence
  Synthetic
cacaucagauggguaacgu

SEQ ID NO: 11670 - RNA, 19 nt, Artificial Sequence
  Synthetic
acaucagauggguaacgug

SEQ ID NO: 11671 - RNA, 19 nt, Artificial Sequence
  Synthetic
caucagauggguaacgugc

SEQ ID NO: 11672 - RNA, 19 nt, Artificial Sequence
  Synthetic
aucagauggguaacgugcc

SEQ ID NO: 11673 - RNA, 19 nt, Artificial Sequence
  Synthetic
ucagauggguaacgugcca

SEQ ID NO: 11674 - RNA, 19 nt, Artificial Sequence
  Synthetic
cagauggguaacgugccaa

SEQ ID NO: 11675 - RNA, 19 nt, Artificial Sequence
  Synthetic
agauggguaacgugccaaa

SEQ ID NO: 11676 - RNA, 19 nt, Artificial Sequence
  Synthetic
gauggguaacgugccaaau

SEQ ID NO: 11677 - RNA, 19 nt, Artificial Sequence
  Synthetic
auggguaacgugccaaauc

SEQ ID NO: 11678 - RNA, 19 nt, Artificial Sequence
  Synthetic
uggguaacgugccaaauca

SEQ ID NO: 11679 - RNA, 19 nt, Artificial Sequence
  Synthetic
ggguaacgugccaaaucau

SEQ ID NO: 11680 - RNA, 19 nt, Artificial Sequence
  Synthetic
gguaacgugccaaaucaua

SEQ ID NO: 11681 - RNA, 19 nt, Artificial Sequence
  Synthetic
guaacgugccaaaucauaa

SEQ ID NO: 11682 - RNA, 19 nt, Artificial Sequence
  Synthetic
uaacgugccaaaucauaac

SEQ ID NO: 11683 - RNA, 19 nt, Artificial Sequence
  Synthetic
aacgugccaaaucauaaca

SEQ ID NO: 11684 - RNA, 19 nt, Artificial Sequence
  Synthetic
acgugccaaaucauaacaa

SEQ ID NO: 11685 - RNA, 19 nt, Artificial Sequence
  Synthetic
cgugccaaaucauaacaag

SEQ ID NO: 11686 - RNA, 19 nt, Artificial Sequence
  Synthetic
gugccaaaucauaacaagg

SEQ ID NO: 11687 - RNA, 19 nt, Artificial Sequence
  Synthetic
ugccaaaucauaacaaggu

SEQ ID NO: 11688 - RNA, 19 nt, Artificial Sequence
  Synthetic
gccaaaucauaacaagguu

SEQ ID NO: 11689 - RNA, 19 nt, Artificial Sequence
  Synthetic
ccaaaucauaacaagguuu

SEQ ID NO: 11690 - RNA, 19 nt, Artificial Sequence
  Synthetic
caaaucauaacaagguuug

SEQ ID NO: 11691 - RNA, 19 nt, Artificial Sequence
  Synthetic
aaaucauaacaagguuuga

SEQ ID NO: 11692 - RNA, 19 nt, Artificial Sequence
  Synthetic
aaucauaacaagguuugag

SEQ ID NO: 11693 - RNA, 19 nt, Artificial Sequence
  Synthetic
aucauaacaagguuugagc

SEQ ID NO: 11694 - RNA, 19 nt, Artificial Sequence
  Synthetic
ucauaacaagguuugagcg

SEQ ID NO: 11695 - RNA, 19 nt, Artificial Sequence
  Synthetic
cauaacaagguuugagcga

SEQ ID NO: 11696 - RNA, 19 nt, Artificial Sequence
  Synthetic
auaacaagguuugagcgag

SEQ ID NO: 11697 - RNA, 19 nt, Artificial Sequence
  Synthetic
uaacaagguuugagcgagg

SEQ ID NO: 11698 - RNA, 19 nt, Artificial Sequence
  Synthetic
aacaagguuugagcgaggc

SEQ ID NO: 11699 - RNA, 19 nt, Artificial Sequence
  Synthetic
acaagguuugagcgaggca

SEQ ID NO: 11700 - RNA, 19 nt, Artificial Sequence
  Synthetic
caagguuugagcgaggcac

SEQ ID NO: 11701 - RNA, 19 nt, Artificial Sequence
  Synthetic
aagguuugagcgaggcaca

SEQ ID NO: 11702 - RNA, 19 nt, Artificial Sequence
  Synthetic
agguuugagcgaggcacau

SEQ ID NO: 11703 - RNA, 19 nt, Artificial Sequence
  Synthetic
gguuugagcgaggcacauc

SEQ ID NO: 11704 - RNA, 19 nt, Artificial Sequence
  Synthetic
guuugagcgaggcacaucu

SEQ ID NO: 11705 - RNA, 19 nt, Artificial Sequence
  Synthetic
uuugagcgaggcacaucuc

SEQ ID NO: 11706 - RNA, 19 nt, Artificial Sequence
  Synthetic
uugagcgaggcacaucuca

SEQ ID NO: 11707 - RNA, 19 nt, Artificial Sequence
  Synthetic
ugagcgaggcacaucucac

SEQ ID NO: 11708 - RNA, 19 nt, Artificial Sequence
  Synthetic
gagcgaggcacaucucaca

SEQ ID NO: 11709 - RNA, 19 nt, Artificial Sequence
  Synthetic
agcgaggcacaucucacac

SEQ ID NO: 11710 - RNA, 19 nt, Artificial Sequence
  Synthetic
gcgaggcacaucucacaca

SEQ ID NO: 11711 - RNA, 19 nt, Artificial Sequence
  Synthetic
cgaggcacaucucacacau

SEQ ID NO: 11712 - RNA, 19 nt, Artificial Sequence
  Synthetic
gaggcacaucucacacaug

SEQ ID NO: 11713 - RNA, 19 nt, Artificial Sequence
  Synthetic
aggcacaucucacacaugg

SEQ ID NO: 11714 - RNA, 19 nt, Artificial Sequence
  Synthetic
ggcacaucucacacauggg

SEQ ID NO: 11715 - RNA, 19 nt, Artificial Sequence
  Synthetic
gcacaucucacacaugggc

SEQ ID NO: 11716 - RNA, 19 nt, Artificial Sequence
  Synthetic
cacaucucacacaugggca

SEQ ID NO: 11717 - RNA, 19 nt, Artificial Sequence
  Synthetic
acaucucacacaugggcau

SEQ ID NO: 11718 - RNA, 19 nt, Artificial Sequence
  Synthetic
caucucacacaugggcaug

SEQ ID NO: 11719 - RNA, 19 nt, Artificial Sequence
  Synthetic
aucucacacaugggcauga

SEQ ID NO: 11720 - RNA, 19 nt, Artificial Sequence
  Synthetic
ucucacacaugggcaugaa

SEQ ID NO: 11721 - RNA, 19 nt, Artificial Sequence
  Synthetic
cucacacaugggcaugaaa

SEQ ID NO: 11722 - RNA, 19 nt, Artificial Sequence
  Synthetic
ucacacaugggcaugaaaa

SEQ ID NO: 11723 - RNA, 19 nt, Artificial Sequence
  Synthetic
cacacaugggcaugaaaac

SEQ ID NO: 11724 - RNA, 19 nt, Artificial Sequence
  Synthetic
acacaugggcaugaaaacc

SEQ ID NO: 11725 - RNA, 19 nt, Artificial Sequence
  Synthetic
cacaugggcaugaaaaccc

SEQ ID NO: 11726 - RNA, 19 nt, Artificial Sequence
  Synthetic
acaugggcaugaaaaccca

SEQ ID NO: 11727 - RNA, 19 nt, Artificial Sequence
  Synthetic
caugggcaugaaaacccaa

SEQ ID NO: 11728 - RNA, 19 nt, Artificial Sequence
  Synthetic
augggcaugaaaacccaau

SEQ ID NO: 11729 - RNA, 19 nt, Artificial Sequence
  Synthetic
ugggcaugaaaacccaauc

SEQ ID NO: 11730 - RNA, 19 nt, Artificial Sequence
  Synthetic
gggcaugaaaacccaauca

SEQ ID NO: 11731 - RNA, 19 nt, Artificial Sequence
  Synthetic
ggcaugaaaacccaaucau

SEQ ID NO: 11732 - RNA, 19 nt, Artificial Sequence
  Synthetic
gcaugaaaacccaaucauc

SEQ ID NO: 11733 - RNA, 19 nt, Artificial Sequence
  Synthetic
caugaaaacccaaucaucg

SEQ ID NO: 11734 - RNA, 19 nt, Artificial Sequence
  Synthetic
augaaaacccaaucaucgc

SEQ ID NO: 11735 - RNA, 19 nt, Artificial Sequence
  Synthetic
ugaaaacccaaucaucgcu

SEQ ID NO: 11736 - RNA, 19 nt, Artificial Sequence
  Synthetic
gaaaacccaaucaucgcuu

SEQ ID NO: 11737 - RNA, 19 nt, Artificial Sequence
  Synthetic
aaaacccaaucaucgcuua

SEQ ID NO: 11738 - RNA, 19 nt, Artificial Sequence
  Synthetic
aaacccaaucaucgcuuau

SEQ ID NO: 11739 - RNA, 19 nt, Artificial Sequence
  Synthetic
aacccaaucaucgcuuaug

SEQ ID NO: 11740 - RNA, 19 nt, Artificial Sequence
  Synthetic
acccaaucaucgcuuauga

SEQ ID NO: 11741 - RNA, 19 nt, Artificial Sequence
  Synthetic
cccaaucaucgcuuaugaa

SEQ ID NO: 11742 - RNA, 19 nt, Artificial Sequence
  Synthetic
ccaaucaucgcuuaugaaa

SEQ ID NO: 11743 - RNA, 19 nt, Artificial Sequence
  Synthetic
caaucaucgcuuaugaaac

SEQ ID NO: 11744 - RNA, 19 nt, Artificial Sequence
  Synthetic
aaucaucgcuuaugaaacu

SEQ ID NO: 11745 - RNA, 19 nt, Artificial Sequence
  Synthetic
aucaucgcuuaugaaacua

SEQ ID NO: 11746 - RNA, 19 nt, Artificial Sequence
  Synthetic
ucaucgcuuaugaaacuaa

SEQ ID NO: 11747 - RNA, 19 nt, Artificial Sequence
  Synthetic
caucgcuuaugaaacuaac

SEQ ID NO: 11748 - RNA, 19 nt, Artificial Sequence
  Synthetic
aucgcuuaugaaacuaaca

SEQ ID NO: 11749 - RNA, 19 nt, Artificial Sequence
  Synthetic
ucgcuuaugaaacuaacau

SEQ ID NO: 11750 - RNA, 19 nt, Artificial Sequence
  Synthetic
cgcuuaugaaacuaacauu

SEQ ID NO: 11751 - RNA, 19 nt, Artificial Sequence
  Synthetic
gcuuaugaaacuaacauuu

SEQ ID NO: 11752 - RNA, 19 nt, Artificial Sequence
  Synthetic
cuuaugaaacuaacauuuc

SEQ ID NO: 11753 - RNA, 19 nt, Artificial Sequence
  Synthetic
uuaugaaacuaacauuuca

SEQ ID NO: 11754 - RNA, 19 nt, Artificial Sequence
  Synthetic
uaugaaacuaacauuucaa

SEQ ID NO: 11755 - RNA, 19 nt, Artificial Sequence
  Synthetic
augaaacuaacauuucaau

SEQ ID NO: 11756 - RNA, 19 nt, Artificial Sequence
  Synthetic
ugaaacuaacauuucaaua

SEQ ID NO: 11757 - RNA, 19 nt, Artificial Sequence
  Synthetic
gaaacuaacauuucaauag

SEQ ID NO: 11758 - RNA, 19 nt, Artificial Sequence
  Synthetic
aaacuaacauuucaauaga

SEQ ID NO: 11759 - RNA, 19 nt, Artificial Sequence
  Synthetic
aacuaacauuucaauagaa

SEQ ID NO: 11760 - RNA, 19 nt, Artificial Sequence
  Synthetic
acuaacauuucaauagaaa

SEQ ID NO: 11761 - RNA, 19 nt, Artificial Sequence
  Synthetic
cuaacauuucaauagaaau

SEQ ID NO: 11762 - RNA, 19 nt, Artificial Sequence
  Synthetic
uaacauuucaauagaaaua

SEQ ID NO: 11763 - RNA, 19 nt, Artificial Sequence
  Synthetic
aacauuucaauagaaauac

SEQ ID NO: 11764 - RNA, 19 nt, Artificial Sequence
  Synthetic
acauuucaauagaaauaca

SEQ ID NO: 11765 - RNA, 19 nt, Artificial Sequence
  Synthetic
cauuucaauagaaauacau

SEQ ID NO: 11766 - RNA, 19 nt, Artificial Sequence
  Synthetic
auuucaauagaaauacauu

SEQ ID NO: 11767 - RNA, 19 nt, Artificial Sequence
  Synthetic
uuucaauagaaauacauua

SEQ ID NO: 11768 - RNA, 19 nt, Artificial Sequence
  Synthetic
uucaauagaaauacauuau

SEQ ID NO: 11769 - RNA, 19 nt, Artificial Sequence
  Synthetic
ucaauagaaauacauuaug

SEQ ID NO: 11770 - RNA, 19 nt, Artificial Sequence
  Synthetic
caauagaaauacauuauga

SEQ ID NO: 11771 - RNA, 19 nt, Artificial Sequence
  Synthetic
aauagaaauacauuaugaa

SEQ ID NO: 11772 - RNA, 19 nt, Artificial Sequence
  Synthetic
auagaaauacauuaugaaa

SEQ ID NO: 11773 - RNA, 19 nt, Artificial Sequence
  Synthetic
uagaaauacauuaugaaag

SEQ ID NO: 11774 - RNA, 19 nt, Artificial Sequence
  Synthetic
agaaauacauuaugaaagu

SEQ ID NO: 11775 - RNA, 19 nt, Artificial Sequence
  Synthetic
gaaauacauuaugaaaguu

SEQ ID NO: 11776 - RNA, 19 nt, Artificial Sequence
  Synthetic
aaauacauuaugaaaguuc

SEQ ID NO: 11777 - RNA, 19 nt, Artificial Sequence
  Synthetic
aauacauuaugaaaguucu

SEQ ID NO: 11778 - RNA, 19 nt, Artificial Sequence
  Synthetic
auacauuaugaaaguucug

SEQ ID NO: 11779 - RNA, 19 nt, Artificial Sequence
  Synthetic
uacauuaugaaaguucugg

SEQ ID NO: 11780 - RNA, 19 nt, Artificial Sequence
  Synthetic
acauuaugaaaguucuggu

SEQ ID NO: 11781 - RNA, 19 nt, Artificial Sequence
  Synthetic
cauuaugaaaguucugguu

SEQ ID NO: 11782 - RNA, 19 nt, Artificial Sequence
  Synthetic
auuaugaaaguucugguuc

SEQ ID NO: 11783 - RNA, 19 nt, Artificial Sequence
  Synthetic
uuaugaaaguucugguucu

SEQ ID NO: 11784 - RNA, 19 nt, Artificial Sequence
  Synthetic
uaugaaaguucugguucua

SEQ ID NO: 11785 - RNA, 19 nt, Artificial Sequence
  Synthetic
augaaaguucugguucuaa

SEQ ID NO: 11786 - RNA, 19 nt, Artificial Sequence
  Synthetic
ugaaaguucugguucuaaa

SEQ ID NO: 11787 - RNA, 19 nt, Artificial Sequence
  Synthetic
gaaaguucugguucuaaau

SEQ ID NO: 11788 - RNA, 19 nt, Artificial Sequence
  Synthetic
aaaguucugguucuaaauc

SEQ ID NO: 11789 - RNA, 19 nt, Artificial Sequence
  Synthetic
aaguucugguucuaaaucc

SEQ ID NO: 11790 - RNA, 19 nt, Artificial Sequence
  Synthetic
aguucugguucuaaaucca

SEQ ID NO: 11791 - RNA, 19 nt, Artificial Sequence
  Synthetic
guucugguucuaaauccau

SEQ ID NO: 11792 - RNA, 19 nt, Artificial Sequence
  Synthetic
uucugguucuaaauccaua

SEQ ID NO: 11793 - RNA, 19 nt, Artificial Sequence
  Synthetic
ucugguucuaaauccauau

SEQ ID NO: 11794 - RNA, 19 nt, Artificial Sequence
  Synthetic
cugguucuaaauccauauu

SEQ ID NO: 11795 - RNA, 19 nt, Artificial Sequence
  Synthetic
ugguucuaaauccauauua

SEQ ID NO: 11796 - RNA, 19 nt, Artificial Sequence
  Synthetic
gguucuaaauccauauuau

SEQ ID NO: 11797 - RNA, 19 nt, Artificial Sequence
  Synthetic
guucuaaauccauauuauc

SEQ ID NO: 11798 - RNA, 19 nt, Artificial Sequence
  Synthetic
uucuaaauccauauuaucu

SEQ ID NO: 11799 - RNA, 19 nt, Artificial Sequence
  Synthetic
ucuaaauccauauuaucuu

SEQ ID NO: 11800 - RNA, 19 nt, Artificial Sequence
  Synthetic
cuaaauccauauuaucuug

SEQ ID NO: 11801 - RNA, 19 nt, Artificial Sequence
  Synthetic
uaaauccauauuaucuuga

SEQ ID NO: 11802 - RNA, 19 nt, Artificial Sequence
  Synthetic
aaauccauauuaucuugag

SEQ ID NO: 11803 - RNA, 19 nt, Artificial Sequence
  Synthetic
aauccauauuaucuugagg

SEQ ID NO: 11804 - RNA, 19 nt, Artificial Sequence
  Synthetic
auccauauuaucuugaggg

SEQ ID NO: 11805 - RNA, 19 nt, Artificial Sequence
  Synthetic
uccauauuaucuugagggc

SEQ ID NO: 11806 - RNA, 19 nt, Artificial Sequence
  Synthetic
ccauauuaucuugagggca

SEQ ID NO: 11807 - RNA, 19 nt, Artificial Sequence
  Synthetic
cauauuaucuugagggcau

SEQ ID NO: 11808 - RNA, 19 nt, Artificial Sequence
  Synthetic
auauuaucuugagggcaua

SEQ ID NO: 11809 - RNA, 19 nt, Artificial Sequence
  Synthetic
uauuaucuugagggcauau

SEQ ID NO: 11810 - RNA, 19 nt, Artificial Sequence
  Synthetic
auuaucuugagggcauauc

SEQ ID NO: 11811 - RNA, 19 nt, Artificial Sequence
  Synthetic
uuaucuugagggcauaucc

SEQ ID NO: 11812 - RNA, 19 nt, Artificial Sequence
  Synthetic
uaucuugagggcauaucca

SEQ ID NO: 11813 - RNA, 19 nt, Artificial Sequence
  Synthetic
aucuugagggcauauccac

SEQ ID NO: 11814 - RNA, 19 nt, Artificial Sequence
  Synthetic
ucuugagggcauauccacu

SEQ ID NO: 11815 - RNA, 19 nt, Artificial Sequence
  Synthetic
cuugagggcauauccacug

SEQ ID NO: 11816 - RNA, 19 nt, Artificial Sequence
  Synthetic
uugagggcauauccacuga

SEQ ID NO: 11817 - RNA, 19 nt, Artificial Sequence
  Synthetic
ugagggcauauccacugau

SEQ ID NO: 11818 - RNA, 19 nt, Artificial Sequence
  Synthetic
gagggcauauccacugaug

SEQ ID NO: 11819 - RNA, 19 nt, Artificial Sequence
  Synthetic
agggcauauccacugaugc

SEQ ID NO: 11820 - RNA, 19 nt, Artificial Sequence
  Synthetic
gggcauauccacugaugca

SEQ ID NO: 11821 - RNA, 19 nt, Artificial Sequence
  Synthetic
ggcauauccacugaugcaa

SEQ ID NO: 11822 - RNA, 19 nt, Artificial Sequence
  Synthetic
gcauauccacugaugcaau

SEQ ID NO: 11823 - RNA, 19 nt, Artificial Sequence
  Synthetic
cauauccacugaugcaaug

SEQ ID NO: 11824 - RNA, 19 nt, Artificial Sequence
  Synthetic
auauccacugaugcaaugg

SEQ ID NO: 11825 - RNA, 19 nt, Artificial Sequence
  Synthetic
uauccacugaugcaaugga

SEQ ID NO: 11826 - RNA, 19 nt, Artificial Sequence
  Synthetic
auccacugaugcaauggau

SEQ ID NO: 11827 - RNA, 19 nt, Artificial Sequence
  Synthetic
uccacugaugcaauggaua

SEQ ID NO: 11828 - RNA, 19 nt, Artificial Sequence
  Synthetic
ccacugaugcaauggauau

SEQ ID NO: 11829 - RNA, 19 nt, Artificial Sequence
  Synthetic
cacugaugcaauggauaug

SEQ ID NO: 11830 - RNA, 19 nt, Artificial Sequence
  Synthetic
acugaugcaauggauauga

SEQ ID NO: 11831 - RNA, 19 nt, Artificial Sequence
  Synthetic
cugaugcaauggauaugau

SEQ ID NO: 11832 - RNA, 19 nt, Artificial Sequence
  Synthetic
ugaugcaauggauaugauc

SEQ ID NO: 11833 - RNA, 19 nt, Artificial Sequence
  Synthetic
gaugcaauggauaugauca

SEQ ID NO: 11834 - RNA, 19 nt, Artificial Sequence
  Synthetic
augcaauggauaugaucau

SEQ ID NO: 11835 - RNA, 19 nt, Artificial Sequence
  Synthetic
ugcaauggauaugaucauu

SEQ ID NO: 11836 - RNA, 19 nt, Artificial Sequence
  Synthetic
gcaauggauaugaucauua

SEQ ID NO: 11837 - RNA, 19 nt, Artificial Sequence
  Synthetic
caauggauaugaucauuau

SEQ ID NO: 11838 - RNA, 19 nt, Artificial Sequence
  Synthetic
aauggauaugaucauuauu

SEQ ID NO: 11839 - RNA, 19 nt, Artificial Sequence
  Synthetic
auggauaugaucauuauuu

SEQ ID NO: 11840 - RNA, 19 nt, Artificial Sequence
  Synthetic
uggauaugaucauuauuug

SEQ ID NO: 11841 - RNA, 19 nt, Artificial Sequence
  Synthetic
ggauaugaucauuauuuga

SEQ ID NO: 11842 - RNA, 19 nt, Artificial Sequence
  Synthetic
gauaugaucauuauuugau

SEQ ID NO: 11843 - RNA, 19 nt, Artificial Sequence
  Synthetic
auaugaucauuauuugauu

SEQ ID NO: 11844 - RNA, 19 nt, Artificial Sequence
  Synthetic
uaugaucauuauuugauuu

SEQ ID NO: 11845 - RNA, 19 nt, Artificial Sequence
  Synthetic
augaucauuauuugauuug

SEQ ID NO: 11846 - RNA, 19 nt, Artificial Sequence
  Synthetic
ugaucauuauuugauuuga

SEQ ID NO: 11847 - RNA, 19 nt, Artificial Sequence
  Synthetic
gaucauuauuugauuugau

SEQ ID NO: 11848 - RNA, 19 nt, Artificial Sequence
  Synthetic
aucauuauuugauuugaua

SEQ ID NO: 11849 - RNA, 19 nt, Artificial Sequence
  Synthetic
ucauuauuugauuugauau

SEQ ID NO: 11850 - RNA, 19 nt, Artificial Sequence
  Synthetic
cauuauuugauuugauauc

SEQ ID NO: 11851 - RNA, 19 nt, Artificial Sequence
  Synthetic
auuauuugauuugauauca

SEQ ID NO: 11852 - RNA, 19 nt, Artificial Sequence
  Synthetic
uuauuugauuugauaucaa

SEQ ID NO: 11853 - RNA, 19 nt, Artificial Sequence
  Synthetic
uauuugauuugauaucaaa

SEQ ID NO: 11854 - RNA, 19 nt, Artificial Sequence
  Synthetic
auuugauuugauaucaaac

SEQ ID NO: 11855 - RNA, 19 nt, Artificial Sequence
  Synthetic
uuugauuugauaucaaacu

SEQ ID NO: 11856 - RNA, 19 nt, Artificial Sequence
  Synthetic
uugauuugauaucaaacua

SEQ ID NO: 11857 - RNA, 19 nt, Artificial Sequence
  Synthetic
ugauuugauaucaaacuaa

SEQ ID NO: 11858 - RNA, 19 nt, Artificial Sequence
  Synthetic
gauuugauaucaaacuaaa

SEQ ID NO: 11859 - RNA, 19 nt, Artificial Sequence
  Synthetic
auuugauaucaaacuaaaa

SEQ ID NO: 11860 - RNA, 19 nt, Artificial Sequence
  Synthetic
uuugauaucaaacuaaaac

SEQ ID NO: 11861 - RNA, 19 nt, Artificial Sequence
  Synthetic
uugauaucaaacuaaaacg

SEQ ID NO: 11862 - RNA, 19 nt, Artificial Sequence
  Synthetic
ugauaucaaacuaaaacga

SEQ ID NO: 11863 - RNA, 19 nt, Artificial Sequence
  Synthetic
gauaucaaacuaaaacgag

SEQ ID NO: 11864 - RNA, 19 nt, Artificial Sequence
  Synthetic
auaucaaacuaaaacgagu

SEQ ID NO: 11865 - RNA, 19 nt, Artificial Sequence
  Synthetic
uaucaaacuaaaacgagug

SEQ ID NO: 11866 - RNA, 19 nt, Artificial Sequence
  Synthetic
aucaaacuaaaacgaguga

SEQ ID NO: 11867 - RNA, 19 nt, Artificial Sequence
  Synthetic
ucaaacuaaaacgagugag

SEQ ID NO: 11868 - RNA, 19 nt, Artificial Sequence
  Synthetic
caaacuaaaacgagugaga

SEQ ID NO: 11869 - RNA, 19 nt, Artificial Sequence
  Synthetic
aaacuaaaacgagugagaa

SEQ ID NO: 11870 - RNA, 19 nt, Artificial Sequence
  Synthetic
aacuaaaacgagugagaaa

SEQ ID NO: 11871 - RNA, 19 nt, Artificial Sequence
  Synthetic
acuaaaacgagugagaaaa

SEQ ID NO: 11872 - RNA, 19 nt, Artificial Sequence
  Synthetic
cuaaaacgagugagaaaaa

SEQ ID NO: 11873 - RNA, 19 nt, Artificial Sequence
  Synthetic
uaaaacgagugagaaaaaa

SEQ ID NO: 11874 - RNA, 19 nt, Artificial Sequence
  Synthetic
aaaacgagugagaaaaaaa

SEQ ID NO: 11875 - RNA, 19 nt, Artificial Sequence
  Synthetic
aaacgagugagaaaaaaaa

SEQ ID NO: 11876 - RNA, 19 nt, Artificial Sequence
  Synthetic
aacgagugagaaaaaaaaa

SEQ ID NO: 11877 - RNA, 19 nt, Artificial Sequence
  Synthetic
acgagugagaaaaaaaaaa

SEQ ID NO: 11878 - RNA, 19 nt, Artificial Sequence
  Synthetic
cgagugagaaaaaaaaaaa

SEQ ID NO: 11879 - RNA, 19 nt, Artificial Sequence
  Synthetic
gagugagaaaaaaaaaaag

SEQ ID NO: 11880 - RNA, 19 nt, Artificial Sequence
  Synthetic
agugagaaaaaaaaaaaga

SEQ ID NO: 11881 - RNA, 19 nt, Artificial Sequence
  Synthetic
gugagaaaaaaaaaaagaa

SEQ ID NO: 11882 - RNA, 19 nt, Artificial Sequence
  Synthetic
ugagaaaaaaaaaaagaaa

SEQ ID NO: 11883 - RNA, 19 nt, Artificial Sequence
  Synthetic
gagaaaaaaaaaaagaaac

SEQ ID NO: 11884 - RNA, 19 nt, Artificial Sequence
  Synthetic
agaaaaaaaaaaagaaacc

SEQ ID NO: 11885 - RNA, 19 nt, Artificial Sequence
  Synthetic
gaaaaaaaaaaagaaaccc

SEQ ID NO: 11886 - RNA, 19 nt, Artificial Sequence
  Synthetic
aaaaaaaaaaagaaacccc

SEQ ID NO: 11887 - RNA, 19 nt, Artificial Sequence
  Synthetic
aaaaaaaaaagaaacccca

SEQ ID NO: 11888 - RNA, 19 nt, Artificial Sequence
  Synthetic
aaaaaaaaagaaaccccag

SEQ ID NO: 11889 - RNA, 19 nt, Artificial Sequence
  Synthetic
aaaaaaaagaaaccccaga

SEQ ID NO: 11890 - RNA, 19 nt, Artificial Sequence
  Synthetic
aaaaaaagaaaccccagaa

SEQ ID NO: 11891 - RNA, 19 nt, Artificial Sequence
  Synthetic
aaaaaagaaaccccagaau

SEQ ID NO: 11892 - RNA, 19 nt, Artificial Sequence
  Synthetic
aaaaagaaaccccagaaua

SEQ ID NO: 11893 - RNA, 19 nt, Artificial Sequence
  Synthetic
aaaagaaaccccagaauau

SEQ ID NO: 11894 - RNA, 19 nt, Artificial Sequence
  Synthetic
aaagaaaccccagaauaug

SEQ ID NO: 11895 - RNA, 19 nt, Artificial Sequence
  Synthetic
aagaaaccccagaauaugu

SEQ ID NO: 11896 - RNA, 19 nt, Artificial Sequence
  Synthetic
agaaaccccagaauauguu

SEQ ID NO: 11897 - RNA, 19 nt, Artificial Sequence
  Synthetic
gaaaccccagaauauguua

SEQ ID NO: 11898 - RNA, 19 nt, Artificial Sequence
  Synthetic
aaaccccagaauauguuac

SEQ ID NO: 11899 - RNA, 19 nt, Artificial Sequence
  Synthetic
aaccccagaauauguuaca

SEQ ID NO: 11900 - RNA, 19 nt, Artificial Sequence
  Synthetic
accccagaauauguuacag

SEQ ID NO: 11901 - RNA, 19 nt, Artificial Sequence
  Synthetic
ccccagaauauguuacagu

SEQ ID NO: 11902 - RNA, 19 nt, Artificial Sequence
  Synthetic
cccagaauauguuacaguu

SEQ ID NO: 11903 - RNA, 19 nt, Artificial Sequence
  Synthetic
ccagaauauguuacaguug

SEQ ID NO: 11904 - RNA, 19 nt, Artificial Sequence
  Synthetic
cagaauauguuacaguugu

SEQ ID NO: 11905 - RNA, 19 nt, Artificial Sequence
  Synthetic
agaauauguuacaguuguu

SEQ ID NO: 11906 - RNA, 19 nt, Artificial Sequence
  Synthetic
gaauauguuacaguuguuu

SEQ ID NO: 11907 - RNA, 19 nt, Artificial Sequence
  Synthetic
aauauguuacaguuguuuu

SEQ ID NO: 11908 - RNA, 19 nt, Artificial Sequence
  Synthetic
auauguuacaguuguuuuu

SEQ ID NO: 11909 - RNA, 19 nt, Artificial Sequence
  Synthetic
uauguuacaguuguuuuua

SEQ ID NO: 11910 - RNA, 19 nt, Artificial Sequence
  Synthetic
auguuacaguuguuuuuau

SEQ ID NO: 11911 - RNA, 19 nt, Artificial Sequence
  Synthetic
uguuacaguuguuuuuauu

SEQ ID NO: 11912 - RNA, 19 nt, Artificial Sequence
  Synthetic
guuacaguuguuuuuauuc

SEQ ID NO: 11913 - RNA, 19 nt, Artificial Sequence
  Synthetic
uuacaguuguuuuuauucc

SEQ ID NO: 11914 - RNA, 19 nt, Artificial Sequence
  Synthetic
uacaguuguuuuuauucca

SEQ ID NO: 11915 - RNA, 19 nt, Artificial Sequence
  Synthetic
acaguuguuuuuauuccaa

SEQ ID NO: 11916 - RNA, 19 nt, Artificial Sequence
  Synthetic
caguuguuuuuauuccaac

SEQ ID NO: 11917 - RNA, 19 nt, Artificial Sequence
  Synthetic
aguuguuuuuauuccaacu

SEQ ID NO: 11918 - RNA, 19 nt, Artificial Sequence
  Synthetic
guuguuuuuauuccaacug

SEQ ID NO: 11919 - RNA, 19 nt, Artificial Sequence
  Synthetic
uuguuuuuauuccaacuga

SEQ ID NO: 11920 - RNA, 19 nt, Artificial Sequence
  Synthetic
uguuuuuauuccaacugaa

SEQ ID NO: 11921 - RNA, 19 nt, Artificial Sequence
  Synthetic
guuuuuauuccaacugaaa

SEQ ID NO: 11922 - RNA, 19 nt, Artificial Sequence
  Synthetic
uuuuuauuccaacugaaaa

SEQ ID NO: 11923 - RNA, 19 nt, Artificial Sequence
  Synthetic
uuuuauuccaacugaaaau

SEQ ID NO: 11924 - RNA, 19 nt, Artificial Sequence
  Synthetic
uuuauuccaacugaaaauu

SEQ ID NO: 11925 - RNA, 19 nt, Artificial Sequence
  Synthetic
uuauuccaacugaaaauug

SEQ ID NO: 11926 - RNA, 19 nt, Artificial Sequence
  Synthetic
uauuccaacugaaaauuga

SEQ ID NO: 11927 - RNA, 19 nt, Artificial Sequence
  Synthetic
auuccaacugaaaauugag

SEQ ID NO: 11928 - RNA, 19 nt, Artificial Sequence
  Synthetic
uuccaacugaaaauugagu

SEQ ID NO: 11929 - RNA, 19 nt, Artificial Sequence
  Synthetic
uccaacugaaaauugagua

SEQ ID NO: 11930 - RNA, 19 nt, Artificial Sequence
  Synthetic
ccaacugaaaauugaguaa

SEQ ID NO: 11931 - RNA, 19 nt, Artificial Sequence
  Synthetic
caacugaaaauugaguaag

SEQ ID NO: 11932 - RNA, 19 nt, Artificial Sequence
  Synthetic
aacugaaaauugaguaagg

SEQ ID NO: 11933 - RNA, 19 nt, Artificial Sequence
  Synthetic
acugaaaauugaguaaggg

SEQ ID NO: 11934 - RNA, 19 nt, Artificial Sequence
  Synthetic
cugaaaauugaguaagggu

SEQ ID NO: 11935 - RNA, 19 nt, Artificial Sequence
  Synthetic
ugaaaauugaguaagggua

SEQ ID NO: 11936 - RNA, 19 nt, Artificial Sequence
  Synthetic
gaaaauugaguaaggguaa

SEQ ID NO: 11937 - RNA, 19 nt, Artificial Sequence
  Synthetic
aaaauugaguaaggguaac

SEQ ID NO: 11938 - RNA, 19 nt, Artificial Sequence
  Synthetic
aaauugaguaaggguaacu

SEQ ID NO: 11939 - RNA, 19 nt, Artificial Sequence
  Synthetic
aauugaguaaggguaacuc

SEQ ID NO: 11940 - RNA, 19 nt, Artificial Sequence
  Synthetic
auugaguaaggguaacucu

SEQ ID NO: 11941 - RNA, 19 nt, Artificial Sequence
  Synthetic
uugaguaaggguaacucuu

SEQ ID NO: 11942 - RNA, 19 nt, Artificial Sequence
  Synthetic
ugaguaaggguaacucuuc

SEQ ID NO: 11943 - RNA, 19 nt, Artificial Sequence
  Synthetic
gaguaaggguaacucuuca

SEQ ID NO: 11944 - RNA, 19 nt, Artificial Sequence
  Synthetic
aguaaggguaacucuucac

SEQ ID NO: 11945 - RNA, 19 nt, Artificial Sequence
  Synthetic
guaaggguaacucuucacu

SEQ ID NO: 11946 - RNA, 19 nt, Artificial Sequence
  Synthetic
uaaggguaacucuucacuu

SEQ ID NO: 11947 - RNA, 19 nt, Artificial Sequence
  Synthetic
aaggguaacucuucacuuu

SEQ ID NO: 11948 - RNA, 19 nt, Artificial Sequence
  Synthetic
aggguaacucuucacuuua

SEQ ID NO: 11949 - RNA, 19 nt, Artificial Sequence
  Synthetic
ggguaacucuucacuuuaa

SEQ ID NO: 11950 - RNA, 19 nt, Artificial Sequence
  Synthetic
gguaacucuucacuuuaac

SEQ ID NO: 11951 - RNA, 19 nt, Artificial Sequence
  Synthetic
guaacucuucacuuuaacg

SEQ ID NO: 11952 - RNA, 19 nt, Artificial Sequence
  Synthetic
uaacucuucacuuuaacgu

SEQ ID NO: 11953 - RNA, 19 nt, Artificial Sequence
  Synthetic
aacucuucacuuuaacgua

SEQ ID NO: 11954 - RNA, 19 nt, Artificial Sequence
  Synthetic
acucuucacuuuaacguac

SEQ ID NO: 11955 - RNA, 19 nt, Artificial Sequence
  Synthetic
cucuucacuuuaacguacc

SEQ ID NO: 11956 - RNA, 19 nt, Artificial Sequence
  Synthetic
ucuucacuuuaacguaccu

SEQ ID NO: 11957 - RNA, 19 nt, Artificial Sequence
  Synthetic
cuucacuuuaacguaccua

SEQ ID NO: 11958 - RNA, 19 nt, Artificial Sequence
  Synthetic
uucacuuuaacguaccuag

SEQ ID NO: 11959 - RNA, 19 nt, Artificial Sequence
  Synthetic
ucacuuuaacguaccuaga

SEQ ID NO: 11960 - RNA, 19 nt, Artificial Sequence
  Synthetic
cacuuuaacguaccuagaa

SEQ ID NO: 11961 - RNA, 19 nt, Artificial Sequence
  Synthetic
acuuuaacguaccuagaaa

SEQ ID NO: 11962 - RNA, 19 nt, Artificial Sequence
  Synthetic
cuuuaacguaccuagaaau

SEQ ID NO: 11963 - RNA, 19 nt, Artificial Sequence
  Synthetic
uuuaacguaccuagaaaug

SEQ ID NO: 11964 - RNA, 19 nt, Artificial Sequence
  Synthetic
uuaacguaccuagaaauga

SEQ ID NO: 11965 - RNA, 19 nt, Artificial Sequence
  Synthetic
uaacguaccuagaaaugau

SEQ ID NO: 11966 - RNA, 19 nt, Artificial Sequence
  Synthetic
aacguaccuagaaaugaua

SEQ ID NO: 11967 - RNA, 19 nt, Artificial Sequence
  Synthetic
acguaccuagaaaugauau

SEQ ID NO: 11968 - RNA, 19 nt, Artificial Sequence
  Synthetic
cguaccuagaaaugauauc

SEQ ID NO: 11969 - RNA, 19 nt, Artificial Sequence
  Synthetic
guaccuagaaaugauaucu

SEQ ID NO: 11970 - RNA, 19 nt, Artificial Sequence
  Synthetic
uaccuagaaaugauaucuc

SEQ ID NO: 11971 - RNA, 19 nt, Artificial Sequence
  Synthetic
accuagaaaugauaucucc

SEQ ID NO: 11972 - RNA, 19 nt, Artificial Sequence
  Synthetic
ccuagaaaugauaucuccu

SEQ ID NO: 11973 - RNA, 19 nt, Artificial Sequence
  Synthetic
cuagaaaugauaucuccuu

SEQ ID NO: 11974 - RNA, 19 nt, Artificial Sequence
  Synthetic
uagaaaugauaucuccuug

SEQ ID NO: 11975 - RNA, 19 nt, Artificial Sequence
  Synthetic
agaaaugauaucuccuugc

SEQ ID NO: 11976 - RNA, 19 nt, Artificial Sequence
  Synthetic
gaaaugauaucuccuugca

SEQ ID NO: 11977 - RNA, 19 nt, Artificial Sequence
  Synthetic
aaaugauaucuccuugcau

SEQ ID NO: 11978 - RNA, 19 nt, Artificial Sequence
  Synthetic
aaugauaucuccuugcaua

SEQ ID NO: 11979 - RNA, 19 nt, Artificial Sequence
  Synthetic
augauaucuccuugcauaa

SEQ ID NO: 11980 - RNA, 19 nt, Artificial Sequence
  Synthetic
ugauaucuccuugcauaau

SEQ ID NO: 11981 - RNA, 19 nt, Artificial Sequence
  Synthetic
gauaucuccuugcauaauu

SEQ ID NO: 11982 - RNA, 19 nt, Artificial Sequence
  Synthetic
auaucuccuugcauaauua

SEQ ID NO: 11983 - RNA, 19 nt, Artificial Sequence
  Synthetic
uaucuccuugcauaauuag

SEQ ID NO: 11984 - RNA, 19 nt, Artificial Sequence
  Synthetic
aucuccuugcauaauuagu

SEQ ID NO: 11985 - RNA, 19 nt, Artificial Sequence
  Synthetic
ucuccuugcauaauuaguc

SEQ ID NO: 11986 - RNA, 19 nt, Artificial Sequence
  Synthetic
cuccuugcauaauuaguca

SEQ ID NO: 11987 - RNA, 19 nt, Artificial Sequence
  Synthetic
uccuugcauaauuagucau

SEQ ID NO: 11988 - RNA, 19 nt, Artificial Sequence
  Synthetic
ccuugcauaauuagucauu

SEQ ID NO: 11989 - RNA, 19 nt, Artificial Sequence
  Synthetic
cuugcauaauuagucauuu

SEQ ID NO: 11990 - RNA, 19 nt, Artificial Sequence
  Synthetic
uugcauaauuagucauuua

SEQ ID NO: 11991 - RNA, 19 nt, Artificial Sequence
  Synthetic
ugcauaauuagucauuuaa

SEQ ID NO: 11992 - RNA, 19 nt, Artificial Sequence
  Synthetic
gcauaauuagucauuuaac

SEQ ID NO: 11993 - RNA, 19 nt, Artificial Sequence
  Synthetic
cauaauuagucauuuaaca

SEQ ID NO: 11994 - RNA, 19 nt, Artificial Sequence
  Synthetic
auaauuagucauuuaacag

SEQ ID NO: 11995 - RNA, 19 nt, Artificial Sequence
  Synthetic
uaauuagucauuuaacaga

SEQ ID NO: 11996 - RNA, 19 nt, Artificial Sequence
  Synthetic
aauuagucauuuaacagag

SEQ ID NO: 11997 - RNA, 19 nt, Artificial Sequence
  Synthetic
auuagucauuuaacagagc

SEQ ID NO: 11998 - RNA, 19 nt, Artificial Sequence
  Synthetic
uuagucauuuaacagagcc

SEQ ID NO: 11999 - RNA, 19 nt, Artificial Sequence
  Synthetic
uagucauuuaacagagcca

SEQ ID NO: 12000 - RNA, 19 nt, Artificial Sequence
  Synthetic
agucauuuaacagagccag

SEQ ID NO: 12001 - RNA, 19 nt, Artificial Sequence
  Synthetic
gucauuuaacagagccagc

SEQ ID NO: 12002 - RNA, 19 nt, Artificial Sequence
  Synthetic
ucauuuaacagagccagca

SEQ ID NO: 12003 - RNA, 19 nt, Artificial Sequence
  Synthetic
cauuuaacagagccagcaa

SEQ ID NO: 12004 - RNA, 19 nt, Artificial Sequence
  Synthetic
auuuaacagagccagcaac

SEQ ID NO: 12005 - RNA, 19 nt, Artificial Sequence
  Synthetic
uuuaacagagccagcaacc

SEQ ID NO: 12006 - RNA, 19 nt, Artificial Sequence
  Synthetic
uuaacagagccagcaacca

SEQ ID NO: 12007 - RNA, 19 nt, Artificial Sequence
  Synthetic
uaacagagccagcaaccau

SEQ ID NO: 12008 - RNA, 19 nt, Artificial Sequence
  Synthetic
aacagagccagcaaccauc

SEQ ID NO: 12009 - RNA, 19 nt, Artificial Sequence
  Synthetic
acagagccagcaaccaucc

SEQ ID NO: 12010 - RNA, 19 nt, Artificial Sequence
  Synthetic
cagagccagcaaccaucca

SEQ ID NO: 12011 - RNA, 19 nt, Artificial Sequence
  Synthetic
agagccagcaaccauccag

SEQ ID NO: 12012 - RNA, 19 nt, Artificial Sequence
  Synthetic
gagccagcaaccauccagg

SEQ ID NO: 12013 - RNA, 19 nt, Artificial Sequence
  Synthetic
agccagcaaccauccagga

SEQ ID NO: 12014 - RNA, 19 nt, Artificial Sequence
  Synthetic
gccagcaaccauccaggag

SEQ ID NO: 12015 - RNA, 19 nt, Artificial Sequence
  Synthetic
ccagcaaccauccaggagc

SEQ ID NO: 12016 - RNA, 19 nt, Artificial Sequence
  Synthetic
cagcaaccauccaggagcu

SEQ ID NO: 12017 - RNA, 19 nt, Artificial Sequence
  Synthetic
agcaaccauccaggagcuu

SEQ ID NO: 12018 - RNA, 19 nt, Artificial Sequence
  Synthetic
gcaaccauccaggagcuug

SEQ ID NO: 12019 - RNA, 19 nt, Artificial Sequence
  Synthetic
caaccauccaggagcuugg

SEQ ID NO: 12020 - RNA, 19 nt, Artificial Sequence
  Synthetic
aaccauccaggagcuuggc

SEQ ID NO: 12021 - RNA, 19 nt, Artificial Sequence
  Synthetic
accauccaggagcuuggcu

SEQ ID NO: 12022 - RNA, 19 nt, Artificial Sequence
  Synthetic
ccauccaggagcuuggcuu

SEQ ID NO: 12023 - RNA, 19 nt, Artificial Sequence
  Synthetic
cauccaggagcuuggcuug

SEQ ID NO: 12024 - RNA, 19 nt, Artificial Sequence
  Synthetic
auccaggagcuuggcuugg

SEQ ID NO: 12025 - RNA, 19 nt, Artificial Sequence
  Synthetic
uccaggagcuuggcuuggu

SEQ ID NO: 12026 - RNA, 19 nt, Artificial Sequence
  Synthetic
ccaggagcuuggcuuggug

SEQ ID NO: 12027 - RNA, 19 nt, Artificial Sequence
  Synthetic
caggagcuuggcuuggugu

SEQ ID NO: 12028 - RNA, 19 nt, Artificial Sequence
  Synthetic
aggagcuuggcuugguguc

SEQ ID NO: 12029 - RNA, 19 nt, Artificial Sequence
  Synthetic
ggagcuuggcuugguguca

SEQ ID NO: 12030 - RNA, 19 nt, Artificial Sequence
  Synthetic
gagcuuggcuuggugucau

SEQ ID NO: 12031 - RNA, 19 nt, Artificial Sequence
  Synthetic
agcuuggcuuggugucaua

SEQ ID NO: 12032 - RNA, 19 nt, Artificial Sequence
  Synthetic
gcuuggcuuggugucauaa

SEQ ID NO: 12033 - RNA, 19 nt, Artificial Sequence
  Synthetic
cuuggcuuggugucauaag

SEQ ID NO: 12034 - RNA, 19 nt, Artificial Sequence
  Synthetic
uuggcuuggugucauaaga

SEQ ID NO: 12035 - RNA, 19 nt, Artificial Sequence
  Synthetic
uggcuuggugucauaagac

SEQ ID NO: 12036 - RNA, 19 nt, Artificial Sequence
  Synthetic
ggcuuggugucauaagaca

SEQ ID NO: 12037 - RNA, 19 nt, Artificial Sequence
  Synthetic
gcuuggugucauaagacau

SEQ ID NO: 12038 - RNA, 19 nt, Artificial Sequence
  Synthetic
cuuggugucauaagacaug

SEQ ID NO: 12039 - RNA, 19 nt, Artificial Sequence
  Synthetic
uuggugucauaagacaugu

SEQ ID NO: 12040 - RNA, 19 nt, Artificial Sequence
  Synthetic
uggugucauaagacaugug

SEQ ID NO: 12041 - RNA, 19 nt, Artificial Sequence
  Synthetic
ggugucauaagacaugugu

SEQ ID NO: 12042 - RNA, 19 nt, Artificial Sequence
  Synthetic
gugucauaagacaugugua

SEQ ID NO: 12043 - RNA, 19 nt, Artificial Sequence
  Synthetic
ugucauaagacauguguaa

SEQ ID NO: 12044 - RNA, 19 nt, Artificial Sequence
  Synthetic
gucauaagacauguguaag

SEQ ID NO: 12045 - RNA, 19 nt, Artificial Sequence
  Synthetic
ucauaagacauguguaagu

SEQ ID NO: 12046 - RNA, 19 nt, Artificial Sequence
  Synthetic
cauaagacauguguaagua

SEQ ID NO: 12047 - RNA, 19 nt, Artificial Sequence
  Synthetic
auaagacauguguaaguag

SEQ ID NO: 12048 - RNA, 19 nt, Artificial Sequence
  Synthetic
uaagacauguguaaguagc

SEQ ID NO: 12049 - RNA, 19 nt, Artificial Sequence
  Synthetic
aagacauguguaaguagca

SEQ ID NO: 12050 - RNA, 19 nt, Artificial Sequence
  Synthetic
agacauguguaaguagcaa

SEQ ID NO: 12051 - RNA, 19 nt, Artificial Sequence
  Synthetic
gacauguguaaguagcaaa

SEQ ID NO: 12052 - RNA, 19 nt, Artificial Sequence
  Synthetic
acauguguaaguagcaaag

SEQ ID NO: 12053 - RNA, 19 nt, Artificial Sequence
  Synthetic
cauguguaaguagcaaagc

SEQ ID NO: 12054 - RNA, 19 nt, Artificial Sequence
  Synthetic
auguguaaguagcaaagca

SEQ ID NO: 12055 - RNA, 19 nt, Artificial Sequence
  Synthetic
uguguaaguagcaaagcac

SEQ ID NO: 12056 - RNA, 19 nt, Artificial Sequence
  Synthetic
guguaaguagcaaagcacu

SEQ ID NO: 12057 - RNA, 19 nt, Artificial Sequence
  Synthetic
uguaaguagcaaagcacug

SEQ ID NO: 12058 - RNA, 19 nt, Artificial Sequence
  Synthetic
guaaguagcaaagcacugu

SEQ ID NO: 12059 - RNA, 19 nt, Artificial Sequence
  Synthetic
uaaguagcaaagcacuguc

SEQ ID NO: 12060 - RNA, 19 nt, Artificial Sequence
  Synthetic
aaguagcaaagcacugucu

SEQ ID NO: 12061 - RNA, 19 nt, Artificial Sequence
  Synthetic
aguagcaaagcacugucug

SEQ ID NO: 12062 - RNA, 19 nt, Artificial Sequence
  Synthetic
guagcaaagcacugucugg

SEQ ID NO: 12063 - RNA, 19 nt, Artificial Sequence
  Synthetic
uagcaaagcacugucuggu

SEQ ID NO: 12064 - RNA, 19 nt, Artificial Sequence
  Synthetic
agcaaagcacugucugguu

SEQ ID NO: 12065 - RNA, 19 nt, Artificial Sequence
  Synthetic
gcaaagcacugucugguuu

SEQ ID NO: 12066 - RNA, 19 nt, Artificial Sequence
  Synthetic
caaagcacugucugguuuu

SEQ ID NO: 12067 - RNA, 19 nt, Artificial Sequence
  Synthetic
aaagcacugucugguuuug

SEQ ID NO: 12068 - RNA, 19 nt, Artificial Sequence
  Synthetic
aagcacugucugguuuuga

SEQ ID NO: 12069 - RNA, 19 nt, Artificial Sequence
  Synthetic
agcacugucugguuuugaa

SEQ ID NO: 12070 - RNA, 19 nt, Artificial Sequence
  Synthetic
gcacugucugguuuugaaa

SEQ ID NO: 12071 - RNA, 19 nt, Artificial Sequence
  Synthetic
cacugucugguuuugaaau

SEQ ID NO: 12072 - RNA, 19 nt, Artificial Sequence
  Synthetic
acugucugguuuugaaauc

SEQ ID NO: 12073 - RNA, 19 nt, Artificial Sequence
  Synthetic
cugucugguuuugaaaucu

SEQ ID NO: 12074 - RNA, 19 nt, Artificial Sequence
  Synthetic
ugucugguuuugaaaucuc

SEQ ID NO: 12075 - RNA, 19 nt, Artificial Sequence
  Synthetic
gucugguuuugaaaucuca

SEQ ID NO: 12076 - RNA, 19 nt, Artificial Sequence
  Synthetic
ucugguuuugaaaucucaa

SEQ ID NO: 12077 - RNA, 19 nt, Artificial Sequence
  Synthetic
cugguuuugaaaucucaaa

SEQ ID NO: 12078 - RNA, 19 nt, Artificial Sequence
  Synthetic
ugguuuugaaaucucaaaa

SEQ ID NO: 12079 - RNA, 19 nt, Artificial Sequence
  Synthetic
gguuuugaaaucucaaaac

SEQ ID NO: 12080 - RNA, 19 nt, Artificial Sequence
  Synthetic
guuuugaaaucucaaaacc

SEQ ID NO: 12081 - RNA, 19 nt, Artificial Sequence
  Synthetic
uuuugaaaucucaaaacca

SEQ ID NO: 12082 - RNA, 19 nt, Artificial Sequence
  Synthetic
uuugaaaucucaaaaccau

SEQ ID NO: 12083 - RNA, 19 nt, Artificial Sequence
  Synthetic
uugaaaucucaaaaccaug

SEQ ID NO: 12084 - RNA, 19 nt, Artificial Sequence
  Synthetic
ugaaaucucaaaaccauga

SEQ ID NO: 12085 - RNA, 19 nt, Artificial Sequence
  Synthetic
gaaaucucaaaaccaugag

SEQ ID NO: 12086 - RNA, 19 nt, Artificial Sequence
  Synthetic
aaaucucaaaaccaugagu

SEQ ID NO: 12087 - RNA, 19 nt, Artificial Sequence
  Synthetic
aaucucaaaaccaugagua

SEQ ID NO: 12088 - RNA, 19 nt, Artificial Sequence
  Synthetic
aucucaaaaccaugaguau

SEQ ID NO: 12089 - RNA, 19 nt, Artificial Sequence
  Synthetic
ucucaaaaccaugaguauu

SEQ ID NO: 12090 - RNA, 19 nt, Artificial Sequence
  Synthetic
cucaaaaccaugaguauug

SEQ ID NO: 12091 - RNA, 19 nt, Artificial Sequence
  Synthetic
ucaaaaccaugaguauuga

SEQ ID NO: 12092 - RNA, 19 nt, Artificial Sequence
  Synthetic
caaaaccaugaguauugaa

SEQ ID NO: 12093 - RNA, 19 nt, Artificial Sequence
  Synthetic
aaaaccaugaguauugaaa

SEQ ID NO: 12094 - RNA, 19 nt, Artificial Sequence
  Synthetic
aaaccaugaguauugaaau

SEQ ID NO: 12095 - RNA, 19 nt, Artificial Sequence
  Synthetic
aaccaugaguauugaaaug

SEQ ID NO: 12096 - RNA, 19 nt, Artificial Sequence
  Synthetic
accaugaguauugaaaugu

SEQ ID NO: 12097 - RNA, 19 nt, Artificial Sequence
  Synthetic
ccaugaguauugaaauguu

SEQ ID NO: 12098 - RNA, 19 nt, Artificial Sequence
  Synthetic
caugaguauugaaauguug

SEQ ID NO: 12099 - RNA, 19 nt, Artificial Sequence
  Synthetic
augaguauugaaauguugu

SEQ ID NO: 12100 - RNA, 19 nt, Artificial Sequence
  Synthetic
ugaguauugaaauguugua

SEQ ID NO: 12101 - RNA, 19 nt, Artificial Sequence
  Synthetic
gaguauugaaauguuguau

SEQ ID NO: 12102 - RNA, 19 nt, Artificial Sequence
  Synthetic
aguauugaaauguuguauu

SEQ ID NO: 12103 - RNA, 19 nt, Artificial Sequence
  Synthetic
guauugaaauguuguauuu

SEQ ID NO: 12104 - RNA, 19 nt, Artificial Sequence
  Synthetic
uauugaaauguuguauuug

SEQ ID NO: 12105 - RNA, 19 nt, Artificial Sequence
  Synthetic
auugaaauguuguauuuga

SEQ ID NO: 12106 - RNA, 19 nt, Artificial Sequence
  Synthetic
uugaaauguuguauuugag

SEQ ID NO: 12107 - RNA, 19 nt, Artificial Sequence
  Synthetic
ugaaauguuguauuugagu

SEQ ID NO: 12108 - RNA, 19 nt, Artificial Sequence
  Synthetic
gaaauguuguauuugagug

SEQ ID NO: 12109 - RNA, 19 nt, Artificial Sequence
  Synthetic
aaauguuguauuugagugu

SEQ ID NO: 12110 - RNA, 19 nt, Artificial Sequence
  Synthetic
aauguuguauuugaguguu

SEQ ID NO: 12111 - RNA, 19 nt, Artificial Sequence
  Synthetic
auguuguauuugaguguuu

SEQ ID NO: 12112 - RNA, 19 nt, Artificial Sequence
  Synthetic
uguuguauuugaguguuua

SEQ ID NO: 12113 - RNA, 19 nt, Artificial Sequence
  Synthetic
guuguauuugaguguuuaa

SEQ ID NO: 12114 - RNA, 19 nt, Artificial Sequence
  Synthetic
uuguauuugaguguuuaau

SEQ ID NO: 12115 - RNA, 19 nt, Artificial Sequence
  Synthetic
uguauuugaguguuuaaug

SEQ ID NO: 12116 - RNA, 19 nt, Artificial Sequence
  Synthetic
guauuugaguguuuaauga

SEQ ID NO: 12117 - RNA, 19 nt, Artificial Sequence
  Synthetic
uauuugaguguuuaaugag

SEQ ID NO: 12118 - RNA, 19 nt, Artificial Sequence
  Synthetic
auuugaguguuuaaugaga

SEQ ID NO: 12119 - RNA, 19 nt, Artificial Sequence
  Synthetic
uuugaguguuuaaugagaa

SEQ ID NO: 12120 - RNA, 19 nt, Artificial Sequence
  Synthetic
uugaguguuuaaugagaag

SEQ ID NO: 12121 - RNA, 19 nt, Artificial Sequence
  Synthetic
ugaguguuuaaugagaagu

SEQ ID NO: 12122 - RNA, 19 nt, Artificial Sequence
  Synthetic
gaguguuuaaugagaagug

SEQ ID NO: 12123 - RNA, 19 nt, Artificial Sequence
  Synthetic
aguguuuaaugagaagugg

SEQ ID NO: 12124 - RNA, 19 nt, Artificial Sequence
  Synthetic
guguuuaaugagaaguggu

SEQ ID NO: 12125 - RNA, 19 nt, Artificial Sequence
  Synthetic
uguuuaaugagaagugguu

SEQ ID NO: 12126 - RNA, 19 nt, Artificial Sequence
  Synthetic
guuuaaugagaagugguua

SEQ ID NO: 12127 - RNA, 19 nt, Artificial Sequence
  Synthetic
uuuaaugagaagugguuaa

SEQ ID NO: 12128 - RNA, 19 nt, Artificial Sequence
  Synthetic
uuaaugagaagugguuaau

SEQ ID NO: 12129 - RNA, 19 nt, Artificial Sequence
  Synthetic
uaaugagaagugguuaauc

SEQ ID NO: 12130 - RNA, 19 nt, Artificial Sequence
  Synthetic
aaugagaagugguuaauca

SEQ ID NO: 12131 - RNA, 19 nt, Artificial Sequence
  Synthetic
augagaagugguuaaucau

SEQ ID NO: 12132 - RNA, 19 nt, Artificial Sequence
  Synthetic
ugagaagugguuaaucauu

SEQ ID NO: 12133 - RNA, 19 nt, Artificial Sequence
  Synthetic
gagaagugguuaaucauuu

SEQ ID NO: 12134 - RNA, 19 nt, Artificial Sequence
  Synthetic
agaagugguuaaucauuua

SEQ ID NO: 12135 - RNA, 19 nt, Artificial Sequence
  Synthetic
gaagugguuaaucauuuac

SEQ ID NO: 12136 - RNA, 19 nt, Artificial Sequence
  Synthetic
aagugguuaaucauuuacu

SEQ ID NO: 12137 - RNA, 19 nt, Artificial Sequence
  Synthetic
agugguuaaucauuuacuu

SEQ ID NO: 12138 - RNA, 19 nt, Artificial Sequence
  Synthetic
gugguuaaucauuuacuuc

SEQ ID NO: 12139 - RNA, 19 nt, Artificial Sequence
  Synthetic
ugguuaaucauuuacuucc

SEQ ID NO: 12140 - RNA, 19 nt, Artificial Sequence
  Synthetic
gguuaaucauuuacuuccu

SEQ ID NO: 12141 - RNA, 19 nt, Artificial Sequence
  Synthetic
guuaaucauuuacuuccuu

SEQ ID NO: 12142 - RNA, 19 nt, Artificial Sequence
  Synthetic
uuaaucauuuacuuccuuu

SEQ ID NO: 12143 - RNA, 19 nt, Artificial Sequence
  Synthetic
uaaucauuuacuuccuuuu

SEQ ID NO: 12144 - RNA, 19 nt, Artificial Sequence
  Synthetic
aaucauuuacuuccuuuuu

SEQ ID NO: 12145 - RNA, 19 nt, Artificial Sequence
  Synthetic
aucauuuacuuccuuuuuu

SEQ ID NO: 12146 - RNA, 19 nt, Artificial Sequence
  Synthetic
ucauuuacuuccuuuuuuc

SEQ ID NO: 12147 - RNA, 19 nt, Artificial Sequence
  Synthetic
cauuuacuuccuuuuuuca

SEQ ID NO: 12148 - RNA, 19 nt, Artificial Sequence
  Synthetic
auuuacuuccuuuuuucag

SEQ ID NO: 12149 - RNA, 19 nt, Artificial Sequence
  Synthetic
uuuacuuccuuuuuucagg

SEQ ID NO: 12150 - RNA, 19 nt, Artificial Sequence
  Synthetic
uuacuuccuuuuuucagga

SEQ ID NO: 12151 - RNA, 19 nt, Artificial Sequence
  Synthetic
uacuuccuuuuuucaggaa

SEQ ID NO: 12152 - RNA, 19 nt, Artificial Sequence
  Synthetic
acuuccuuuuuucaggaaa

SEQ ID NO: 12153 - RNA, 19 nt, Artificial Sequence
  Synthetic
cuuccuuuuuucaggaaag

SEQ ID NO: 12154 - RNA, 19 nt, Artificial Sequence
  Synthetic
uuccuuuuuucaggaaagg

SEQ ID NO: 12155 - RNA, 19 nt, Artificial Sequence
  Synthetic
uccuuuuuucaggaaaggg

SEQ ID NO: 12156 - RNA, 19 nt, Artificial Sequence
  Synthetic
ccuuuuuucaggaaagggg

SEQ ID NO: 12157 - RNA, 19 nt, Artificial Sequence
  Synthetic
cuuuuuucaggaaagggga

SEQ ID NO: 12158 - RNA, 19 nt, Artificial Sequence
  Synthetic
uuuuuucaggaaaggggaa

SEQ ID NO: 12159 - RNA, 19 nt, Artificial Sequence
  Synthetic
uuuuucaggaaaggggaac

SEQ ID NO: 12160 - RNA, 19 nt, Artificial Sequence
  Synthetic
uuuucaggaaaggggaacu

SEQ ID NO: 12161 - RNA, 19 nt, Artificial Sequence
  Synthetic
uuucaggaaaggggaacuc

SEQ ID NO: 12162 - RNA, 19 nt, Artificial Sequence
  Synthetic
uucaggaaaggggaacucu

SEQ ID NO: 12163 - RNA, 19 nt, Artificial Sequence
  Synthetic
ucaggaaaggggaacucuc

SEQ ID NO: 12164 - RNA, 19 nt, Artificial Sequence
  Synthetic
caggaaaggggaacucucu

SEQ ID NO: 12165 - RNA, 19 nt, Artificial Sequence
  Synthetic
aggaaaggggaacucucug

SEQ ID NO: 12166 - RNA, 19 nt, Artificial Sequence
  Synthetic
ggaaaggggaacucucugu

SEQ ID NO: 12167 - RNA, 19 nt, Artificial Sequence
  Synthetic
gaaaggggaacucucuguc

SEQ ID NO: 12168 - RNA, 19 nt, Artificial Sequence
  Synthetic
aaaggggaacucucugucu

SEQ ID NO: 12169 - RNA, 19 nt, Artificial Sequence
  Synthetic
aaggggaacucucugucuu

SEQ ID NO: 12170 - RNA, 19 nt, Artificial Sequence
  Synthetic
aggggaacucucugucuuc

SEQ ID NO: 12171 - RNA, 19 nt, Artificial Sequence
  Synthetic
ggggaacucucugucuucu

SEQ ID NO: 12172 - RNA, 19 nt, Artificial Sequence
  Synthetic
gggaacucucugucuucua

SEQ ID NO: 12173 - RNA, 19 nt, Artificial Sequence
  Synthetic
ggaacucucugucuucuag

SEQ ID NO: 12174 - RNA, 19 nt, Artificial Sequence
  Synthetic
gaacucucugucuucuaga

SEQ ID NO: 12175 - RNA, 19 nt, Artificial Sequence
  Synthetic
aacucucugucuucuagac

SEQ ID NO: 12176 - RNA, 19 nt, Artificial Sequence
  Synthetic
acucucugucuucuagaca

SEQ ID NO: 12177 - RNA, 19 nt, Artificial Sequence
  Synthetic
cucucugucuucuagacaa

SEQ ID NO: 12178 - RNA, 19 nt, Artificial Sequence
  Synthetic
ucucugucuucuagacaag

SEQ ID NO: 12179 - RNA, 19 nt, Artificial Sequence
  Synthetic
cucugucuucuagacaagg

SEQ ID NO: 12180 - RNA, 19 nt, Artificial Sequence
  Synthetic
ucugucuucuagacaaggu

SEQ ID NO: 12181 - RNA, 19 nt, Artificial Sequence
  Synthetic
cugucuucuagacaagguc

SEQ ID NO: 12182 - RNA, 19 nt, Artificial Sequence
  Synthetic
ugucuucuagacaagguca

SEQ ID NO: 12183 - RNA, 19 nt, Artificial Sequence
  Synthetic
gucuucuagacaaggucac

SEQ ID NO: 12184 - RNA, 19 nt, Artificial Sequence
  Synthetic
ucuucuagacaaggucacc

SEQ ID NO: 12185 - RNA, 19 nt, Artificial Sequence
  Synthetic
cuucuagacaaggucacca

SEQ ID NO: 12186 - RNA, 19 nt, Artificial Sequence
  Synthetic
uucuagacaaggucaccaa

SEQ ID NO: 12187 - RNA, 19 nt, Artificial Sequence
  Synthetic
ucuagacaaggucaccaac

SEQ ID NO: 12188 - RNA, 19 nt, Artificial Sequence
  Synthetic
cuagacaaggucaccaaca

SEQ ID NO: 12189 - RNA, 19 nt, Artificial Sequence
  Synthetic
uagacaaggucaccaacau

SEQ ID NO: 12190 - RNA, 19 nt, Artificial Sequence
  Synthetic
agacaaggucaccaacauc

SEQ ID NO: 12191 - RNA, 19 nt, Artificial Sequence
  Synthetic
gacaaggucaccaacaucu

SEQ ID NO: 12192 - RNA, 19 nt, Artificial Sequence
  Synthetic
acaaggucaccaacaucua

SEQ ID NO: 12193 - RNA, 19 nt, Artificial Sequence
  Synthetic
caaggucaccaacaucuaa

SEQ ID NO: 12194 - RNA, 19 nt, Artificial Sequence
  Synthetic
aaggucaccaacaucuaac

SEQ ID NO: 12195 - RNA, 19 nt, Artificial Sequence
  Synthetic
aggucaccaacaucuaacc

SEQ ID NO: 12196 - RNA, 19 nt, Artificial Sequence
  Synthetic
ggucaccaacaucuaaccu

SEQ ID NO: 12197 - RNA, 19 nt, Artificial Sequence
  Synthetic
gucaccaacaucuaaccuu

SEQ ID NO: 12198 - RNA, 19 nt, Artificial Sequence
  Synthetic
ucaccaacaucuaaccuug

SEQ ID NO: 12199 - RNA, 19 nt, Artificial Sequence
  Synthetic
caccaacaucuaaccuugg

SEQ ID NO: 12200 - RNA, 19 nt, Artificial Sequence
  Synthetic
accaacaucuaaccuuggg

SEQ ID NO: 12201 - RNA, 19 nt, Artificial Sequence
  Synthetic
ccaacaucuaaccuugggc

SEQ ID NO: 12202 - RNA, 19 nt, Artificial Sequence
  Synthetic
caacaucuaaccuugggcu

SEQ ID NO: 12203 - RNA, 19 nt, Artificial Sequence
  Synthetic
aacaucuaaccuugggcug

SEQ ID NO: 12204 - RNA, 19 nt, Artificial Sequence
  Synthetic
acaucuaaccuugggcugu

SEQ ID NO: 12205 - RNA, 19 nt, Artificial Sequence
  Synthetic
caucuaaccuugggcugug

SEQ ID NO: 12206 - RNA, 19 nt, Artificial Sequence
  Synthetic
aucuaaccuugggcugugu

SEQ ID NO: 12207 - RNA, 19 nt, Artificial Sequence
  Synthetic
ucuaaccuugggcuguguc

SEQ ID NO: 12208 - RNA, 19 nt, Artificial Sequence
  Synthetic
cuaaccuugggcugugucu

SEQ ID NO: 12209 - RNA, 19 nt, Artificial Sequence
  Synthetic
uaaccuugggcugugucuu

SEQ ID NO: 12210 - RNA, 19 nt, Artificial Sequence
  Synthetic
aaccuugggcugugucuuc

SEQ ID NO: 12211 - RNA, 19 nt, Artificial Sequence
  Synthetic
accuugggcugugucuucc

SEQ ID NO: 12212 - RNA, 19 nt, Artificial Sequence
  Synthetic
ccuugggcugugucuuccc

SEQ ID NO: 12213 - RNA, 19 nt, Artificial Sequence
  Synthetic
cuugggcugugucuuccca

SEQ ID NO: 12214 - RNA, 19 nt, Artificial Sequence
  Synthetic
uugggcugugucuucccau

SEQ ID NO: 12215 - RNA, 19 nt, Artificial Sequence
  Synthetic
ugggcugugucuucccaua

SEQ ID NO: 12216 - RNA, 19 nt, Artificial Sequence
  Synthetic
gggcugugucuucccauac

SEQ ID NO: 12217 - RNA, 19 nt, Artificial Sequence
  Synthetic
ggcugugucuucccauaca

SEQ ID NO: 12218 - RNA, 19 nt, Artificial Sequence
  Synthetic
gcugugucuucccauacaa

SEQ ID NO: 12219 - RNA, 19 nt, Artificial Sequence
  Synthetic
cugugucuucccauacaac

SEQ ID NO: 12220 - RNA, 19 nt, Artificial Sequence
  Synthetic
ugugucuucccauacaacc

SEQ ID NO: 12221 - RNA, 19 nt, Artificial Sequence
  Synthetic
gugucuucccauacaaccc

SEQ ID NO: 12222 - RNA, 19 nt, Artificial Sequence
  Synthetic
ugucuucccauacaacccu

SEQ ID NO: 12223 - RNA, 19 nt, Artificial Sequence
  Synthetic
gucuucccauacaacccua

SEQ ID NO: 12224 - RNA, 19 nt, Artificial Sequence
  Synthetic
ucuucccauacaacccuau

SEQ ID NO: 12225 - RNA, 19 nt, Artificial Sequence
  Synthetic
cuucccauacaacccuauu

SEQ ID NO: 12226 - RNA, 19 nt, Artificial Sequence
  Synthetic
uucccauacaacccuauuu

SEQ ID NO: 12227 - RNA, 19 nt, Artificial Sequence
  Synthetic
ucccauacaacccuauuua

SEQ ID NO: 12228 - RNA, 19 nt, Artificial Sequence
  Synthetic
cccauacaacccuauuuac

SEQ ID NO: 12229 - RNA, 19 nt, Artificial Sequence
  Synthetic
ccauacaacccuauuuacg

SEQ ID NO: 12230 - RNA, 19 nt, Artificial Sequence
  Synthetic
cauacaacccuauuuacgu

SEQ ID NO: 12231 - RNA, 19 nt, Artificial Sequence
  Synthetic
auacaacccuauuuacguc

SEQ ID NO: 12232 - RNA, 19 nt, Artificial Sequence
  Synthetic
uacaacccuauuuacguca

SEQ ID NO: 12233 - RNA, 19 nt, Artificial Sequence
  Synthetic
acaacccuauuuacgucaa

SEQ ID NO: 12234 - RNA, 19 nt, Artificial Sequence
  Synthetic
caacccuauuuacgucaac

SEQ ID NO: 12235 - RNA, 19 nt, Artificial Sequence
  Synthetic
aacccuauuuacgucaacc

SEQ ID NO: 12236 - RNA, 19 nt, Artificial Sequence
  Synthetic
acccuauuuacgucaaccu

SEQ ID NO: 12237 - RNA, 19 nt, Artificial Sequence
  Synthetic
cccuauuuacgucaaccuu

SEQ ID NO: 12238 - RNA, 19 nt, Artificial Sequence
  Synthetic
ccuauuuacgucaaccuuc

SEQ ID NO: 12239 - RNA, 19 nt, Artificial Sequence
  Synthetic
cuauuuacgucaaccuucc

SEQ ID NO: 12240 - RNA, 19 nt, Artificial Sequence
  Synthetic
uauuuacgucaaccuucca

SEQ ID NO: 12241 - RNA, 19 nt, Artificial Sequence
  Synthetic
auuuacgucaaccuuccaa

SEQ ID NO: 12242 - RNA, 19 nt, Artificial Sequence
  Synthetic
uuuacgucaaccuuccaau

SEQ ID NO: 12243 - RNA, 19 nt, Artificial Sequence
  Synthetic
uuacgucaaccuuccaaug

SEQ ID NO: 12244 - RNA, 19 nt, Artificial Sequence
  Synthetic
uacgucaaccuuccaauga

SEQ ID NO: 12245 - RNA, 19 nt, Artificial Sequence
  Synthetic
acgucaaccuuccaaugac

SEQ ID NO: 12246 - RNA, 19 nt, Artificial Sequence
  Synthetic
cgucaaccuuccaaugacu

SEQ ID NO: 12247 - RNA, 19 nt, Artificial Sequence
  Synthetic
gucaaccuuccaaugacug

SEQ ID NO: 12248 - RNA, 19 nt, Artificial Sequence
  Synthetic
ucaaccuuccaaugacugc

SEQ ID NO: 12249 - RNA, 19 nt, Artificial Sequence
  Synthetic
caaccuuccaaugacugcu

SEQ ID NO: 12250 - RNA, 19 nt, Artificial Sequence
  Synthetic
aaccuuccaaugacugcuc

SEQ ID NO: 12251 - RNA, 19 nt, Artificial Sequence
  Synthetic
accuuccaaugacugcucc

SEQ ID NO: 12252 - RNA, 19 nt, Artificial Sequence
  Synthetic
ccuuccaaugacugcuccu

SEQ ID NO: 12253 - RNA, 19 nt, Artificial Sequence
  Synthetic
cuuccaaugacugcuccug

SEQ ID NO: 12254 - RNA, 19 nt, Artificial Sequence
  Synthetic
uuccaaugacugcuccugg

SEQ ID NO: 12255 - RNA, 19 nt, Artificial Sequence
  Synthetic
uccaaugacugcuccuggg

SEQ ID NO: 12256 - RNA, 19 nt, Artificial Sequence
  Synthetic
ccaaugacugcuccugggg

SEQ ID NO: 12257 - RNA, 19 nt, Artificial Sequence
  Synthetic
caaugacugcuccugggga

SEQ ID NO: 12258 - RNA, 19 nt, Artificial Sequence
  Synthetic
aaugacugcuccuggggac

SEQ ID NO: 12259 - RNA, 19 nt, Artificial Sequence
  Synthetic
augacugcuccuggggaca

SEQ ID NO: 12260 - RNA, 19 nt, Artificial Sequence
  Synthetic
ugacugcuccuggggacag

SEQ ID NO: 12261 - RNA, 19 nt, Artificial Sequence
  Synthetic
gacugcuccuggggacaga

SEQ ID NO: 12262 - RNA, 19 nt, Artificial Sequence
  Synthetic
acugcuccuggggacagag

SEQ ID NO: 12263 - RNA, 19 nt, Artificial Sequence
  Synthetic
cugcuccuggggacagagu

SEQ ID NO: 12264 - RNA, 19 nt, Artificial Sequence
  Synthetic
ugcuccuggggacagagug

SEQ ID NO: 12265 - RNA, 19 nt, Artificial Sequence
  Synthetic
gcuccuggggacagagugg

SEQ ID NO: 12266 - RNA, 19 nt, Artificial Sequence
  Synthetic
cuccuggggacagaguggu

SEQ ID NO: 12267 - RNA, 19 nt, Artificial Sequence
  Synthetic
uccuggggacagaguggug

SEQ ID NO: 12268 - RNA, 19 nt, Artificial Sequence
  Synthetic
ccuggggacagagugguga

SEQ ID NO: 12269 - RNA, 19 nt, Artificial Sequence
  Synthetic
cuggggacagaguggugaa

SEQ ID NO: 12270 - RNA, 19 nt, Artificial Sequence
  Synthetic
uggggacagaguggugaaa

SEQ ID NO: 12271 - RNA, 19 nt, Artificial Sequence
  Synthetic
ggggacagaguggugaaau

SEQ ID NO: 12272 - RNA, 19 nt, Artificial Sequence
  Synthetic
gggacagaguggugaaaug

SEQ ID NO: 12273 - RNA, 19 nt, Artificial Sequence
  Synthetic
ggacagaguggugaaaugg

SEQ ID NO: 12274 - RNA, 19 nt, Artificial Sequence
  Synthetic
gacagaguggugaaauggu

SEQ ID NO: 12275 - RNA, 19 nt, Artificial Sequence
  Synthetic
acagaguggugaaauggua

SEQ ID NO: 12276 - RNA, 19 nt, Artificial Sequence
  Synthetic
cagaguggugaaaugguac

SEQ ID NO: 12277 - RNA, 19 nt, Artificial Sequence
  Synthetic
agaguggugaaaugguacc

SEQ ID NO: 12278 - RNA, 19 nt, Artificial Sequence
  Synthetic
gaguggugaaaugguacca

SEQ ID NO: 12279 - RNA, 19 nt, Artificial Sequence
  Synthetic
aguggugaaaugguaccau

SEQ ID NO: 12280 - RNA, 19 nt, Artificial Sequence
  Synthetic
guggugaaaugguaccaug

SEQ ID NO: 12281 - RNA, 19 nt, Artificial Sequence
  Synthetic
uggugaaaugguaccaugg

SEQ ID NO: 12282 - RNA, 19 nt, Artificial Sequence
  Synthetic
ggugaaaugguaccauggg

SEQ ID NO: 12283 - RNA, 19 nt, Artificial Sequence
  Synthetic
gugaaaugguaccaugggc

SEQ ID NO: 12284 - RNA, 19 nt, Artificial Sequence
  Synthetic
ugaaaugguaccaugggca

SEQ ID NO: 12285 - RNA, 19 nt, Artificial Sequence
  Synthetic
gaaaugguaccaugggcau

SEQ ID NO: 12286 - RNA, 19 nt, Artificial Sequence
  Synthetic
aaaugguaccaugggcauu

SEQ ID NO: 12287 - RNA, 19 nt, Artificial Sequence
  Synthetic
aaugguaccaugggcauuc

SEQ ID NO: 12288 - RNA, 19 nt, Artificial Sequence
  Synthetic
augguaccaugggcauucu

SEQ ID NO: 12289 - RNA, 19 nt, Artificial Sequence
  Synthetic
ugguaccaugggcauucug

SEQ ID NO: 12290 - RNA, 19 nt, Artificial Sequence
  Synthetic
gguaccaugggcauucuga

SEQ ID NO: 12291 - RNA, 19 nt, Artificial Sequence
  Synthetic
guaccaugggcauucugac

SEQ ID NO: 12292 - RNA, 19 nt, Artificial Sequence
  Synthetic
uaccaugggcauucugaca

SEQ ID NO: 12293 - RNA, 19 nt, Artificial Sequence
  Synthetic
accaugggcauucugacaa

SEQ ID NO: 12294 - RNA, 19 nt, Artificial Sequence
  Synthetic
ccaugggcauucugacaac

SEQ ID NO: 12295 - RNA, 19 nt, Artificial Sequence
  Synthetic
caugggcauucugacaacc

SEQ ID NO: 12296 - RNA, 19 nt, Artificial Sequence
  Synthetic
augggcauucugacaacca

SEQ ID NO: 12297 - RNA, 19 nt, Artificial Sequence
  Synthetic
ugggcauucugacaaccaa

SEQ ID NO: 12298 - RNA, 19 nt, Artificial Sequence
  Synthetic
gggcauucugacaaccaac

SEQ ID NO: 12299 - RNA, 19 nt, Artificial Sequence
  Synthetic
ggcauucugacaaccaacu

SEQ ID NO: 12300 - RNA, 19 nt, Artificial Sequence
  Synthetic
gcauucugacaaccaacuc

SEQ ID NO: 12301 - RNA, 19 nt, Artificial Sequence
  Synthetic
cauucugacaaccaacuca

SEQ ID NO: 12302 - RNA, 19 nt, Artificial Sequence
  Synthetic
auucugacaaccaacucag

SEQ ID NO: 12303 - RNA, 19 nt, Artificial Sequence
  Synthetic
uucugacaaccaacucaga

SEQ ID NO: 12304 - RNA, 19 nt, Artificial Sequence
  Synthetic
ucugacaaccaacucagag

SEQ ID NO: 12305 - RNA, 19 nt, Artificial Sequence
  Synthetic
cugacaaccaacucagaga

SEQ ID NO: 12306 - RNA, 19 nt, Artificial Sequence
  Synthetic
ugacaaccaacucagagaa

SEQ ID NO: 12307 - RNA, 19 nt, Artificial Sequence
  Synthetic
gacaaccaacucagagaag

SEQ ID NO: 12308 - RNA, 19 nt, Artificial Sequence
  Synthetic
acaaccaacucagagaaga

SEQ ID NO: 12309 - RNA, 19 nt, Artificial Sequence
  Synthetic
caaccaacucagagaagag

SEQ ID NO: 12310 - RNA, 19 nt, Artificial Sequence
  Synthetic
aaccaacucagagaagaga

SEQ ID NO: 12311 - RNA, 19 nt, Artificial Sequence
  Synthetic
accaacucagagaagagau

SEQ ID NO: 12312 - RNA, 19 nt, Artificial Sequence
  Synthetic
ccaacucagagaagagaug

SEQ ID NO: 12313 - RNA, 19 nt, Artificial Sequence
  Synthetic
caacucagagaagagaugc

SEQ ID NO: 12314 - RNA, 19 nt, Artificial Sequence
  Synthetic
aacucagagaagagaugcu

SEQ ID NO: 12315 - RNA, 19 nt, Artificial Sequence
  Synthetic
acucagagaagagaugcua

SEQ ID NO: 12316 - RNA, 19 nt, Artificial Sequence
  Synthetic
cucagagaagagaugcuac

SEQ ID NO: 12317 - RNA, 19 nt, Artificial Sequence
  Synthetic
ucagagaagagaugcuaca

SEQ ID NO: 12318 - RNA, 19 nt, Artificial Sequence
  Synthetic
cagagaagagaugcuacau

SEQ ID NO: 12319 - RNA, 19 nt, Artificial Sequence
  Synthetic
agagaagagaugcuacauc

SEQ ID NO: 12320 - RNA, 19 nt, Artificial Sequence
  Synthetic
gagaagagaugcuacaucc

SEQ ID NO: 12321 - RNA, 19 nt, Artificial Sequence
  Synthetic
agaagagaugcuacauccu

SEQ ID NO: 12322 - RNA, 19 nt, Artificial Sequence
  Synthetic
gaagagaugcuacauccuu

SEQ ID NO: 12323 - RNA, 19 nt, Artificial Sequence
  Synthetic
aagagaugcuacauccuuu

SEQ ID NO: 12324 - RNA, 19 nt, Artificial Sequence
  Synthetic
agagaugcuacauccuuug

SEQ ID NO: 12325 - RNA, 19 nt, Artificial Sequence
  Synthetic
gagaugcuacauccuuugc

SEQ ID NO: 12326 - RNA, 19 nt, Artificial Sequence
  Synthetic
agaugcuacauccuuugcc

SEQ ID NO: 12327 - RNA, 19 nt, Artificial Sequence
  Synthetic
gaugcuacauccuuugccc

SEQ ID NO: 12328 - RNA, 19 nt, Artificial Sequence
  Synthetic
augcuacauccuuugcccu

SEQ ID NO: 12329 - RNA, 19 nt, Artificial Sequence
  Synthetic
ugcuacauccuuugcccuc

SEQ ID NO: 12330 - RNA, 19 nt, Artificial Sequence
  Synthetic
gcuacauccuuugcccucu

SEQ ID NO: 12331 - RNA, 19 nt, Artificial Sequence
  Synthetic
cuacauccuuugcccucuc

SEQ ID NO: 12332 - RNA, 19 nt, Artificial Sequence
  Synthetic
uacauccuuugcccucuca

SEQ ID NO: 12333 - RNA, 19 nt, Artificial Sequence
  Synthetic
acauccuuugcccucucag

SEQ ID NO: 12334 - RNA, 19 nt, Artificial Sequence
  Synthetic
cauccuuugcccucucaga

SEQ ID NO: 12335 - RNA, 19 nt, Artificial Sequence
  Synthetic
auccuuugcccucucagag

SEQ ID NO: 12336 - RNA, 19 nt, Artificial Sequence
  Synthetic
uccuuugcccucucagagg

SEQ ID NO: 12337 - RNA, 19 nt, Artificial Sequence
  Synthetic
ccuuugcccucucagaggg

SEQ ID NO: 12338 - RNA, 19 nt, Artificial Sequence
  Synthetic
cuuugcccucucagagggu

SEQ ID NO: 12339 - RNA, 19 nt, Artificial Sequence
  Synthetic
uuugcccucucagaggguc

SEQ ID NO: 12340 - RNA, 19 nt, Artificial Sequence
  Synthetic
uugcccucucagaggguca

SEQ ID NO: 12341 - RNA, 19 nt, Artificial Sequence
  Synthetic
ugcccucucagagggucag

SEQ ID NO: 12342 - RNA, 19 nt, Artificial Sequence
  Synthetic
gcccucucagagggucaga

SEQ ID NO: 12343 - RNA, 19 nt, Artificial Sequence
  Synthetic
cccucucagagggucagaa

SEQ ID NO: 12344 - RNA, 19 nt, Artificial Sequence
  Synthetic
ccucucagagggucagaau

SEQ ID NO: 12345 - RNA, 19 nt, Artificial Sequence
  Synthetic
cucucagagggucagaauu

SEQ ID NO: 12346 - RNA, 19 nt, Artificial Sequence
  Synthetic
ucucagagggucagaauug

SEQ ID NO: 12347 - RNA, 19 nt, Artificial Sequence
  Synthetic
cucagagggucagaauuga

SEQ ID NO: 12348 - RNA, 19 nt, Artificial Sequence
  Synthetic
ucagagggucagaauugag

SEQ ID NO: 12349 - RNA, 19 nt, Artificial Sequence
  Synthetic
cagagggucagaauugaga

SEQ ID NO: 12350 - RNA, 19 nt, Artificial Sequence
  Synthetic
agagggucagaauugagaa

SEQ ID NO: 12351 - RNA, 19 nt, Artificial Sequence
  Synthetic
gagggucagaauugagaac

SEQ ID NO: 12352 - RNA, 19 nt, Artificial Sequence
  Synthetic
agggucagaauugagaaca

SEQ ID NO: 12353 - RNA, 19 nt, Artificial Sequence
  Synthetic
gggucagaauugagaacau

SEQ ID NO: 12354 - RNA, 19 nt, Artificial Sequence
  Synthetic
ggucagaauugagaacauc

SEQ ID NO: 12355 - RNA, 19 nt, Artificial Sequence
  Synthetic
gucagaauugagaacaucu

SEQ ID NO: 12356 - RNA, 19 nt, Artificial Sequence
  Synthetic
ucagaauugagaacaucuc

SEQ ID NO: 12357 - RNA, 19 nt, Artificial Sequence
  Synthetic
cagaauugagaacaucucc

SEQ ID NO: 12358 - RNA, 19 nt, Artificial Sequence
  Synthetic
agaauugagaacaucuccc

SEQ ID NO: 12359 - RNA, 19 nt, Artificial Sequence
  Synthetic
gaauugagaacaucuccca

SEQ ID NO: 12360 - RNA, 19 nt, Artificial Sequence
  Synthetic
aauugagaacaucucccag

SEQ ID NO: 12361 - RNA, 19 nt, Artificial Sequence
  Synthetic
auugagaacaucucccagu

SEQ ID NO: 12362 - RNA, 19 nt, Artificial Sequence
  Synthetic
uugagaacaucucccagua

SEQ ID NO: 12363 - RNA, 19 nt, Artificial Sequence
  Synthetic
ugagaacaucucccaguac

SEQ ID NO: 12364 - RNA, 19 nt, Artificial Sequence
  Synthetic
gagaacaucucccaguacc

SEQ ID NO: 12365 - RNA, 19 nt, Artificial Sequence
  Synthetic
agaacaucucccaguaccu

SEQ ID NO: 12366 - RNA, 19 nt, Artificial Sequence
  Synthetic
gaacaucucccaguaccua

SEQ ID NO: 12367 - RNA, 19 nt, Artificial Sequence
  Synthetic
aacaucucccaguaccuag

SEQ ID NO: 12368 - RNA, 19 nt, Artificial Sequence
  Synthetic
acaucucccaguaccuaga

SEQ ID NO: 12369 - RNA, 19 nt, Artificial Sequence
  Synthetic
caucucccaguaccuagac

SEQ ID NO: 12370 - RNA, 19 nt, Artificial Sequence
  Synthetic
aucucccaguaccuagaca

SEQ ID NO: 12371 - RNA, 19 nt, Artificial Sequence
  Synthetic
ucucccaguaccuagacau

SEQ ID NO: 12372 - RNA, 19 nt, Artificial Sequence
  Synthetic
cucccaguaccuagacaua

SEQ ID NO: 12373 - RNA, 19 nt, Artificial Sequence
  Synthetic
ucccaguaccuagacauac

SEQ ID NO: 12374 - RNA, 19 nt, Artificial Sequence
  Synthetic
cccaguaccuagacauacu

SEQ ID NO: 12375 - RNA, 19 nt, Artificial Sequence
  Synthetic
ccaguaccuagacauacuc

SEQ ID NO: 12376 - RNA, 19 nt, Artificial Sequence
  Synthetic
caguaccuagacauacucu

SEQ ID NO: 12377 - RNA, 19 nt, Artificial Sequence
  Synthetic
aguaccuagacauacucug

SEQ ID NO: 12378 - RNA, 19 nt, Artificial Sequence
  Synthetic
guaccuagacauacucugg

SEQ ID NO: 12379 - RNA, 19 nt, Artificial Sequence
  Synthetic
uaccuagacauacucuggu

SEQ ID NO: 12380 - RNA, 19 nt, Artificial Sequence
  Synthetic
accuagacauacucuggua

SEQ ID NO: 12381 - RNA, 19 nt, Artificial Sequence
  Synthetic
ccuagacauacucugguac

SEQ ID NO: 12382 - RNA, 19 nt, Artificial Sequence
  Synthetic
cuagacauacucugguaca

SEQ ID NO: 12383 - RNA, 19 nt, Artificial Sequence
  Synthetic
uagacauacucugguacau

SEQ ID NO: 12384 - RNA, 19 nt, Artificial Sequence
  Synthetic
agacauacucugguacaua

SEQ ID NO: 12385 - RNA, 19 nt, Artificial Sequence
  Synthetic
gacauacucugguacauau

SEQ ID NO: 12386 - RNA, 19 nt, Artificial Sequence
  Synthetic
acauacucugguacauaug

SEQ ID NO: 12387 - RNA, 19 nt, Artificial Sequence
  Synthetic
cauacucugguacauauga

SEQ ID NO: 12388 - RNA, 19 nt, Artificial Sequence
  Synthetic
auacucugguacauaugaa

SEQ ID NO: 12389 - RNA, 19 nt, Artificial Sequence
  Synthetic
uacucugguacauaugaag

SEQ ID NO: 12390 - RNA, 19 nt, Artificial Sequence
  Synthetic
acucugguacauaugaagu

SEQ ID NO: 12391 - RNA, 19 nt, Artificial Sequence
  Synthetic
cucugguacauaugaaguu

SEQ ID NO: 12392 - RNA, 19 nt, Artificial Sequence
  Synthetic
ucugguacauaugaaguuu

SEQ ID NO: 12393 - RNA, 19 nt, Artificial Sequence
  Synthetic
cugguacauaugaaguuug

SEQ ID NO: 12394 - RNA, 19 nt, Artificial Sequence
  Synthetic
ugguacauaugaaguuugu

SEQ ID NO: 12395 - RNA, 19 nt, Artificial Sequence
  Synthetic
gguacauaugaaguuugug

SEQ ID NO: 12396 - RNA, 19 nt, Artificial Sequence
  Synthetic
guacauaugaaguuuguga

SEQ ID NO: 12397 - RNA, 19 nt, Artificial Sequence
  Synthetic
uacauaugaaguuugugau

SEQ ID NO: 12398 - RNA, 19 nt, Artificial Sequence
  Synthetic
acauaugaaguuugugauc

SEQ ID NO: 12399 - RNA, 19 nt, Artificial Sequence
  Synthetic
cauaugaaguuugugaucu

SEQ ID NO: 12400 - RNA, 19 nt, Artificial Sequence
  Synthetic
auaugaaguuugugaucua

SEQ ID NO: 12401 - RNA, 19 nt, Artificial Sequence
  Synthetic
uaugaaguuugugaucuau

SEQ ID NO: 12402 - RNA, 19 nt, Artificial Sequence
  Synthetic
augaaguuugugaucuaug

SEQ ID NO: 12403 - RNA, 19 nt, Artificial Sequence
  Synthetic
ugaaguuugugaucuauga

SEQ ID NO: 12404 - RNA, 19 nt, Artificial Sequence
  Synthetic
gaaguuugugaucuaugaa

SEQ ID NO: 12405 - RNA, 19 nt, Artificial Sequence
  Synthetic
aaguuugugaucuaugaau

SEQ ID NO: 12406 - RNA, 19 nt, Artificial Sequence
  Synthetic
aguuugugaucuaugaauu

SEQ ID NO: 12407 - RNA, 19 nt, Artificial Sequence
  Synthetic
guuugugaucuaugaauuu

SEQ ID NO: 12408 - RNA, 19 nt, Artificial Sequence
  Synthetic
uuugugaucuaugaauuug

SEQ ID NO: 12409 - RNA, 19 nt, Artificial Sequence
  Synthetic
uugugaucuaugaauuugg

SEQ ID NO: 12410 - RNA, 19 nt, Artificial Sequence
  Synthetic
ugugaucuaugaauuugga

SEQ ID NO: 12411 - RNA, 19 nt, Artificial Sequence
  Synthetic
gugaucuaugaauuuggac

SEQ ID NO: 12412 - RNA, 19 nt, Artificial Sequence
  Synthetic
ugaucuaugaauuuggacc

SEQ ID NO: 12413 - RNA, 19 nt, Artificial Sequence
  Synthetic
gaucuaugaauuuggacca

SEQ ID NO: 12414 - RNA, 19 nt, Artificial Sequence
  Synthetic
aucuaugaauuuggaccac

SEQ ID NO: 12415 - RNA, 19 nt, Artificial Sequence
  Synthetic
ucuaugaauuuggaccaca

SEQ ID NO: 12416 - RNA, 19 nt, Artificial Sequence
  Synthetic
cuaugaauuuggaccacag

SEQ ID NO: 12417 - RNA, 19 nt, Artificial Sequence
  Synthetic
uaugaauuuggaccacaga

SEQ ID NO: 12418 - RNA, 19 nt, Artificial Sequence
  Synthetic
augaauuuggaccacagaa

SEQ ID NO: 12419 - RNA, 19 nt, Artificial Sequence
  Synthetic
ugaauuuggaccacagaau

SEQ ID NO: 12420 - RNA, 19 nt, Artificial Sequence
  Synthetic
gaauuuggaccacagaauc

SEQ ID NO: 12421 - RNA, 19 nt, Artificial Sequence
  Synthetic
aauuuggaccacagaaucc

SEQ ID NO: 12422 - RNA, 19 nt, Artificial Sequence
  Synthetic
auuuggaccacagaaucca

SEQ ID NO: 12423 - RNA, 19 nt, Artificial Sequence
  Synthetic
uuuggaccacagaauccac

SEQ ID NO: 12424 - RNA, 19 nt, Artificial Sequence
  Synthetic
uuggaccacagaauccacc

SEQ ID NO: 12425 - RNA, 19 nt, Artificial Sequence
  Synthetic
uggaccacagaauccacca

SEQ ID NO: 12426 - RNA, 19 nt, Artificial Sequence
  Synthetic
ggaccacagaauccaccac

SEQ ID NO: 12427 - RNA, 19 nt, Artificial Sequence
  Synthetic
gaccacagaauccaccacu

SEQ ID NO: 12428 - RNA, 19 nt, Artificial Sequence
  Synthetic
accacagaauccaccacua

SEQ ID NO: 12429 - RNA, 19 nt, Artificial Sequence
  Synthetic
ccacagaauccaccacuac

SEQ ID NO: 12430 - RNA, 19 nt, Artificial Sequence
  Synthetic
cacagaauccaccacuaca

SEQ ID NO: 12431 - RNA, 19 nt, Artificial Sequence
  Synthetic
acagaauccaccacuacau

SEQ ID NO: 12432 - RNA, 19 nt, Artificial Sequence
  Synthetic
cagaauccaccacuacauc

SEQ ID NO: 12433 - RNA, 19 nt, Artificial Sequence
  Synthetic
agaauccaccacuacaucu

SEQ ID NO: 12434 - RNA, 19 nt, Artificial Sequence
  Synthetic
gaauccaccacuacaucua

SEQ ID NO: 12435 - RNA, 19 nt, Artificial Sequence
  Synthetic
aauccaccacuacaucuag

SEQ ID NO: 12436 - RNA, 19 nt, Artificial Sequence
  Synthetic
auccaccacuacaucuagc

SEQ ID NO: 12437 - RNA, 19 nt, Artificial Sequence
  Synthetic
uccaccacuacaucuagcu

SEQ ID NO: 12438 - RNA, 19 nt, Artificial Sequence
  Synthetic
ccaccacuacaucuagcuc

SEQ ID NO: 12439 - RNA, 19 nt, Artificial Sequence
  Synthetic
caccacuacaucuagcucu

SEQ ID NO: 12440 - RNA, 19 nt, Artificial Sequence
  Synthetic
accacuacaucuagcucuu

SEQ ID NO: 12441 - RNA, 19 nt, Artificial Sequence
  Synthetic
ccacuacaucuagcucuua

SEQ ID NO: 12442 - RNA, 19 nt, Artificial Sequence
  Synthetic
cacuacaucuagcucuuac

SEQ ID NO: 12443 - RNA, 19 nt, Artificial Sequence
  Synthetic
acuacaucuagcucuuacu

SEQ ID NO: 12444 - RNA, 19 nt, Artificial Sequence
  Synthetic
cuacaucuagcucuuacuu

SEQ ID NO: 12445 - RNA, 19 nt, Artificial Sequence
  Synthetic
uacaucuagcucuuacuuc

SEQ ID NO: 12446 - RNA, 19 nt, Artificial Sequence
  Synthetic
acaucuagcucuuacuucu

SEQ ID NO: 12447 - RNA, 19 nt, Artificial Sequence
  Synthetic
caucuagcucuuacuucuc

SEQ ID NO: 12448 - RNA, 19 nt, Artificial Sequence
  Synthetic
aucuagcucuuacuucucu

SEQ ID NO: 12449 - RNA, 19 nt, Artificial Sequence
  Synthetic
ucuagcucuuacuucucuc

SEQ ID NO: 12450 - RNA, 19 nt, Artificial Sequence
  Synthetic
cuagcucuuacuucucucc

SEQ ID NO: 12451 - RNA, 19 nt, Artificial Sequence
  Synthetic
uagcucuuacuucucucca

SEQ ID NO: 12452 - RNA, 19 nt, Artificial Sequence
  Synthetic
agcucuuacuucucuccaa

SEQ ID NO: 12453 - RNA, 19 nt, Artificial Sequence
  Synthetic
gcucuuacuucucuccaau

SEQ ID NO: 12454 - RNA, 19 nt, Artificial Sequence
  Synthetic
cucuuacuucucuccaaug

SEQ ID NO: 12455 - RNA, 19 nt, Artificial Sequence
  Synthetic
ucuuacuucucuccaaugc

SEQ ID NO: 12456 - RNA, 19 nt, Artificial Sequence
  Synthetic
cuuacuucucuccaaugcc

SEQ ID NO: 12457 - RNA, 19 nt, Artificial Sequence
  Synthetic
uuacuucucuccaaugccc

SEQ ID NO: 12458 - RNA, 19 nt, Artificial Sequence
  Synthetic
uacuucucuccaaugcccu

SEQ ID NO: 12459 - RNA, 19 nt, Artificial Sequence
  Synthetic
acuucucuccaaugcccug

SEQ ID NO: 12460 - RNA, 19 nt, Artificial Sequence
  Synthetic
cuucucuccaaugcccugc

SEQ ID NO: 12461 - RNA, 19 nt, Artificial Sequence
  Synthetic
uucucuccaaugcccugcu

SEQ ID NO: 12462 - RNA, 19 nt, Artificial Sequence
  Synthetic
ucucuccaaugcccugcug

SEQ ID NO: 12463 - RNA, 19 nt, Artificial Sequence
  Synthetic
cucuccaaugcccugcugg

SEQ ID NO: 12464 - RNA, 19 nt, Artificial Sequence
  Synthetic
ucuccaaugcccugcuggu

SEQ ID NO: 12465 - RNA, 19 nt, Artificial Sequence
  Synthetic
cuccaaugcccugcugguu

SEQ ID NO: 12466 - RNA, 19 nt, Artificial Sequence
  Synthetic
uccaaugcccugcugguuc

SEQ ID NO: 12467 - RNA, 19 nt, Artificial Sequence
  Synthetic
ccaaugcccugcugguuca

SEQ ID NO: 12468 - RNA, 19 nt, Artificial Sequence
  Synthetic
caaugcccugcugguucag

SEQ ID NO: 12469 - RNA, 19 nt, Artificial Sequence
  Synthetic
aaugcccugcugguucagu

SEQ ID NO: 12470 - RNA, 19 nt, Artificial Sequence
  Synthetic
augcccugcugguucaguc

SEQ ID NO: 12471 - RNA, 19 nt, Artificial Sequence
  Synthetic
ugcccugcugguucaguca

SEQ ID NO: 12472 - RNA, 19 nt, Artificial Sequence
  Synthetic
gcccugcugguucagucaa

SEQ ID NO: 12473 - RNA, 19 nt, Artificial Sequence
  Synthetic
cccugcugguucagucaac

SEQ ID NO: 12474 - RNA, 19 nt, Artificial Sequence
  Synthetic
ccugcugguucagucaaca

SEQ ID NO: 12475 - RNA, 19 nt, Artificial Sequence
  Synthetic
cugcugguucagucaacag

SEQ ID NO: 12476 - RNA, 19 nt, Artificial Sequence
  Synthetic
ugcugguucagucaacagu

SEQ ID NO: 12477 - RNA, 19 nt, Artificial Sequence
  Synthetic
gcugguucagucaacagua

SEQ ID NO: 12478 - RNA, 19 nt, Artificial Sequence
  Synthetic
cugguucagucaacaguaa

SEQ ID NO: 12479 - RNA, 19 nt, Artificial Sequence
  Synthetic
ugguucagucaacaguaag

SEQ ID NO: 12480 - RNA, 19 nt, Artificial Sequence
  Synthetic
gguucagucaacaguaagu

SEQ ID NO: 12481 - RNA, 19 nt, Artificial Sequence
  Synthetic
guucagucaacaguaaguc

SEQ ID NO: 12482 - RNA, 19 nt, Artificial Sequence
  Synthetic
uucagucaacaguaaguca

SEQ ID NO: 12483 - RNA, 19 nt, Artificial Sequence
  Synthetic
ucagucaacaguaagucaa

SEQ ID NO: 12484 - RNA, 19 nt, Artificial Sequence
  Synthetic
cagucaacaguaagucaac

SEQ ID NO: 12485 - RNA, 19 nt, Artificial Sequence
  Synthetic
agucaacaguaagucaaca

SEQ ID NO: 12486 - RNA, 19 nt, Artificial Sequence
  Synthetic
gucaacaguaagucaacag

SEQ ID NO: 12487 - RNA, 19 nt, Artificial Sequence
  Synthetic
ucaacaguaagucaacaga

SEQ ID NO: 12488 - RNA, 19 nt, Artificial Sequence
  Synthetic
caacaguaagucaacagac

SEQ ID NO: 12489 - RNA, 19 nt, Artificial Sequence
  Synthetic
aacaguaagucaacagaca

SEQ ID NO: 12490 - RNA, 19 nt, Artificial Sequence
  Synthetic
acaguaagucaacagacag

SEQ ID NO: 12491 - RNA, 19 nt, Artificial Sequence
  Synthetic
caguaagucaacagacaga

SEQ ID NO: 12492 - RNA, 19 nt, Artificial Sequence
  Synthetic
aguaagucaacagacagac

SEQ ID NO: 12493 - RNA, 19 nt, Artificial Sequence
  Synthetic
guaagucaacagacagaca

SEQ ID NO: 12494 - RNA, 19 nt, Artificial Sequence
  Synthetic
uaagucaacagacagacau

SEQ ID NO: 12495 - RNA, 19 nt, Artificial Sequence
  Synthetic
aagucaacagacagacaug

SEQ ID NO: 12496 - RNA, 19 nt, Artificial Sequence
  Synthetic
agucaacagacagacaugu

SEQ ID NO: 12497 - RNA, 19 nt, Artificial Sequence
  Synthetic
gucaacagacagacaugua

SEQ ID NO: 12498 - RNA, 19 nt, Artificial Sequence
  Synthetic
ucaacagacagacauguaa

SEQ ID NO: 12499 - RNA, 19 nt, Artificial Sequence
  Synthetic
caacagacagacauguaag

SEQ ID NO: 12500 - RNA, 19 nt, Artificial Sequence
  Synthetic
aacagacagacauguaaga

SEQ ID NO: 12501 - RNA, 19 nt, Artificial Sequence
  Synthetic
acagacagacauguaagag

SEQ ID NO: 12502 - RNA, 19 nt, Artificial Sequence
  Synthetic
cagacagacauguaagagc

SEQ ID NO: 12503 - RNA, 19 nt, Artificial Sequence
  Synthetic
agacagacauguaagagcu

SEQ ID NO: 12504 - RNA, 19 nt, Artificial Sequence
  Synthetic
gacagacauguaagagcua

SEQ ID NO: 12505 - RNA, 19 nt, Artificial Sequence
  Synthetic
acagacauguaagagcuaa

SEQ ID NO: 12506 - RNA, 19 nt, Artificial Sequence
  Synthetic
cagacauguaagagcuaau

SEQ ID NO: 12507 - RNA, 19 nt, Artificial Sequence
  Synthetic
agacauguaagagcuaaug

SEQ ID NO: 12508 - RNA, 19 nt, Artificial Sequence
  Synthetic
gacauguaagagcuaaugu

SEQ ID NO: 12509 - RNA, 19 nt, Artificial Sequence
  Synthetic
acauguaagagcuaaugua

SEQ ID NO: 12510 - RNA, 19 nt, Artificial Sequence
  Synthetic
cauguaagagcuaauguaa

SEQ ID NO: 12511 - RNA, 19 nt, Artificial Sequence
  Synthetic
auguaagagcuaauguaag

SEQ ID NO: 12512 - RNA, 19 nt, Artificial Sequence
  Synthetic
uguaagagcuaauguaaga

SEQ ID NO: 12513 - RNA, 19 nt, Artificial Sequence
  Synthetic
guaagagcuaauguaagau

SEQ ID NO: 12514 - RNA, 19 nt, Artificial Sequence
  Synthetic
uaagagcuaauguaagaug

SEQ ID NO: 12515 - RNA, 19 nt, Artificial Sequence
  Synthetic
aagagcuaauguaagaugc

SEQ ID NO: 12516 - RNA, 19 nt, Artificial Sequence
  Synthetic
agagcuaauguaagaugcu

SEQ ID NO: 12517 - RNA, 19 nt, Artificial Sequence
  Synthetic
gagcuaauguaagaugcua

SEQ ID NO: 12518 - RNA, 19 nt, Artificial Sequence
  Synthetic
agcuaauguaagaugcuag

SEQ ID NO: 12519 - RNA, 19 nt, Artificial Sequence
  Synthetic
gcuaauguaagaugcuagg

SEQ ID NO: 12520 - RNA, 19 nt, Artificial Sequence
  Synthetic
cuaauguaagaugcuaggc

SEQ ID NO: 12521 - RNA, 19 nt, Artificial Sequence
  Synthetic
uaauguaagaugcuaggca

SEQ ID NO: 12522 - RNA, 19 nt, Artificial Sequence
  Synthetic
aauguaagaugcuaggcag

SEQ ID NO: 12523 - RNA, 19 nt, Artificial Sequence
  Synthetic
auguaagaugcuaggcaga

SEQ ID NO: 12524 - RNA, 19 nt, Artificial Sequence
  Synthetic
uguaagaugcuaggcagaa

SEQ ID NO: 12525 - RNA, 19 nt, Artificial Sequence
  Synthetic
guaagaugcuaggcagaau

SEQ ID NO: 12526 - RNA, 19 nt, Artificial Sequence
  Synthetic
uaagaugcuaggcagaaug

SEQ ID NO: 12527 - RNA, 19 nt, Artificial Sequence
  Synthetic
aagaugcuaggcagaaugc

SEQ ID NO: 12528 - RNA, 19 nt, Artificial Sequence
  Synthetic
agaugcuaggcagaaugca

SEQ ID NO: 12529 - RNA, 19 nt, Artificial Sequence
  Synthetic
gaugcuaggcagaaugcaa

SEQ ID NO: 12530 - RNA, 19 nt, Artificial Sequence
  Synthetic
augcuaggcagaaugcaag

SEQ ID NO: 12531 - RNA, 19 nt, Artificial Sequence
  Synthetic
ugcuaggcagaaugcaaga

SEQ ID NO: 12532 - RNA, 19 nt, Artificial Sequence
  Synthetic
gcuaggcagaaugcaagau

SEQ ID NO: 12533 - RNA, 19 nt, Artificial Sequence
  Synthetic
cuaggcagaaugcaagaug

SEQ ID NO: 12534 - RNA, 19 nt, Artificial Sequence
  Synthetic
uaggcagaaugcaagaugu

SEQ ID NO: 12535 - RNA, 19 nt, Artificial Sequence
  Synthetic
aggcagaaugcaagaugua

SEQ ID NO: 12536 - RNA, 19 nt, Artificial Sequence
  Synthetic
ggcagaaugcaagauguaa

SEQ ID NO: 12537 - RNA, 19 nt, Artificial Sequence
  Synthetic
gcagaaugcaagauguaag

SEQ ID NO: 12538 - RNA, 19 nt, Artificial Sequence
  Synthetic
cagaaugcaagauguaaga

SEQ ID NO: 12539 - RNA, 19 nt, Artificial Sequence
  Synthetic
agaaugcaagauguaagau

SEQ ID NO: 12540 - RNA, 19 nt, Artificial Sequence
  Synthetic
gaaugcaagauguaagaug

SEQ ID NO: 12541 - RNA, 19 nt, Artificial Sequence
  Synthetic
aaugcaagauguaagaugu

SEQ ID NO: 12542 - RNA, 19 nt, Artificial Sequence
  Synthetic
augcaagauguaagaugua

SEQ ID NO: 12543 - RNA, 19 nt, Artificial Sequence
  Synthetic
ugcaagauguaagauguaa

SEQ ID NO: 12544 - RNA, 19 nt, Artificial Sequence
  Synthetic
gcaagauguaagauguaag

SEQ ID NO: 12545 - RNA, 19 nt, Artificial Sequence
  Synthetic
caagauguaagauguaaga

SEQ ID NO: 12546 - RNA, 19 nt, Artificial Sequence
  Synthetic
aagauguaagauguaagau

SEQ ID NO: 12547 - RNA, 19 nt, Artificial Sequence
  Synthetic
agauguaagauguaagaug

SEQ ID NO: 12548 - RNA, 19 nt, Artificial Sequence
  Synthetic
gauguaagauguaagaugu

SEQ ID NO: 12549 - RNA, 19 nt, Artificial Sequence
  Synthetic
auguaagauguaagaugua

SEQ ID NO: 12550 - RNA, 19 nt, Artificial Sequence
  Synthetic
uguaagauguaagauguaa

SEQ ID NO: 12551 - RNA, 19 nt, Artificial Sequence
  Synthetic
guaagauguaagauguaag

SEQ ID NO: 12552 - RNA, 19 nt, Artificial Sequence
  Synthetic
uaagauguaagauguaaga

SEQ ID NO: 12553 - RNA, 19 nt, Artificial Sequence
  Synthetic
aagauguaagauguaagau

SEQ ID NO: 12554 - RNA, 19 nt, Artificial Sequence
  Synthetic
agauguaagauguaagaug

SEQ ID NO: 12555 - RNA, 19 nt, Artificial Sequence
  Synthetic
gauguaagauguaagaugu

SEQ ID NO: 12556 - RNA, 19 nt, Artificial Sequence
  Synthetic
auguaagauguaagaugua

SEQ ID NO: 12557 - RNA, 19 nt, Artificial Sequence
  Synthetic
uguaagauguaagauguaa

SEQ ID NO: 12558 - RNA, 19 nt, Artificial Sequence
  Synthetic
guaagauguaagauguaag

SEQ ID NO: 12559 - RNA, 19 nt, Artificial Sequence
  Synthetic
uaagauguaagauguaagc

SEQ ID NO: 12560 - RNA, 19 nt, Artificial Sequence
  Synthetic
aagauguaagauguaagca

SEQ ID NO: 12561 - RNA, 19 nt, Artificial Sequence
  Synthetic
agauguaagauguaagcau

SEQ ID NO: 12562 - RNA, 19 nt, Artificial Sequence
  Synthetic
gauguaagauguaagcaug

SEQ ID NO: 12563 - RNA, 19 nt, Artificial Sequence
  Synthetic
auguaagauguaagcaugu

SEQ ID NO: 12564 - RNA, 19 nt, Artificial Sequence
  Synthetic
uguaagauguaagcaugua

SEQ ID NO: 12565 - RNA, 19 nt, Artificial Sequence
  Synthetic
guaagauguaagcauguaa

SEQ ID NO: 12566 - RNA, 19 nt, Artificial Sequence
  Synthetic
uaagauguaagcauguaag

SEQ ID NO: 12567 - RNA, 19 nt, Artificial Sequence
  Synthetic
aagauguaagcauguaaga

SEQ ID NO: 12568 - RNA, 19 nt, Artificial Sequence
  Synthetic
agauguaagcauguaagau

SEQ ID NO: 12569 - RNA, 19 nt, Artificial Sequence
  Synthetic
gauguaagcauguaagaug

SEQ ID NO: 12570 - RNA, 19 nt, Artificial Sequence
  Synthetic
auguaagcauguaagaugc

SEQ ID NO: 12571 - RNA, 19 nt, Artificial Sequence
  Synthetic
uguaagcauguaagaugcu

SEQ ID NO: 12572 - RNA, 19 nt, Artificial Sequence
  Synthetic
guaagcauguaagaugcua

SEQ ID NO: 12573 - RNA, 19 nt, Artificial Sequence
  Synthetic
uaagcauguaagaugcuag

SEQ ID NO: 12574 - RNA, 19 nt, Artificial Sequence
  Synthetic
aagcauguaagaugcuagg

SEQ ID NO: 12575 - RNA, 19 nt, Artificial Sequence
  Synthetic
agcauguaagaugcuaggc

SEQ ID NO: 12576 - RNA, 19 nt, Artificial Sequence
  Synthetic
gcauguaagaugcuaggca

SEQ ID NO: 12577 - RNA, 19 nt, Artificial Sequence
  Synthetic
cauguaagaugcuaggcag

SEQ ID NO: 12578 - RNA, 19 nt, Artificial Sequence
  Synthetic
auguaagaugcuaggcaga

SEQ ID NO: 12579 - RNA, 19 nt, Artificial Sequence
  Synthetic
uguaagaugcuaggcagaa

SEQ ID NO: 12580 - RNA, 19 nt, Artificial Sequence
  Synthetic
guaagaugcuaggcagaau

SEQ ID NO: 12581 - RNA, 19 nt, Artificial Sequence
  Synthetic
uaagaugcuaggcagaauc

SEQ ID NO: 12582 - RNA, 19 nt, Artificial Sequence
  Synthetic
aagaugcuaggcagaaucc

SEQ ID NO: 12583 - RNA, 19 nt, Artificial Sequence
  Synthetic
agaugcuaggcagaaucca

SEQ ID NO: 12584 - RNA, 19 nt, Artificial Sequence
  Synthetic
gaugcuaggcagaauccag

SEQ ID NO: 12585 - RNA, 19 nt, Artificial Sequence
  Synthetic
augcuaggcagaauccaga

SEQ ID NO: 12586 - RNA, 19 nt, Artificial Sequence
  Synthetic
ugcuaggcagaauccagag

SEQ ID NO: 12587 - RNA, 19 nt, Artificial Sequence
  Synthetic
gcuaggcagaauccagaga

SEQ ID NO: 12588 - RNA, 19 nt, Artificial Sequence
  Synthetic
cuaggcagaauccagagac

SEQ ID NO: 12589 - RNA, 19 nt, Artificial Sequence
  Synthetic
uaggcagaauccagagaca

SEQ ID NO: 12590 - RNA, 19 nt, Artificial Sequence
  Synthetic
aggcagaauccagagacaa

SEQ ID NO: 12591 - RNA, 19 nt, Artificial Sequence
  Synthetic
ggcagaauccagagacaaa

SEQ ID NO: 12592 - RNA, 19 nt, Artificial Sequence
  Synthetic
gcagaauccagagacaaag

SEQ ID NO: 12593 - RNA, 19 nt, Artificial Sequence
  Synthetic
cagaauccagagacaaagu

SEQ ID NO: 12594 - RNA, 19 nt, Artificial Sequence
  Synthetic
agaauccagagacaaaguu

SEQ ID NO: 12595 - RNA, 19 nt, Artificial Sequence
  Synthetic
gaauccagagacaaaguug

SEQ ID NO: 12596 - RNA, 19 nt, Artificial Sequence
  Synthetic
aauccagagacaaaguugg

SEQ ID NO: 12597 - RNA, 19 nt, Artificial Sequence
  Synthetic
auccagagacaaaguugga

SEQ ID NO: 12598 - RNA, 19 nt, Artificial Sequence
  Synthetic
uccagagacaaaguuggaa

SEQ ID NO: 12599 - RNA, 19 nt, Artificial Sequence
  Synthetic
ccagagacaaaguuggaag

SEQ ID NO: 12600 - RNA, 19 nt, Artificial Sequence
  Synthetic
cagagacaaaguuggaaga

SEQ ID NO: 12601 - RNA, 19 nt, Artificial Sequence
  Synthetic
agagacaaaguuggaagau

SEQ ID NO: 12602 - RNA, 19 nt, Artificial Sequence
  Synthetic
gagacaaaguuggaagaug

SEQ ID NO: 12603 - RNA, 19 nt, Artificial Sequence
  Synthetic
agacaaaguuggaagaugu

SEQ ID NO: 12604 - RNA, 19 nt, Artificial Sequence
  Synthetic
gacaaaguuggaagauguc

SEQ ID NO: 12605 - RNA, 19 nt, Artificial Sequence
  Synthetic
acaaaguuggaagauguca

SEQ ID NO: 12606 - RNA, 19 nt, Artificial Sequence
  Synthetic
caaaguuggaagaugucac

SEQ ID NO: 12607 - RNA, 19 nt, Artificial Sequence
  Synthetic
aaaguuggaagaugucacc

SEQ ID NO: 12608 - RNA, 19 nt, Artificial Sequence
  Synthetic
aaguuggaagaugucaccc

SEQ ID NO: 12609 - RNA, 19 nt, Artificial Sequence
  Synthetic
aguuggaagaugucacccu

SEQ ID NO: 12610 - RNA, 19 nt, Artificial Sequence
  Synthetic
guuggaagaugucacccug

SEQ ID NO: 12611 - RNA, 19 nt, Artificial Sequence
  Synthetic
uuggaagaugucacccugu

SEQ ID NO: 12612 - RNA, 19 nt, Artificial Sequence
  Synthetic
uggaagaugucacccugug

SEQ ID NO: 12613 - RNA, 19 nt, Artificial Sequence
  Synthetic
ggaagaugucacccugugu

SEQ ID NO: 12614 - RNA, 19 nt, Artificial Sequence
  Synthetic
gaagaugucacccugugua

SEQ ID NO: 12615 - RNA, 19 nt, Artificial Sequence
  Synthetic
aagaugucacccuguguaa

SEQ ID NO: 12616 - RNA, 19 nt, Artificial Sequence
  Synthetic
agaugucacccuguguaac

SEQ ID NO: 12617 - RNA, 19 nt, Artificial Sequence
  Synthetic
gaugucacccuguguaaca

SEQ ID NO: 12618 - RNA, 19 nt, Artificial Sequence
  Synthetic
augucacccuguguaacag

SEQ ID NO: 12619 - RNA, 19 nt, Artificial Sequence
  Synthetic
ugucacccuguguaacaga

SEQ ID NO: 12620 - RNA, 19 nt, Artificial Sequence
  Synthetic
gucacccuguguaacagaa

SEQ ID NO: 12621 - RNA, 19 nt, Artificial Sequence
  Synthetic
ucacccuguguaacagaag

SEQ ID NO: 12622 - RNA, 19 nt, Artificial Sequence
  Synthetic
cacccuguguaacagaagu

SEQ ID NO: 12623 - RNA, 19 nt, Artificial Sequence
  Synthetic
acccuguguaacagaaguu

SEQ ID NO: 12624 - RNA, 19 nt, Artificial Sequence
  Synthetic
cccuguguaacagaaguuu

SEQ ID NO: 12625 - RNA, 19 nt, Artificial Sequence
  Synthetic
ccuguguaacagaaguuuc

SEQ ID NO: 12626 - RNA, 19 nt, Artificial Sequence
  Synthetic
cuguguaacagaaguuucu

SEQ ID NO: 12627 - RNA, 19 nt, Artificial Sequence
  Synthetic
uguguaacagaaguuucua

SEQ ID NO: 12628 - RNA, 19 nt, Artificial Sequence
  Synthetic
guguaacagaaguuucuag

SEQ ID NO: 12629 - RNA, 19 nt, Artificial Sequence
  Synthetic
uguaacagaaguuucuagg

SEQ ID NO: 12630 - RNA, 19 nt, Artificial Sequence
  Synthetic
guaacagaaguuucuagga

SEQ ID NO: 12631 - RNA, 19 nt, Artificial Sequence
  Synthetic
uaacagaaguuucuaggac

SEQ ID NO: 12632 - RNA, 19 nt, Artificial Sequence
  Synthetic
aacagaaguuucuaggacu

SEQ ID NO: 12633 - RNA, 19 nt, Artificial Sequence
  Synthetic
acagaaguuucuaggacuc

SEQ ID NO: 12634 - RNA, 19 nt, Artificial Sequence
  Synthetic
cagaaguuucuaggacucu

SEQ ID NO: 12635 - RNA, 19 nt, Artificial Sequence
  Synthetic
agaaguuucuaggacucug

SEQ ID NO: 12636 - RNA, 19 nt, Artificial Sequence
  Synthetic
gaaguuucuaggacucugc

SEQ ID NO: 12637 - RNA, 19 nt, Artificial Sequence
  Synthetic
aaguuucuaggacucugca

SEQ ID NO: 12638 - RNA, 19 nt, Artificial Sequence
  Synthetic
aguuucuaggacucugcac

SEQ ID NO: 12639 - RNA, 19 nt, Artificial Sequence
  Synthetic
guuucuaggacucugcaca

SEQ ID NO: 12640 - RNA, 19 nt, Artificial Sequence
  Synthetic
uuucuaggacucugcacac

SEQ ID NO: 12641 - RNA, 19 nt, Artificial Sequence
  Synthetic
uucuaggacucugcacacu

SEQ ID NO: 12642 - RNA, 19 nt, Artificial Sequence
  Synthetic
ucuaggacucugcacacua

SEQ ID NO: 12643 - RNA, 19 nt, Artificial Sequence
  Synthetic
cuaggacucugcacacuau

SEQ ID NO: 12644 - RNA, 19 nt, Artificial Sequence
  Synthetic
uaggacucugcacacuaug

SEQ ID NO: 12645 - RNA, 19 nt, Artificial Sequence
  Synthetic
aggacucugcacacuaugc

SEQ ID NO: 12646 - RNA, 19 nt, Artificial Sequence
  Synthetic
ggacucugcacacuaugca

SEQ ID NO: 12647 - RNA, 19 nt, Artificial Sequence
  Synthetic
gacucugcacacuaugcau

SEQ ID NO: 12648 - RNA, 19 nt, Artificial Sequence
  Synthetic
acucugcacacuaugcaua

SEQ ID NO: 12649 - RNA, 19 nt, Artificial Sequence
  Synthetic
cucugcacacuaugcauau

SEQ ID NO: 12650 - RNA, 19 nt, Artificial Sequence
  Synthetic
ucugcacacuaugcauauu

SEQ ID NO: 12651 - RNA, 19 nt, Artificial Sequence
  Synthetic
cugcacacuaugcauauua

SEQ ID NO: 12652 - RNA, 19 nt, Artificial Sequence
  Synthetic
ugcacacuaugcauauuaa

SEQ ID NO: 12653 - RNA, 19 nt, Artificial Sequence
  Synthetic
gcacacuaugcauauuaau

SEQ ID NO: 12654 - RNA, 19 nt, Artificial Sequence
  Synthetic
cacacuaugcauauuaaua

SEQ ID NO: 12655 - RNA, 19 nt, Artificial Sequence
  Synthetic
acacuaugcauauuaauaa

SEQ ID NO: 12656 - RNA, 19 nt, Artificial Sequence
  Synthetic
cacuaugcauauuaauaac

SEQ ID NO: 12657 - RNA, 19 nt, Artificial Sequence
  Synthetic
acuaugcauauuaauaacg

SEQ ID NO: 12658 - RNA, 19 nt, Artificial Sequence
  Synthetic
cuaugcauauuaauaacgu

SEQ ID NO: 12659 - RNA, 19 nt, Artificial Sequence
  Synthetic
uaugcauauuaauaacgua

SEQ ID NO: 12660 - RNA, 19 nt, Artificial Sequence
  Synthetic
augcauauuaauaacguau

SEQ ID NO: 12661 - RNA, 19 nt, Artificial Sequence
  Synthetic
ugcauauuaauaacguauu

SEQ ID NO: 12662 - RNA, 19 nt, Artificial Sequence
  Synthetic
gcauauuaauaacguauuu

SEQ ID NO: 12663 - RNA, 19 nt, Artificial Sequence
  Synthetic
cauauuaauaacguauuua

SEQ ID NO: 12664 - RNA, 19 nt, Artificial Sequence
  Synthetic
auauuaauaacguauuuaa

SEQ ID NO: 12665 - RNA, 19 nt, Artificial Sequence
  Synthetic
uauuaauaacguauuuaaa

SEQ ID NO: 12666 - RNA, 19 nt, Artificial Sequence
  Synthetic
auuaauaacguauuuaaag

SEQ ID NO: 12667 - RNA, 19 nt, Artificial Sequence
  Synthetic
uuaauaacguauuuaaaga

SEQ ID NO: 12668 - RNA, 19 nt, Artificial Sequence
  Synthetic
uaauaacguauuuaaagag

SEQ ID NO: 12669 - RNA, 19 nt, Artificial Sequence
  Synthetic
aauaacguauuuaaagagg

SEQ ID NO: 12670 - RNA, 19 nt, Artificial Sequence
  Synthetic
auaacguauuuaaagaggg

SEQ ID NO: 12671 - RNA, 19 nt, Artificial Sequence
  Synthetic
uaacguauuuaaagaggga

SEQ ID NO: 12672 - RNA, 19 nt, Artificial Sequence
  Synthetic
aacguauuuaaagagggaa

SEQ ID NO: 12673 - RNA, 19 nt, Artificial Sequence
  Synthetic
acguauuuaaagagggaac

SEQ ID NO: 12674 - RNA, 19 nt, Artificial Sequence
  Synthetic
cguauuuaaagagggaacu

SEQ ID NO: 12675 - RNA, 19 nt, Artificial Sequence
  Synthetic
guauuuaaagagggaacuu

SEQ ID NO: 12676 - RNA, 19 nt, Artificial Sequence
  Synthetic
uauuuaaagagggaacuug

SEQ ID NO: 12677 - RNA, 19 nt, Artificial Sequence
  Synthetic
auuuaaagagggaacuuga

SEQ ID NO: 12678 - RNA, 19 nt, Artificial Sequence
  Synthetic
uuuaaagagggaacuugaa

SEQ ID NO: 12679 - RNA, 19 nt, Artificial Sequence
  Synthetic
uuaaagagggaacuugaag

SEQ ID NO: 12680 - RNA, 19 nt, Artificial Sequence
  Synthetic
uaaagagggaacuugaaga

SEQ ID NO: 12681 - RNA, 19 nt, Artificial Sequence
  Synthetic
aaagagggaacuugaagac

SEQ ID NO: 12682 - RNA, 19 nt, Artificial Sequence
  Synthetic
aagagggaacuugaagaca

SEQ ID NO: 12683 - RNA, 19 nt, Artificial Sequence
  Synthetic
agagggaacuugaagacag

SEQ ID NO: 12684 - RNA, 19 nt, Artificial Sequence
  Synthetic
gagggaacuugaagacagu

SEQ ID NO: 12685 - RNA, 19 nt, Artificial Sequence
  Synthetic
agggaacuugaagacaguu

SEQ ID NO: 12686 - RNA, 19 nt, Artificial Sequence
  Synthetic
gggaacuugaagacaguuu

SEQ ID NO: 12687 - RNA, 19 nt, Artificial Sequence
  Synthetic
ggaacuugaagacaguuua

SEQ ID NO: 12688 - RNA, 19 nt, Artificial Sequence
  Synthetic
gaacuugaagacaguuuag

SEQ ID NO: 12689 - RNA, 19 nt, Artificial Sequence
  Synthetic
aacuugaagacaguuuagg

SEQ ID NO: 12690 - RNA, 19 nt, Artificial Sequence
  Synthetic
acuugaagacaguuuaggc

SEQ ID NO: 12691 - RNA, 19 nt, Artificial Sequence
  Synthetic
cuugaagacaguuuaggca

SEQ ID NO: 12692 - RNA, 19 nt, Artificial Sequence
  Synthetic
uugaagacaguuuaggcag

SEQ ID NO: 12693 - RNA, 19 nt, Artificial Sequence
  Synthetic
ugaagacaguuuaggcagg

SEQ ID NO: 12694 - RNA, 19 nt, Artificial Sequence
  Synthetic
gaagacaguuuaggcagga

SEQ ID NO: 12695 - RNA, 19 nt, Artificial Sequence
  Synthetic
aagacaguuuaggcaggag

SEQ ID NO: 12696 - RNA, 19 nt, Artificial Sequence
  Synthetic
agacaguuuaggcaggaga

SEQ ID NO: 12697 - RNA, 19 nt, Artificial Sequence
  Synthetic
gacaguuuaggcaggagau

SEQ ID NO: 12698 - RNA, 19 nt, Artificial Sequence
  Synthetic
acaguuuaggcaggagauu

SEQ ID NO: 12699 - RNA, 19 nt, Artificial Sequence
  Synthetic
caguuuaggcaggagauua

SEQ ID NO: 12700 - RNA, 19 nt, Artificial Sequence
  Synthetic
aguuuaggcaggagauuaa

SEQ ID NO: 12701 - RNA, 19 nt, Artificial Sequence
  Synthetic
guuuaggcaggagauuaag

SEQ ID NO: 12702 - RNA, 19 nt, Artificial Sequence
  Synthetic
uuuaggcaggagauuaagg

SEQ ID NO: 12703 - RNA, 19 nt, Artificial Sequence
  Synthetic
uuaggcaggagauuaagga

SEQ ID NO: 12704 - RNA, 19 nt, Artificial Sequence
  Synthetic
uaggcaggagauuaaggag

SEQ ID NO: 12705 - RNA, 19 nt, Artificial Sequence
  Synthetic
aggcaggagauuaaggaga

SEQ ID NO: 12706 - RNA, 19 nt, Artificial Sequence
  Synthetic
ggcaggagauuaaggagac

SEQ ID NO: 12707 - RNA, 19 nt, Artificial Sequence
  Synthetic
gcaggagauuaaggagacc

SEQ ID NO: 12708 - RNA, 19 nt, Artificial Sequence
  Synthetic
caggagauuaaggagaccu

SEQ ID NO: 12709 - RNA, 19 nt, Artificial Sequence
  Synthetic
aggagauuaaggagaccuc

SEQ ID NO: 12710 - RNA, 19 nt, Artificial Sequence
  Synthetic
ggagauuaaggagaccucu

SEQ ID NO: 12711 - RNA, 19 nt, Artificial Sequence
  Synthetic
gagauuaaggagaccucuc

SEQ ID NO: 12712 - RNA, 19 nt, Artificial Sequence
  Synthetic
agauuaaggagaccucuca

SEQ ID NO: 12713 - RNA, 19 nt, Artificial Sequence
  Synthetic
gauuaaggagaccucucau

SEQ ID NO: 12714 - RNA, 19 nt, Artificial Sequence
  Synthetic
auuaaggagaccucucaug

SEQ ID NO: 12715 - RNA, 19 nt, Artificial Sequence
  Synthetic
uuaaggagaccucucaugu

SEQ ID NO: 12716 - RNA, 19 nt, Artificial Sequence
  Synthetic
uaaggagaccucucaugug

SEQ ID NO: 12717 - RNA, 19 nt, Artificial Sequence
  Synthetic
aaggagaccucucaugugu

SEQ ID NO: 12718 - RNA, 19 nt, Artificial Sequence
  Synthetic
aggagaccucucauguguu

SEQ ID NO: 12719 - RNA, 19 nt, Artificial Sequence
  Synthetic
ggagaccucucauguguuu

SEQ ID NO: 12720 - RNA, 19 nt, Artificial Sequence
  Synthetic
gagaccucucauguguuuu

SEQ ID NO: 12721 - RNA, 19 nt, Artificial Sequence
  Synthetic
agaccucucauguguuuuc

SEQ ID NO: 12722 - RNA, 19 nt, Artificial Sequence
  Synthetic
gaccucucauguguuuuca

SEQ ID NO: 12723 - RNA, 19 nt, Artificial Sequence
  Synthetic
accucucauguguuuucau

SEQ ID NO: 12724 - RNA, 19 nt, Artificial Sequence
  Synthetic
ccucucauguguuuucaug

SEQ ID NO: 12725 - RNA, 19 nt, Artificial Sequence
  Synthetic
cucucauguguuuucaugu

SEQ ID NO: 12726 - RNA, 19 nt, Artificial Sequence
  Synthetic
ucucauguguuuucaugug

SEQ ID NO: 12727 - RNA, 19 nt, Artificial Sequence
  Synthetic
cucauguguuuucaugugu

SEQ ID NO: 12728 - RNA, 19 nt, Artificial Sequence
  Synthetic
ucauguguuuucauguguu

SEQ ID NO: 12729 - RNA, 19 nt, Artificial Sequence
  Synthetic
cauguguuuucauguguug

SEQ ID NO: 12730 - RNA, 19 nt, Artificial Sequence
  Synthetic
auguguuuucauguguugu

SEQ ID NO: 12731 - RNA, 19 nt, Artificial Sequence
  Synthetic
uguguuuucauguguuguc

SEQ ID NO: 12732 - RNA, 19 nt, Artificial Sequence
  Synthetic
guguuuucauguguuguca

SEQ ID NO: 12733 - RNA, 19 nt, Artificial Sequence
  Synthetic
uguuuucauguguugucau

SEQ ID NO: 12734 - RNA, 19 nt, Artificial Sequence
  Synthetic
guuuucauguguugucaua

SEQ ID NO: 12735 - RNA, 19 nt, Artificial Sequence
  Synthetic
uuuucauguguugucauag

SEQ ID NO: 12736 - RNA, 19 nt, Artificial Sequence
  Synthetic
uuucauguguugucauagc

SEQ ID NO: 12737 - RNA, 19 nt, Artificial Sequence
  Synthetic
uucauguguugucauagcc

SEQ ID NO: 12738 - RNA, 19 nt, Artificial Sequence
  Synthetic
ucauguguugucauagccc

SEQ ID NO: 12739 - RNA, 19 nt, Artificial Sequence
  Synthetic
cauguguugucauagcccc

SEQ ID NO: 12740 - RNA, 19 nt, Artificial Sequence
  Synthetic
auguguugucauagcccca

SEQ ID NO: 12741 - RNA, 19 nt, Artificial Sequence
  Synthetic
uguguugucauagccccau

SEQ ID NO: 12742 - RNA, 19 nt, Artificial Sequence
  Synthetic
guguugucauagccccaug

SEQ ID NO: 12743 - RNA, 19 nt, Artificial Sequence
  Synthetic
uguugucauagccccaugu

SEQ ID NO: 12744 - RNA, 19 nt, Artificial Sequence
  Synthetic
guugucauagccccauguu

SEQ ID NO: 12745 - RNA, 19 nt, Artificial Sequence
  Synthetic
uugucauagccccauguuu

SEQ ID NO: 12746 - RNA, 19 nt, Artificial Sequence
  Synthetic
ugucauagccccauguuug

SEQ ID NO: 12747 - RNA, 19 nt, Artificial Sequence
  Synthetic
gucauagccccauguuugg

SEQ ID NO: 12748 - RNA, 19 nt, Artificial Sequence
  Synthetic
ucauagccccauguuugga

SEQ ID NO: 12749 - RNA, 19 nt, Artificial Sequence
  Synthetic
cauagccccauguuuggaa

SEQ ID NO: 12750 - RNA, 19 nt, Artificial Sequence
  Synthetic
auagccccauguuuggaaa

SEQ ID NO: 12751 - RNA, 19 nt, Artificial Sequence
  Synthetic
uagccccauguuuggaaau

SEQ ID NO: 12752 - RNA, 19 nt, Artificial Sequence
  Synthetic
agccccauguuuggaaaug

SEQ ID NO: 12753 - RNA, 19 nt, Artificial Sequence
  Synthetic
gccccauguuuggaaauga

SEQ ID NO: 12754 - RNA, 19 nt, Artificial Sequence
  Synthetic
ccccauguuuggaaaugac

SEQ ID NO: 12755 - RNA, 19 nt, Artificial Sequence
  Synthetic
cccauguuuggaaaugaca

SEQ ID NO: 12756 - RNA, 19 nt, Artificial Sequence
  Synthetic
ccauguuuggaaaugacaa

SEQ ID NO: 12757 - RNA, 19 nt, Artificial Sequence
  Synthetic
cauguuuggaaaugacaau

SEQ ID NO: 12758 - RNA, 19 nt, Artificial Sequence
  Synthetic
auguuuggaaaugacaaua

SEQ ID NO: 12759 - RNA, 19 nt, Artificial Sequence
  Synthetic
uguuuggaaaugacaauau

SEQ ID NO: 12760 - RNA, 19 nt, Artificial Sequence
  Synthetic
guuuggaaaugacaauaug

SEQ ID NO: 12761 - RNA, 19 nt, Artificial Sequence
  Synthetic
uuuggaaaugacaauaugu

SEQ ID NO: 12762 - RNA, 19 nt, Artificial Sequence
  Synthetic
uuggaaaugacaauaugug

SEQ ID NO: 12763 - RNA, 19 nt, Artificial Sequence
  Synthetic
uggaaaugacaauauguga

SEQ ID NO: 12764 - RNA, 19 nt, Artificial Sequence
  Synthetic
ggaaaugacaauaugugac

SEQ ID NO: 12765 - RNA, 19 nt, Artificial Sequence
  Synthetic
gaaaugacaauaugugaca

SEQ ID NO: 12766 - RNA, 19 nt, Artificial Sequence
  Synthetic
aaaugacaauaugugacac

SEQ ID NO: 12767 - RNA, 19 nt, Artificial Sequence
  Synthetic
aaugacaauaugugacaca

SEQ ID NO: 12768 - RNA, 19 nt, Artificial Sequence
  Synthetic
augacaauaugugacacaa

SEQ ID NO: 12769 - RNA, 19 nt, Artificial Sequence
  Synthetic
ugacaauaugugacacaag

SEQ ID NO: 12770 - RNA, 19 nt, Artificial Sequence
  Synthetic
gacaauaugugacacaaga

SEQ ID NO: 12771 - RNA, 19 nt, Artificial Sequence
  Synthetic
acaauaugugacacaagag

SEQ ID NO: 12772 - RNA, 19 nt, Artificial Sequence
  Synthetic
caauaugugacacaagagu

SEQ ID NO: 12773 - RNA, 19 nt, Artificial Sequence
  Synthetic
aauaugugacacaagagug

SEQ ID NO: 12774 - RNA, 19 nt, Artificial Sequence
  Synthetic
auaugugacacaagagugu

SEQ ID NO: 12775 - RNA, 19 nt, Artificial Sequence
  Synthetic
uaugugacacaagaguguc

SEQ ID NO: 12776 - RNA, 19 nt, Artificial Sequence
  Synthetic
augugacacaagaguguca

SEQ ID NO: 12777 - RNA, 19 nt, Artificial Sequence
  Synthetic
ugugacacaagagugucaa

SEQ ID NO: 12778 - RNA, 19 nt, Artificial Sequence
  Synthetic
gugacacaagagugucaaa

SEQ ID NO: 12779 - RNA, 19 nt, Artificial Sequence
  Synthetic
ugacacaagagugucaaaa

SEQ ID NO: 12780 - RNA, 19 nt, Artificial Sequence
  Synthetic
gacacaagagugucaaaau

SEQ ID NO: 12781 - RNA, 19 nt, Artificial Sequence
  Synthetic
acacaagagugucaaaaug

SEQ ID NO: 12782 - RNA, 19 nt, Artificial Sequence
  Synthetic
cacaagagugucaaaauga

SEQ ID NO: 12783 - RNA, 19 nt, Artificial Sequence
  Synthetic
acaagagugucaaaaugaa

SEQ ID NO: 12784 - RNA, 19 nt, Artificial Sequence
  Synthetic
caagagugucaaaaugaag

SEQ ID NO: 12785 - RNA, 19 nt, Artificial Sequence
  Synthetic
aagagugucaaaaugaaga

SEQ ID NO: 12786 - RNA, 19 nt, Artificial Sequence
  Synthetic
agagugucaaaaugaagac

SEQ ID NO: 12787 - RNA, 19 nt, Artificial Sequence
  Synthetic
gagugucaaaaugaagaca

SEQ ID NO: 12788 - RNA, 19 nt, Artificial Sequence
  Synthetic
agugucaaaaugaagacac

SEQ ID NO: 12789 - RNA, 19 nt, Artificial Sequence
  Synthetic
gugucaaaaugaagacacc

SEQ ID NO: 12790 - RNA, 19 nt, Artificial Sequence
  Synthetic
ugucaaaaugaagacacca

SEQ ID NO: 12791 - RNA, 19 nt, Artificial Sequence
  Synthetic
gucaaaaugaagacaccag

SEQ ID NO: 12792 - RNA, 19 nt, Artificial Sequence
  Synthetic
ucaaaaugaagacaccaga

SEQ ID NO: 12793 - RNA, 19 nt, Artificial Sequence
  Synthetic
caaaaugaagacaccagag

SEQ ID NO: 12794 - RNA, 19 nt, Artificial Sequence
  Synthetic
aaaaugaagacaccagagg

SEQ ID NO: 12795 - RNA, 19 nt, Artificial Sequence
  Synthetic
aaaugaagacaccagagga

SEQ ID NO: 12796 - RNA, 19 nt, Artificial Sequence
  Synthetic
aaugaagacaccagaggau

SEQ ID NO: 12797 - RNA, 19 nt, Artificial Sequence
  Synthetic
augaagacaccagaggaug

SEQ ID NO: 12798 - RNA, 19 nt, Artificial Sequence
  Synthetic
ugaagacaccagaggauga

SEQ ID NO: 12799 - RNA, 19 nt, Artificial Sequence
  Synthetic
gaagacaccagaggaugac

SEQ ID NO: 12800 - RNA, 19 nt, Artificial Sequence
  Synthetic
aagacaccagaggaugaca

SEQ ID NO: 12801 - RNA, 19 nt, Artificial Sequence
  Synthetic
agacaccagaggaugacaa

SEQ ID NO: 12802 - RNA, 19 nt, Artificial Sequence
  Synthetic
gacaccagaggaugacaac

SEQ ID NO: 12803 - RNA, 19 nt, Artificial Sequence
  Synthetic
acaccagaggaugacaaca

SEQ ID NO: 12804 - RNA, 19 nt, Artificial Sequence
  Synthetic
caccagaggaugacaacag

SEQ ID NO: 12805 - RNA, 19 nt, Artificial Sequence
  Synthetic
accagaggaugacaacagu

SEQ ID NO: 12806 - RNA, 19 nt, Artificial Sequence
  Synthetic
ccagaggaugacaacaguc

SEQ ID NO: 12807 - RNA, 19 nt, Artificial Sequence
  Synthetic
cagaggaugacaacaguca

SEQ ID NO: 12808 - RNA, 19 nt, Artificial Sequence
  Synthetic
agaggaugacaacagucaa

SEQ ID NO: 12809 - RNA, 19 nt, Artificial Sequence
  Synthetic
gaggaugacaacagucaau

SEQ ID NO: 12810 - RNA, 19 nt, Artificial Sequence
  Synthetic
aggaugacaacagucaauc

SEQ ID NO: 12811 - RNA, 19 nt, Artificial Sequence
  Synthetic
ggaugacaacagucaauca

SEQ ID NO: 12812 - RNA, 19 nt, Artificial Sequence
  Synthetic
gaugacaacagucaaucaa

SEQ ID NO: 12813 - RNA, 19 nt, Artificial Sequence
  Synthetic
augacaacagucaaucaaa

SEQ ID NO: 12814 - RNA, 19 nt, Artificial Sequence
  Synthetic
ugacaacagucaaucaaag

SEQ ID NO: 12815 - RNA, 19 nt, Artificial Sequence
  Synthetic
gacaacagucaaucaaagc

SEQ ID NO: 12816 - RNA, 19 nt, Artificial Sequence
  Synthetic
acaacagucaaucaaagcc

SEQ ID NO: 12817 - RNA, 19 nt, Artificial Sequence
  Synthetic
caacagucaaucaaagccc

SEQ ID NO: 12818 - RNA, 19 nt, Artificial Sequence
  Synthetic
aacagucaaucaaagccca

SEQ ID NO: 12819 - RNA, 19 nt, Artificial Sequence
  Synthetic
acagucaaucaaagcccag

SEQ ID NO: 12820 - RNA, 19 nt, Artificial Sequence
  Synthetic
cagucaaucaaagcccagu

SEQ ID NO: 12821 - RNA, 19 nt, Artificial Sequence
  Synthetic
agucaaucaaagcccagua

SEQ ID NO: 12822 - RNA, 19 nt, Artificial Sequence
  Synthetic
gucaaucaaagcccaguag

SEQ ID NO: 12823 - RNA, 19 nt, Artificial Sequence
  Synthetic
ucaaucaaagcccaguaga

SEQ ID NO: 12824 - RNA, 19 nt, Artificial Sequence
  Synthetic
caaucaaagcccaguagaa

SEQ ID NO: 12825 - RNA, 19 nt, Artificial Sequence
  Synthetic
aaucaaagcccaguagaau

SEQ ID NO: 12826 - RNA, 19 nt, Artificial Sequence
  Synthetic
aucaaagcccaguagaauc

SEQ ID NO: 12827 - RNA, 19 nt, Artificial Sequence
  Synthetic
ucaaagcccaguagaaucu

SEQ ID NO: 12828 - RNA, 19 nt, Artificial Sequence
  Synthetic
caaagcccaguagaaucua

SEQ ID NO: 12829 - RNA, 19 nt, Artificial Sequence
  Synthetic
aaagcccaguagaaucuag

SEQ ID NO: 12830 - RNA, 19 nt, Artificial Sequence
  Synthetic
aagcccaguagaaucuagg

SEQ ID NO: 12831 - RNA, 19 nt, Artificial Sequence
  Synthetic
agcccaguagaaucuagga

SEQ ID NO: 12832 - RNA, 19 nt, Artificial Sequence
  Synthetic
gcccaguagaaucuaggaa

SEQ ID NO: 12833 - RNA, 19 nt, Artificial Sequence
  Synthetic
cccaguagaaucuaggaac

SEQ ID NO: 12834 - RNA, 19 nt, Artificial Sequence
  Synthetic
ccaguagaaucuaggaacu

SEQ ID NO: 12835 - RNA, 19 nt, Artificial Sequence
  Synthetic
caguagaaucuaggaacug

SEQ ID NO: 12836 - RNA, 19 nt, Artificial Sequence
  Synthetic
aguagaaucuaggaacugg

SEQ ID NO: 12837 - RNA, 19 nt, Artificial Sequence
  Synthetic
guagaaucuaggaacugga

SEQ ID NO: 12838 - RNA, 19 nt, Artificial Sequence
  Synthetic
uagaaucuaggaacuggaa

SEQ ID NO: 12839 - RNA, 19 nt, Artificial Sequence
  Synthetic
agaaucuaggaacuggaag

SEQ ID NO: 12840 - RNA, 19 nt, Artificial Sequence
  Synthetic
gaaucuaggaacuggaagc

SEQ ID NO: 12841 - RNA, 19 nt, Artificial Sequence
  Synthetic
aaucuaggaacuggaagca

SEQ ID NO: 12842 - RNA, 19 nt, Artificial Sequence
  Synthetic
aucuaggaacuggaagcaa

SEQ ID NO: 12843 - RNA, 19 nt, Artificial Sequence
  Synthetic
ucuaggaacuggaagcaag

SEQ ID NO: 12844 - RNA, 19 nt, Artificial Sequence
  Synthetic
cuaggaacuggaagcaagg

SEQ ID NO: 12845 - RNA, 19 nt, Artificial Sequence
  Synthetic
uaggaacuggaagcaagga

SEQ ID NO: 12846 - RNA, 19 nt, Artificial Sequence
  Synthetic
aggaacuggaagcaaggaa

SEQ ID NO: 12847 - RNA, 19 nt, Artificial Sequence
  Synthetic
ggaacuggaagcaaggaag

SEQ ID NO: 12848 - RNA, 19 nt, Artificial Sequence
  Synthetic
gaacuggaagcaaggaagg

SEQ ID NO: 12849 - RNA, 19 nt, Artificial Sequence
  Synthetic
aacuggaagcaaggaaggu

SEQ ID NO: 12850 - RNA, 19 nt, Artificial Sequence
  Synthetic
acuggaagcaaggaaggug

SEQ ID NO: 12851 - RNA, 19 nt, Artificial Sequence
  Synthetic
cuggaagcaaggaagguga

SEQ ID NO: 12852 - RNA, 19 nt, Artificial Sequence
  Synthetic
uggaagcaaggaaggugag

SEQ ID NO: 12853 - RNA, 19 nt, Artificial Sequence
  Synthetic
ggaagcaaggaaggugaga

SEQ ID NO: 12854 - RNA, 19 nt, Artificial Sequence
  Synthetic
gaagcaaggaaggugagaa

SEQ ID NO: 12855 - RNA, 19 nt, Artificial Sequence
  Synthetic
aagcaaggaaggugagaau

SEQ ID NO: 12856 - RNA, 19 nt, Artificial Sequence
  Synthetic
agcaaggaaggugagaauu

SEQ ID NO: 12857 - RNA, 19 nt, Artificial Sequence
  Synthetic
gcaaggaaggugagaauuu

SEQ ID NO: 12858 - RNA, 19 nt, Artificial Sequence
  Synthetic
caaggaaggugagaauuug

SEQ ID NO: 12859 - RNA, 19 nt, Artificial Sequence
  Synthetic
aaggaaggugagaauuugu

SEQ ID NO: 12860 - RNA, 19 nt, Artificial Sequence
  Synthetic
aggaaggugagaauuuguc

SEQ ID NO: 12861 - RNA, 19 nt, Artificial Sequence
  Synthetic
ggaaggugagaauuuguca

SEQ ID NO: 12862 - RNA, 19 nt, Artificial Sequence
  Synthetic
gaaggugagaauuugucag

SEQ ID NO: 12863 - RNA, 19 nt, Artificial Sequence
  Synthetic
aaggugagaauuugucagu

SEQ ID NO: 12864 - RNA, 19 nt, Artificial Sequence
  Synthetic
aggugagaauuugucagug

SEQ ID NO: 12865 - RNA, 19 nt, Artificial Sequence
  Synthetic
ggugagaauuugucagugu

SEQ ID NO: 12866 - RNA, 19 nt, Artificial Sequence
  Synthetic
gugagaauuugucagugug

SEQ ID NO: 12867 - RNA, 19 nt, Artificial Sequence
  Synthetic
ugagaauuugucagugugg

SEQ ID NO: 12868 - RNA, 19 nt, Artificial Sequence
  Synthetic
gagaauuugucaguguggc

SEQ ID NO: 12869 - RNA, 19 nt, Artificial Sequence
  Synthetic
agaauuugucaguguggcu

SEQ ID NO: 12870 - RNA, 19 nt, Artificial Sequence
  Synthetic
gaauuugucaguguggcuu

SEQ ID NO: 12871 - RNA, 19 nt, Artificial Sequence
  Synthetic
aauuugucaguguggcuuc

SEQ ID NO: 12872 - RNA, 19 nt, Artificial Sequence
  Synthetic
auuugucaguguggcuuca

SEQ ID NO: 12873 - RNA, 19 nt, Artificial Sequence
  Synthetic
uuugucaguguggcuucau

SEQ ID NO: 12874 - RNA, 19 nt, Artificial Sequence
  Synthetic
uugucaguguggcuucauc

SEQ ID NO: 12875 - RNA, 19 nt, Artificial Sequence
  Synthetic
ugucaguguggcuucauca

SEQ ID NO: 12876 - RNA, 19 nt, Artificial Sequence
  Synthetic
gucaguguggcuucaucac

SEQ ID NO: 12877 - RNA, 19 nt, Artificial Sequence
  Synthetic
ucaguguggcuucaucacu

SEQ ID NO: 12878 - RNA, 19 nt, Artificial Sequence
  Synthetic
caguguggcuucaucacua

SEQ ID NO: 12879 - RNA, 19 nt, Artificial Sequence
  Synthetic
aguguggcuucaucacuac

SEQ ID NO: 12880 - RNA, 19 nt, Artificial Sequence
  Synthetic
guguggcuucaucacuacc

SEQ ID NO: 12881 - RNA, 19 nt, Artificial Sequence
  Synthetic
uguggcuucaucacuaccu

SEQ ID NO: 12882 - RNA, 19 nt, Artificial Sequence
  Synthetic
guggcuucaucacuaccua

SEQ ID NO: 12883 - RNA, 19 nt, Artificial Sequence
  Synthetic
uggcuucaucacuaccuau

SEQ ID NO: 12884 - RNA, 19 nt, Artificial Sequence
  Synthetic
ggcuucaucacuaccuauu

SEQ ID NO: 12885 - RNA, 19 nt, Artificial Sequence
  Synthetic
gcuucaucacuaccuauug

SEQ ID NO: 12886 - RNA, 19 nt, Artificial Sequence
  Synthetic
cuucaucacuaccuauugg

SEQ ID NO: 12887 - RNA, 19 nt, Artificial Sequence
  Synthetic
uucaucacuaccuauuggu

SEQ ID NO: 12888 - RNA, 19 nt, Artificial Sequence
  Synthetic
ucaucacuaccuauuggug

SEQ ID NO: 12889 - RNA, 19 nt, Artificial Sequence
  Synthetic
caucacuaccuauuggugg

SEQ ID NO: 12890 - RNA, 19 nt, Artificial Sequence
  Synthetic
aucacuaccuauuggugga

SEQ ID NO: 12891 - RNA, 19 nt, Artificial Sequence
  Synthetic
ucacuaccuauugguggaa

SEQ ID NO: 12892 - RNA, 19 nt, Artificial Sequence
  Synthetic
cacuaccuauugguggaag

SEQ ID NO: 12893 - RNA, 19 nt, Artificial Sequence
  Synthetic
acuaccuauugguggaaga

SEQ ID NO: 12894 - RNA, 19 nt, Artificial Sequence
  Synthetic
cuaccuauugguggaagac

SEQ ID NO: 12895 - RNA, 19 nt, Artificial Sequence
  Synthetic
uaccuauugguggaagaca

SEQ ID NO: 12896 - RNA, 19 nt, Artificial Sequence
  Synthetic
accuauugguggaagacac

SEQ ID NO: 12897 - RNA, 19 nt, Artificial Sequence
  Synthetic
ccuauugguggaagacaca

SEQ ID NO: 12898 - RNA, 19 nt, Artificial Sequence
  Synthetic
cuauugguggaagacacau

SEQ ID NO: 12899 - RNA, 19 nt, Artificial Sequence
  Synthetic
uauugguggaagacacaua

SEQ ID NO: 12900 - RNA, 19 nt, Artificial Sequence
  Synthetic
auugguggaagacacauac

SEQ ID NO: 12901 - RNA, 19 nt, Artificial Sequence
  Synthetic
uugguggaagacacauacc

SEQ ID NO: 12902 - RNA, 19 nt, Artificial Sequence
  Synthetic
ugguggaagacacauaccu

SEQ ID NO: 12903 - RNA, 19 nt, Artificial Sequence
  Synthetic
gguggaagacacauaccug

SEQ ID NO: 12904 - RNA, 19 nt, Artificial Sequence
  Synthetic
guggaagacacauaccuga

SEQ ID NO: 12905 - RNA, 19 nt, Artificial Sequence
  Synthetic
uggaagacacauaccugau

SEQ ID NO: 12906 - RNA, 19 nt, Artificial Sequence
  Synthetic
ggaagacacauaccugaua

SEQ ID NO: 12907 - RNA, 19 nt, Artificial Sequence
  Synthetic
gaagacacauaccugauaa

SEQ ID NO: 12908 - RNA, 19 nt, Artificial Sequence
  Synthetic
aagacacauaccugauaac

SEQ ID NO: 12909 - RNA, 19 nt, Artificial Sequence
  Synthetic
agacacauaccugauaacu

SEQ ID NO: 12910 - RNA, 19 nt, Artificial Sequence
  Synthetic
gacacauaccugauaacua

SEQ ID NO: 12911 - RNA, 19 nt, Artificial Sequence
  Synthetic
acacauaccugauaacuac

SEQ ID NO: 12912 - RNA, 19 nt, Artificial Sequence
  Synthetic
cacauaccugauaacuacu

SEQ ID NO: 12913 - RNA, 19 nt, Artificial Sequence
  Synthetic
acauaccugauaacuacuu

SEQ ID NO: 12914 - RNA, 19 nt, Artificial Sequence
  Synthetic
cauaccugauaacuacuuu

SEQ ID NO: 12915 - RNA, 19 nt, Artificial Sequence
  Synthetic
auaccugauaacuacuuug

SEQ ID NO: 12916 - RNA, 19 nt, Artificial Sequence
  Synthetic
uaccugauaacuacuuugc

SEQ ID NO: 12917 - RNA, 19 nt, Artificial Sequence
  Synthetic
accugauaacuacuuugcu

SEQ ID NO: 12918 - RNA, 19 nt, Artificial Sequence
  Synthetic
ccugauaacuacuuugcua

SEQ ID NO: 12919 - RNA, 19 nt, Artificial Sequence
  Synthetic
cugauaacuacuuugcuag

SEQ ID NO: 12920 - RNA, 19 nt, Artificial Sequence
  Synthetic
ugauaacuacuuugcuagu

SEQ ID NO: 12921 - RNA, 19 nt, Artificial Sequence
  Synthetic
gauaacuacuuugcuaguu

SEQ ID NO: 12922 - RNA, 19 nt, Artificial Sequence
  Synthetic
auaacuacuuugcuaguuc

SEQ ID NO: 12923 - RNA, 19 nt, Artificial Sequence
  Synthetic
uaacuacuuugcuaguucu

SEQ ID NO: 12924 - RNA, 19 nt, Artificial Sequence
  Synthetic
aacuacuuugcuaguucuu

SEQ ID NO: 12925 - RNA, 19 nt, Artificial Sequence
  Synthetic
acuacuuugcuaguucuua

SEQ ID NO: 12926 - RNA, 19 nt, Artificial Sequence
  Synthetic
cuacuuugcuaguucuuag

SEQ ID NO: 12927 - RNA, 19 nt, Artificial Sequence
  Synthetic
uacuuugcuaguucuuagc

SEQ ID NO: 12928 - RNA, 19 nt, Artificial Sequence
  Synthetic
acuuugcuaguucuuagca

SEQ ID NO: 12929 - RNA, 19 nt, Artificial Sequence
  Synthetic
cuuugcuaguucuuagcac

SEQ ID NO: 12930 - RNA, 19 nt, Artificial Sequence
  Synthetic
uuugcuaguucuuagcaca

SEQ ID NO: 12931 - RNA, 19 nt, Artificial Sequence
  Synthetic
uugcuaguucuuagcacau

SEQ ID NO: 12932 - RNA, 19 nt, Artificial Sequence
  Synthetic
ugcuaguucuuagcacauc

SEQ ID NO: 12933 - RNA, 19 nt, Artificial Sequence
  Synthetic
gcuaguucuuagcacauca

SEQ ID NO: 12934 - RNA, 19 nt, Artificial Sequence
  Synthetic
cuaguucuuagcacaucag

SEQ ID NO: 12935 - RNA, 19 nt, Artificial Sequence
  Synthetic
uaguucuuagcacaucagg

SEQ ID NO: 12936 - RNA, 19 nt, Artificial Sequence
  Synthetic
aguucuuagcacaucaggg

SEQ ID NO: 12937 - RNA, 19 nt, Artificial Sequence
  Synthetic
guucuuagcacaucagggc

SEQ ID NO: 12938 - RNA, 19 nt, Artificial Sequence
  Synthetic
uucuuagcacaucagggcc

SEQ ID NO: 12939 - RNA, 19 nt, Artificial Sequence
  Synthetic
ucuuagcacaucagggcca

SEQ ID NO: 12940 - RNA, 19 nt, Artificial Sequence
  Synthetic
cuuagcacaucagggccau

SEQ ID NO: 12941 - RNA, 19 nt, Artificial Sequence
  Synthetic
uuagcacaucagggccauu

SEQ ID NO: 12942 - RNA, 19 nt, Artificial Sequence
  Synthetic
uagcacaucagggccauuu

SEQ ID NO: 12943 - RNA, 19 nt, Artificial Sequence
  Synthetic
agcacaucagggccauuuu

SEQ ID NO: 12944 - RNA, 19 nt, Artificial Sequence
  Synthetic
gcacaucagggccauuuuc

SEQ ID NO: 12945 - RNA, 19 nt, Artificial Sequence
  Synthetic
cacaucagggccauuuucu

SEQ ID NO: 12946 - RNA, 19 nt, Artificial Sequence
  Synthetic
acaucagggccauuuucug

SEQ ID NO: 12947 - RNA, 19 nt, Artificial Sequence
  Synthetic
caucagggccauuuucugg

SEQ ID NO: 12948 - RNA, 19 nt, Artificial Sequence
  Synthetic
aucagggccauuuucugga

SEQ ID NO: 12949 - RNA, 19 nt, Artificial Sequence
  Synthetic
ucagggccauuuucuggag

SEQ ID NO: 12950 - RNA, 19 nt, Artificial Sequence
  Synthetic
cagggccauuuucuggagg

SEQ ID NO: 12951 - RNA, 19 nt, Artificial Sequence
  Synthetic
agggccauuuucuggaggc

SEQ ID NO: 12952 - RNA, 19 nt, Artificial Sequence
  Synthetic
gggccauuuucuggaggca

SEQ ID NO: 12953 - RNA, 19 nt, Artificial Sequence
  Synthetic
ggccauuuucuggaggcau

SEQ ID NO: 12954 - RNA, 19 nt, Artificial Sequence
  Synthetic
gccauuuucuggaggcaua

SEQ ID NO: 12955 - RNA, 19 nt, Artificial Sequence
  Synthetic
ccauuuucuggaggcauaa

SEQ ID NO: 12956 - RNA, 19 nt, Artificial Sequence
  Synthetic
cauuuucuggaggcauaau

SEQ ID NO: 12957 - RNA, 19 nt, Artificial Sequence
  Synthetic
auuuucuggaggcauaaug

SEQ ID NO: 12958 - RNA, 19 nt, Artificial Sequence
  Synthetic
uuuucuggaggcauaaugu

SEQ ID NO: 12959 - RNA, 19 nt, Artificial Sequence
  Synthetic
uuucuggaggcauaaugua

SEQ ID NO: 12960 - RNA, 19 nt, Artificial Sequence
  Synthetic
uucuggaggcauaauguaa

SEQ ID NO: 12961 - RNA, 19 nt, Artificial Sequence
  Synthetic
ucuggaggcauaauguaau

SEQ ID NO: 12962 - RNA, 19 nt, Artificial Sequence
  Synthetic
cuggaggcauaauguaauc

SEQ ID NO: 12963 - RNA, 19 nt, Artificial Sequence
  Synthetic
uggaggcauaauguaaucu

SEQ ID NO: 12964 - RNA, 19 nt, Artificial Sequence
  Synthetic
ggaggcauaauguaaucua

SEQ ID NO: 12965 - RNA, 19 nt, Artificial Sequence
  Synthetic
gaggcauaauguaaucuac

SEQ ID NO: 12966 - RNA, 19 nt, Artificial Sequence
  Synthetic
aggcauaauguaaucuaca

SEQ ID NO: 12967 - RNA, 19 nt, Artificial Sequence
  Synthetic
ggcauaauguaaucuacag

SEQ ID NO: 12968 - RNA, 19 nt, Artificial Sequence
  Synthetic
gcauaauguaaucuacaga

SEQ ID NO: 12969 - RNA, 19 nt, Artificial Sequence
  Synthetic
cauaauguaaucuacagaa

SEQ ID NO: 12970 - RNA, 19 nt, Artificial Sequence
  Synthetic
auaauguaaucuacagaaa

SEQ ID NO: 12971 - RNA, 19 nt, Artificial Sequence
  Synthetic
uaauguaaucuacagaaac

SEQ ID NO: 12972 - RNA, 19 nt, Artificial Sequence
  Synthetic
aauguaaucuacagaaaca

SEQ ID NO: 12973 - RNA, 19 nt, Artificial Sequence
  Synthetic
auguaaucuacagaaacag

SEQ ID NO: 12974 - RNA, 19 nt, Artificial Sequence
  Synthetic
uguaaucuacagaaacagc

SEQ ID NO: 12975 - RNA, 19 nt, Artificial Sequence
  Synthetic
guaaucuacagaaacagcu

SEQ ID NO: 12976 - RNA, 19 nt, Artificial Sequence
  Synthetic
uaaucuacagaaacagcuc

SEQ ID NO: 12977 - RNA, 19 nt, Artificial Sequence
  Synthetic
aaucuacagaaacagcucu

SEQ ID NO: 12978 - RNA, 19 nt, Artificial Sequence
  Synthetic
aucuacagaaacagcucuc

SEQ ID NO: 12979 - RNA, 19 nt, Artificial Sequence
  Synthetic
ucuacagaaacagcucuca

SEQ ID NO: 12980 - RNA, 19 nt, Artificial Sequence
  Synthetic
cuacagaaacagcucucaa

SEQ ID NO: 12981 - RNA, 19 nt, Artificial Sequence
  Synthetic
uacagaaacagcucucaag

SEQ ID NO: 12982 - RNA, 19 nt, Artificial Sequence
  Synthetic
acagaaacagcucucaagc

SEQ ID NO: 12983 - RNA, 19 nt, Artificial Sequence
  Synthetic
cagaaacagcucucaagcc

SEQ ID NO: 12984 - RNA, 19 nt, Artificial Sequence
  Synthetic
agaaacagcucucaagccu

SEQ ID NO: 12985 - RNA, 19 nt, Artificial Sequence
  Synthetic
gaaacagcucucaagccug

SEQ ID NO: 12986 - RNA, 19 nt, Artificial Sequence
  Synthetic
aaacagcucucaagccuga

SEQ ID NO: 12987 - RNA, 19 nt, Artificial Sequence
  Synthetic
aacagcucucaagccugac

SEQ ID NO: 12988 - RNA, 19 nt, Artificial Sequence
  Synthetic
acagcucucaagccugacc

SEQ ID NO: 12989 - RNA, 19 nt, Artificial Sequence
  Synthetic
cagcucucaagccugaccu

SEQ ID NO: 12990 - RNA, 19 nt, Artificial Sequence
  Synthetic
agcucucaagccugaccuu

SEQ ID NO: 12991 - RNA, 19 nt, Artificial Sequence
  Synthetic
gcucucaagccugaccuuu

SEQ ID NO: 12992 - RNA, 19 nt, Artificial Sequence
  Synthetic
cucucaagccugaccuuug

SEQ ID NO: 12993 - RNA, 19 nt, Artificial Sequence
  Synthetic
ucucaagccugaccuuugc

SEQ ID NO: 12994 - RNA, 19 nt, Artificial Sequence
  Synthetic
cucaagccugaccuuugcu

SEQ ID NO: 12995 - RNA, 19 nt, Artificial Sequence
  Synthetic
ucaagccugaccuuugcuc

SEQ ID NO: 12996 - RNA, 19 nt, Artificial Sequence
  Synthetic
caagccugaccuuugcucu

SEQ ID NO: 12997 - RNA, 19 nt, Artificial Sequence
  Synthetic
aagccugaccuuugcucua

SEQ ID NO: 12998 - RNA, 19 nt, Artificial Sequence
  Synthetic
agccugaccuuugcucuac

SEQ ID NO: 12999 - RNA, 19 nt, Artificial Sequence
  Synthetic
gccugaccuuugcucuaca

SEQ ID NO: 13000 - RNA, 19 nt, Artificial Sequence
  Synthetic
ccugaccuuugcucuacag

SEQ ID NO: 13001 - RNA, 19 nt, Artificial Sequence
  Synthetic
cugaccuuugcucuacaga

SEQ ID NO: 13002 - RNA, 19 nt, Artificial Sequence
  Synthetic
ugaccuuugcucuacagau

SEQ ID NO: 13003 - RNA, 19 nt, Artificial Sequence
  Synthetic
gaccuuugcucuacagaua

SEQ ID NO: 13004 - RNA, 19 nt, Artificial Sequence
  Synthetic
accuuugcucuacagauag

SEQ ID NO: 13005 - RNA, 19 nt, Artificial Sequence
  Synthetic
ccuuugcucuacagauagc

SEQ ID NO: 13006 - RNA, 19 nt, Artificial Sequence
  Synthetic
cuuugcucuacagauagcc

SEQ ID NO: 13007 - RNA, 19 nt, Artificial Sequence
  Synthetic
uuugcucuacagauagccu

SEQ ID NO: 13008 - RNA, 19 nt, Artificial Sequence
  Synthetic
uugcucuacagauagccuc

SEQ ID NO: 13009 - RNA, 19 nt, Artificial Sequence
  Synthetic
ugcucuacagauagccuca

SEQ ID NO: 13010 - RNA, 19 nt, Artificial Sequence
  Synthetic
gcucuacagauagccucag

SEQ ID NO: 13011 - RNA, 19 nt, Artificial Sequence
  Synthetic
cucuacagauagccucagu

SEQ ID NO: 13012 - RNA, 19 nt, Artificial Sequence
  Synthetic
ucuacagauagccucagua

SEQ ID NO: 13013 - RNA, 19 nt, Artificial Sequence
  Synthetic
cuacagauagccucaguau

SEQ ID NO: 13014 - RNA, 19 nt, Artificial Sequence
  Synthetic
uacagauagccucaguauu

SEQ ID NO: 13015 - RNA, 19 nt, Artificial Sequence
  Synthetic
acagauagccucaguauuc

SEQ ID NO: 13016 - RNA, 19 nt, Artificial Sequence
  Synthetic
cagauagccucaguauuca

SEQ ID NO: 13017 - RNA, 19 nt, Artificial Sequence
  Synthetic
agauagccucaguauucac

SEQ ID NO: 13018 - RNA, 19 nt, Artificial Sequence
  Synthetic
gauagccucaguauucacc

SEQ ID NO: 13019 - RNA, 19 nt, Artificial Sequence
  Synthetic
auagccucaguauucaccu

SEQ ID NO: 13020 - RNA, 19 nt, Artificial Sequence
  Synthetic
uagccucaguauucaccuc

SEQ ID NO: 13021 - RNA, 19 nt, Artificial Sequence
  Synthetic
agccucaguauucaccucu

SEQ ID NO: 13022 - RNA, 19 nt, Artificial Sequence
  Synthetic
gccucaguauucaccucug

SEQ ID NO: 13023 - RNA, 19 nt, Artificial Sequence
  Synthetic
ccucaguauucaccucuga

SEQ ID NO: 13024 - RNA, 19 nt, Artificial Sequence
  Synthetic
cucaguauucaccucugau

SEQ ID NO: 13025 - RNA, 19 nt, Artificial Sequence
  Synthetic
ucaguauucaccucugauu

SEQ ID NO: 13026 - RNA, 19 nt, Artificial Sequence
  Synthetic
caguauucaccucugauua

SEQ ID NO: 13027 - RNA, 19 nt, Artificial Sequence
  Synthetic
aguauucaccucugauuau

SEQ ID NO: 13028 - RNA, 19 nt, Artificial Sequence
  Synthetic
guauucaccucugauuaug

SEQ ID NO: 13029 - RNA, 19 nt, Artificial Sequence
  Synthetic
uauucaccucugauuaugu

SEQ ID NO: 13030 - RNA, 19 nt, Artificial Sequence
  Synthetic
auucaccucugauuaugug

SEQ ID NO: 13031 - RNA, 19 nt, Artificial Sequence
  Synthetic
uucaccucugauuaugugu

SEQ ID NO: 13032 - RNA, 19 nt, Artificial Sequence
  Synthetic
ucaccucugauuauguguc

SEQ ID NO: 13033 - RNA, 19 nt, Artificial Sequence
  Synthetic
caccucugauuaugugucc

SEQ ID NO: 13034 - RNA, 19 nt, Artificial Sequence
  Synthetic
accucugauuaugugucca

SEQ ID NO: 13035 - RNA, 19 nt, Artificial Sequence
  Synthetic
ccucugauuauguguccag

SEQ ID NO: 13036 - RNA, 19 nt, Artificial Sequence
  Synthetic
cucugauuauguguccaga

SEQ ID NO: 13037 - RNA, 19 nt, Artificial Sequence
  Synthetic
ucugauuauguguccagau

SEQ ID NO: 13038 - RNA, 19 nt, Artificial Sequence
  Synthetic
cugauuauguguccagauu

SEQ ID NO: 13039 - RNA, 19 nt, Artificial Sequence
  Synthetic
ugauuauguguccagauug

SEQ ID NO: 13040 - RNA, 19 nt, Artificial Sequence
  Synthetic
gauuauguguccagauugc

SEQ ID NO: 13041 - RNA, 19 nt, Artificial Sequence
  Synthetic
auuauguguccagauugca

SEQ ID NO: 13042 - RNA, 19 nt, Artificial Sequence
  Synthetic
uuauguguccagauugcag

SEQ ID NO: 13043 - RNA, 19 nt, Artificial Sequence
  Synthetic
uauguguccagauugcagu

SEQ ID NO: 13044 - RNA, 19 nt, Artificial Sequence
  Synthetic
auguguccagauugcaguu

SEQ ID NO: 13045 - RNA, 19 nt, Artificial Sequence
  Synthetic
uguguccagauugcaguuu

SEQ ID NO: 13046 - RNA, 19 nt, Artificial Sequence
  Synthetic
guguccagauugcaguuuc

SEQ ID NO: 13047 - RNA, 19 nt, Artificial Sequence
  Synthetic
uguccagauugcaguuuca

SEQ ID NO: 13048 - RNA, 19 nt, Artificial Sequence
  Synthetic
guccagauugcaguuucau

SEQ ID NO: 13049 - RNA, 19 nt, Artificial Sequence
  Synthetic
uccagauugcaguuucauu

SEQ ID NO: 13050 - RNA, 19 nt, Artificial Sequence
  Synthetic
ccagauugcaguuucauuc

SEQ ID NO: 13051 - RNA, 19 nt, Artificial Sequence
  Synthetic
cagauugcaguuucauucc

SEQ ID NO: 13052 - RNA, 19 nt, Artificial Sequence
  Synthetic
agauugcaguuucauuccu

SEQ ID NO: 13053 - RNA, 19 nt, Artificial Sequence
  Synthetic
gauugcaguuucauuccug

SEQ ID NO: 13054 - RNA, 19 nt, Artificial Sequence
  Synthetic
auugcaguuucauuccugu

SEQ ID NO: 13055 - RNA, 19 nt, Artificial Sequence
  Synthetic
uugcaguuucauuccuguu

SEQ ID NO: 13056 - RNA, 19 nt, Artificial Sequence
  Synthetic
ugcaguuucauuccuguug

SEQ ID NO: 13057 - RNA, 19 nt, Artificial Sequence
  Synthetic
gcaguuucauuccuguuga

SEQ ID NO: 13058 - RNA, 19 nt, Artificial Sequence
  Synthetic
caguuucauuccuguugau

SEQ ID NO: 13059 - RNA, 19 nt, Artificial Sequence
  Synthetic
aguuucauuccuguugaua

SEQ ID NO: 13060 - RNA, 19 nt, Artificial Sequence
  Synthetic
guuucauuccuguugauac

SEQ ID NO: 13061 - RNA, 19 nt, Artificial Sequence
  Synthetic
uuucauuccuguugauacg

SEQ ID NO: 13062 - RNA, 19 nt, Artificial Sequence
  Synthetic
uucauuccuguugauacgc

SEQ ID NO: 13063 - RNA, 19 nt, Artificial Sequence
  Synthetic
ucauuccuguugauacgcc

SEQ ID NO: 13064 - RNA, 19 nt, Artificial Sequence
  Synthetic
cauuccuguugauacgccu

SEQ ID NO: 13065 - RNA, 19 nt, Artificial Sequence
  Synthetic
auuccuguugauacgccug

SEQ ID NO: 13066 - RNA, 19 nt, Artificial Sequence
  Synthetic
uuccuguugauacgccugg

SEQ ID NO: 13067 - RNA, 19 nt, Artificial Sequence
  Synthetic
uccuguugauacgccuggc

SEQ ID NO: 13068 - RNA, 19 nt, Artificial Sequence
  Synthetic
ccuguugauacgccuggcu

SEQ ID NO: 13069 - RNA, 19 nt, Artificial Sequence
  Synthetic
cuguugauacgccuggcuu

SEQ ID NO: 13070 - RNA, 19 nt, Artificial Sequence
  Synthetic
uguugauacgccuggcuug

SEQ ID NO: 13071 - RNA, 19 nt, Artificial Sequence
  Synthetic
guugauacgccuggcuugg

SEQ ID NO: 13072 - RNA, 19 nt, Artificial Sequence
  Synthetic
uugauacgccuggcuuggg

SEQ ID NO: 13073 - RNA, 19 nt, Artificial Sequence
  Synthetic
ugauacgccuggcuugggu

SEQ ID NO: 13074 - RNA, 19 nt, Artificial Sequence
  Synthetic
gauacgccuggcuugggug

SEQ ID NO: 13075 - RNA, 19 nt, Artificial Sequence
  Synthetic
auacgccuggcuugggugg

SEQ ID NO: 13076 - RNA, 19 nt, Artificial Sequence
  Synthetic
uacgccuggcuuggguggg

SEQ ID NO: 13077 - RNA, 19 nt, Artificial Sequence
  Synthetic
acgccuggcuugggugggg

SEQ ID NO: 13078 - RNA, 19 nt, Artificial Sequence
  Synthetic
cgccuggcuugggugggga

SEQ ID NO: 13079 - RNA, 19 nt, Artificial Sequence
  Synthetic
gccuggcuuggguggggac

SEQ ID NO: 13080 - RNA, 19 nt, Artificial Sequence
  Synthetic
ccuggcuuggguggggacc

SEQ ID NO: 13081 - RNA, 19 nt, Artificial Sequence
  Synthetic
cuggcuuggguggggaccu

SEQ ID NO: 13082 - RNA, 19 nt, Artificial Sequence
  Synthetic
uggcuuggguggggaccuu

SEQ ID NO: 13083 - RNA, 19 nt, Artificial Sequence
  Synthetic
ggcuuggguggggaccuuc

SEQ ID NO: 13084 - RNA, 19 nt, Artificial Sequence
  Synthetic
gcuuggguggggaccuucc

SEQ ID NO: 13085 - RNA, 19 nt, Artificial Sequence
  Synthetic
cuuggguggggaccuuccu

SEQ ID NO: 13086 - RNA, 19 nt, Artificial Sequence
  Synthetic
uuggguggggaccuuccuu

SEQ ID NO: 13087 - RNA, 19 nt, Artificial Sequence
  Synthetic
uggguggggaccuuccuuc

SEQ ID NO: 13088 - RNA, 19 nt, Artificial Sequence
  Synthetic
ggguggggaccuuccuucc

SEQ ID NO: 13089 - RNA, 19 nt, Artificial Sequence
  Synthetic
gguggggaccuuccuucca

SEQ ID NO: 13090 - RNA, 19 nt, Artificial Sequence
  Synthetic
guggggaccuuccuuccag

SEQ ID NO: 13091 - RNA, 19 nt, Artificial Sequence
  Synthetic
uggggaccuuccuuccaga

SEQ ID NO: 13092 - RNA, 19 nt, Artificial Sequence
  Synthetic
ggggaccuuccuuccagau

SEQ ID NO: 13093 - RNA, 19 nt, Artificial Sequence
  Synthetic
gggaccuuccuuccagauc

SEQ ID NO: 13094 - RNA, 19 nt, Artificial Sequence
  Synthetic
ggaccuuccuuccagaucc

SEQ ID NO: 13095 - RNA, 19 nt, Artificial Sequence
  Synthetic
gaccuuccuuccagauccu

SEQ ID NO: 13096 - RNA, 19 nt, Artificial Sequence
  Synthetic
accuuccuuccagauccuc

SEQ ID NO: 13097 - RNA, 19 nt, Artificial Sequence
  Synthetic
ccuuccuuccagauccucu

SEQ ID NO: 13098 - RNA, 19 nt, Artificial Sequence
  Synthetic
cuuccuuccagauccucua

SEQ ID NO: 13099 - RNA, 19 nt, Artificial Sequence
  Synthetic
uuccuuccagauccucuaa

SEQ ID NO: 13100 - RNA, 19 nt, Artificial Sequence
  Synthetic
uccuuccagauccucuaag

SEQ ID NO: 13101 - RNA, 19 nt, Artificial Sequence
  Synthetic
ccuuccagauccucuaagu

SEQ ID NO: 13102 - RNA, 19 nt, Artificial Sequence
  Synthetic
cuuccagauccucuaaguu

SEQ ID NO: 13103 - RNA, 19 nt, Artificial Sequence
  Synthetic
uuccagauccucuaaguuc

SEQ ID NO: 13104 - RNA, 19 nt, Artificial Sequence
  Synthetic
uccagauccucuaaguucu

SEQ ID NO: 13105 - RNA, 19 nt, Artificial Sequence
  Synthetic
ccagauccucuaaguucuc

SEQ ID NO: 13106 - RNA, 19 nt, Artificial Sequence
  Synthetic
cagauccucuaaguucucu

SEQ ID NO: 13107 - RNA, 19 nt, Artificial Sequence
  Synthetic
agauccucuaaguucucuu

SEQ ID NO: 13108 - RNA, 19 nt, Artificial Sequence
  Synthetic
gauccucuaaguucucuuu

SEQ ID NO: 13109 - RNA, 19 nt, Artificial Sequence
  Synthetic
auccucuaaguucucuuuc

SEQ ID NO: 13110 - RNA, 19 nt, Artificial Sequence
  Synthetic
uccucuaaguucucuuuca

SEQ ID NO: 13111 - RNA, 19 nt, Artificial Sequence
  Synthetic
ccucuaaguucucuuucau

SEQ ID NO: 13112 - RNA, 19 nt, Artificial Sequence
  Synthetic
cucuaaguucucuuucaua

SEQ ID NO: 13113 - RNA, 19 nt, Artificial Sequence
  Synthetic
ucuaaguucucuuucauau

SEQ ID NO: 13114 - RNA, 19 nt, Artificial Sequence
  Synthetic
cuaaguucucuuucauaug

SEQ ID NO: 13115 - RNA, 19 nt, Artificial Sequence
  Synthetic
uaaguucucuuucauaugc

SEQ ID NO: 13116 - RNA, 19 nt, Artificial Sequence
  Synthetic
aaguucucuuucauaugca

SEQ ID NO: 13117 - RNA, 19 nt, Artificial Sequence
  Synthetic
aguucucuuucauaugcau

SEQ ID NO: 13118 - RNA, 19 nt, Artificial Sequence
  Synthetic
guucucuuucauaugcauc

SEQ ID NO: 13119 - RNA, 19 nt, Artificial Sequence
  Synthetic
uucucuuucauaugcaucu

SEQ ID NO: 13120 - RNA, 19 nt, Artificial Sequence
  Synthetic
ucucuuucauaugcaucuc

SEQ ID NO: 13121 - RNA, 19 nt, Artificial Sequence
  Synthetic
cucuuucauaugcaucuca

SEQ ID NO: 13122 - RNA, 19 nt, Artificial Sequence
  Synthetic
ucuuucauaugcaucucau

SEQ ID NO: 13123 - RNA, 19 nt, Artificial Sequence
  Synthetic
cuuucauaugcaucucauu

SEQ ID NO: 13124 - RNA, 19 nt, Artificial Sequence
  Synthetic
uuucauaugcaucucauuc

SEQ ID NO: 13125 - RNA, 19 nt, Artificial Sequence
  Synthetic
uucauaugcaucucauucc

SEQ ID NO: 13126 - RNA, 19 nt, Artificial Sequence
  Synthetic
ucauaugcaucucauucca

SEQ ID NO: 13127 - RNA, 19 nt, Artificial Sequence
  Synthetic
cauaugcaucucauuccag

SEQ ID NO: 13128 - RNA, 19 nt, Artificial Sequence
  Synthetic
auaugcaucucauuccagg

SEQ ID NO: 13129 - RNA, 19 nt, Artificial Sequence
  Synthetic
uaugcaucucauuccaggg

SEQ ID NO: 13130 - RNA, 19 nt, Artificial Sequence
  Synthetic
augcaucucauuccaggga

SEQ ID NO: 13131 - RNA, 19 nt, Artificial Sequence
  Synthetic
ugcaucucauuccagggag

SEQ ID NO: 13132 - RNA, 19 nt, Artificial Sequence
  Synthetic
gcaucucauuccagggaga

SEQ ID NO: 13133 - RNA, 19 nt, Artificial Sequence
  Synthetic
caucucauuccagggagaa

SEQ ID NO: 13134 - RNA, 19 nt, Artificial Sequence
  Synthetic
aucucauuccagggagaag

SEQ ID NO: 13135 - RNA, 19 nt, Artificial Sequence
  Synthetic
ucucauuccagggagaagg

SEQ ID NO: 13136 - RNA, 19 nt, Artificial Sequence
  Synthetic
cucauuccagggagaaggg

SEQ ID NO: 13137 - RNA, 19 nt, Artificial Sequence
  Synthetic
ucauuccagggagaagggg

SEQ ID NO: 13138 - RNA, 19 nt, Artificial Sequence
  Synthetic
cauuccagggagaagggga

SEQ ID NO: 13139 - RNA, 19 nt, Artificial Sequence
  Synthetic
auuccagggagaaggggag

SEQ ID NO: 13140 - RNA, 19 nt, Artificial Sequence
  Synthetic
uuccagggagaaggggaga

SEQ ID NO: 13141 - RNA, 19 nt, Artificial Sequence
  Synthetic
uccagggagaaggggagag

SEQ ID NO: 13142 - RNA, 19 nt, Artificial Sequence
  Synthetic
ccagggagaaggggagagu

SEQ ID NO: 13143 - RNA, 19 nt, Artificial Sequence
  Synthetic
cagggagaaggggagaguu

SEQ ID NO: 13144 - RNA, 19 nt, Artificial Sequence
  Synthetic
agggagaaggggagaguuc

SEQ ID NO: 13145 - RNA, 19 nt, Artificial Sequence
  Synthetic
gggagaaggggagaguucu

SEQ ID NO: 13146 - RNA, 19 nt, Artificial Sequence
  Synthetic
ggagaaggggagaguucua

SEQ ID NO: 13147 - RNA, 19 nt, Artificial Sequence
  Synthetic
gagaaggggagaguucuaa

SEQ ID NO: 13148 - RNA, 19 nt, Artificial Sequence
  Synthetic
agaaggggagaguucuaag

SEQ ID NO: 13149 - RNA, 19 nt, Artificial Sequence
  Synthetic
gaaggggagaguucuaagu

SEQ ID NO: 13150 - RNA, 19 nt, Artificial Sequence
  Synthetic
aaggggagaguucuaaguc

SEQ ID NO: 13151 - RNA, 19 nt, Artificial Sequence
  Synthetic
aggggagaguucuaagucc

SEQ ID NO: 13152 - RNA, 19 nt, Artificial Sequence
  Synthetic
ggggagaguucuaaguccc

SEQ ID NO: 13153 - RNA, 19 nt, Artificial Sequence
  Synthetic
gggagaguucuaaguccca

SEQ ID NO: 13154 - RNA, 19 nt, Artificial Sequence
  Synthetic
ggagaguucuaagucccaa

SEQ ID NO: 13155 - RNA, 19 nt, Artificial Sequence
  Synthetic
gagaguucuaagucccaag

SEQ ID NO: 13156 - RNA, 19 nt, Artificial Sequence
  Synthetic
agaguucuaagucccaagu

SEQ ID NO: 13157 - RNA, 19 nt, Artificial Sequence
  Synthetic
gaguucuaagucccaaguu

SEQ ID NO: 13158 - RNA, 19 nt, Artificial Sequence
  Synthetic
aguucuaagucccaaguuc

SEQ ID NO: 13159 - RNA, 19 nt, Artificial Sequence
  Synthetic
guucuaagucccaaguucu

SEQ ID NO: 13160 - RNA, 19 nt, Artificial Sequence
  Synthetic
uucuaagucccaaguucua

SEQ ID NO: 13161 - RNA, 19 nt, Artificial Sequence
  Synthetic
ucuaagucccaaguucuaa

SEQ ID NO: 13162 - RNA, 19 nt, Artificial Sequence
  Synthetic
cuaagucccaaguucuaag

SEQ ID NO: 13163 - RNA, 19 nt, Artificial Sequence
  Synthetic
uaagucccaaguucuaaga

SEQ ID NO: 13164 - RNA, 19 nt, Artificial Sequence
  Synthetic
aagucccaaguucuaagac

SEQ ID NO: 13165 - RNA, 19 nt, Artificial Sequence
  Synthetic
agucccaaguucuaagaca

SEQ ID NO: 13166 - RNA, 19 nt, Artificial Sequence
  Synthetic
gucccaaguucuaagacac

SEQ ID NO: 13167 - RNA, 19 nt, Artificial Sequence
  Synthetic
ucccaaguucuaagacaca

SEQ ID NO: 13168 - RNA, 19 nt, Artificial Sequence
  Synthetic
cccaaguucuaagacacau

SEQ ID NO: 13169 - RNA, 19 nt, Artificial Sequence
  Synthetic
ccaaguucuaagacacaua

SEQ ID NO: 13170 - RNA, 19 nt, Artificial Sequence
  Synthetic
caaguucuaagacacauac

SEQ ID NO: 13171 - RNA, 19 nt, Artificial Sequence
  Synthetic
aaguucuaagacacauaca

SEQ ID NO: 13172 - RNA, 19 nt, Artificial Sequence
  Synthetic
aguucuaagacacauacag

SEQ ID NO: 13173 - RNA, 19 nt, Artificial Sequence
  Synthetic
guucuaagacacauacagg

SEQ ID NO: 13174 - RNA, 19 nt, Artificial Sequence
  Synthetic
uucuaagacacauacaggu

SEQ ID NO: 13175 - RNA, 19 nt, Artificial Sequence
  Synthetic
ucuaagacacauacaggua

SEQ ID NO: 13176 - RNA, 19 nt, Artificial Sequence
  Synthetic
cuaagacacauacagguac

SEQ ID NO: 13177 - RNA, 19 nt, Artificial Sequence
  Synthetic
uaagacacauacagguaca

SEQ ID NO: 13178 - RNA, 19 nt, Artificial Sequence
  Synthetic
aagacacauacagguacac

SEQ ID NO: 13179 - RNA, 19 nt, Artificial Sequence
  Synthetic
agacacauacagguacaca

SEQ ID NO: 13180 - RNA, 19 nt, Artificial Sequence
  Synthetic
gacacauacagguacacac

SEQ ID NO: 13181 - RNA, 19 nt, Artificial Sequence
  Synthetic
acacauacagguacacacc

SEQ ID NO: 13182 - RNA, 19 nt, Artificial Sequence
  Synthetic
cacauacagguacacaccc

SEQ ID NO: 13183 - RNA, 19 nt, Artificial Sequence
  Synthetic
acauacagguacacaccca

SEQ ID NO: 13184 - RNA, 19 nt, Artificial Sequence
  Synthetic
cauacagguacacacccac

SEQ ID NO: 13185 - RNA, 19 nt, Artificial Sequence
  Synthetic
auacagguacacacccaca

SEQ ID NO: 13186 - RNA, 19 nt, Artificial Sequence
  Synthetic
uacagguacacacccacac

SEQ ID NO: 13187 - RNA, 19 nt, Artificial Sequence
  Synthetic
acagguacacacccacaca

SEQ ID NO: 13188 - RNA, 19 nt, Artificial Sequence
  Synthetic
cagguacacacccacacau

SEQ ID NO: 13189 - RNA, 19 nt, Artificial Sequence
  Synthetic
agguacacacccacacaua

SEQ ID NO: 13190 - RNA, 19 nt, Artificial Sequence
  Synthetic
gguacacacccacacauac

SEQ ID NO: 13191 - RNA, 19 nt, Artificial Sequence
  Synthetic
guacacacccacacauaca

SEQ ID NO: 13192 - RNA, 19 nt, Artificial Sequence
  Synthetic
uacacacccacacauacaa

SEQ ID NO: 13193 - RNA, 19 nt, Artificial Sequence
  Synthetic
acacacccacacauacaag

SEQ ID NO: 13194 - RNA, 19 nt, Artificial Sequence
  Synthetic
cacacccacacauacaagc

SEQ ID NO: 13195 - RNA, 19 nt, Artificial Sequence
  Synthetic
acacccacacauacaagca

SEQ ID NO: 13196 - RNA, 19 nt, Artificial Sequence
  Synthetic
cacccacacauacaagcac

SEQ ID NO: 13197 - RNA, 19 nt, Artificial Sequence
  Synthetic
acccacacauacaagcacc

SEQ ID NO: 13198 - RNA, 19 nt, Artificial Sequence
  Synthetic
cccacacauacaagcaccc

SEQ ID NO: 13199 - RNA, 19 nt, Artificial Sequence
  Synthetic
ccacacauacaagcaccca

SEQ ID NO: 13200 - RNA, 19 nt, Artificial Sequence
  Synthetic
cacacauacaagcacccac

SEQ ID NO: 13201 - RNA, 19 nt, Artificial Sequence
  Synthetic
acacauacaagcacccacc

SEQ ID NO: 13202 - RNA, 19 nt, Artificial Sequence
  Synthetic
cacauacaagcacccaccc

SEQ ID NO: 13203 - RNA, 19 nt, Artificial Sequence
  Synthetic
acauacaagcacccacccu

SEQ ID NO: 13204 - RNA, 19 nt, Artificial Sequence
  Synthetic
cauacaagcacccacccuc

SEQ ID NO: 13205 - RNA, 19 nt, Artificial Sequence
  Synthetic
auacaagcacccacccuca

SEQ ID NO: 13206 - RNA, 19 nt, Artificial Sequence
  Synthetic
uacaagcacccacccucac

SEQ ID NO: 13207 - RNA, 19 nt, Artificial Sequence
  Synthetic
acaagcacccacccucacu

SEQ ID NO: 13208 - RNA, 19 nt, Artificial Sequence
  Synthetic
caagcacccacccucacuu

SEQ ID NO: 13209 - RNA, 19 nt, Artificial Sequence
  Synthetic
aagcacccacccucacuuu

SEQ ID NO: 13210 - RNA, 19 nt, Artificial Sequence
  Synthetic
agcacccacccucacuuua

SEQ ID NO: 13211 - RNA, 19 nt, Artificial Sequence
  Synthetic
gcacccacccucacuuuau

SEQ ID NO: 13212 - RNA, 19 nt, Artificial Sequence
  Synthetic
cacccacccucacuuuaug

SEQ ID NO: 13213 - RNA, 19 nt, Artificial Sequence
  Synthetic
acccacccucacuuuaugg

SEQ ID NO: 13214 - RNA, 19 nt, Artificial Sequence
  Synthetic
cccacccucacuuuaugga

SEQ ID NO: 13215 - RNA, 19 nt, Artificial Sequence
  Synthetic
ccacccucacuuuauggaa

SEQ ID NO: 13216 - RNA, 19 nt, Artificial Sequence
  Synthetic
cacccucacuuuauggaaa

SEQ ID NO: 13217 - RNA, 19 nt, Artificial Sequence
  Synthetic
acccucacuuuauggaaag

SEQ ID NO: 13218 - RNA, 19 nt, Artificial Sequence
  Synthetic
cccucacuuuauggaaagc

SEQ ID NO: 13219 - RNA, 19 nt, Artificial Sequence
  Synthetic
ccucacuuuauggaaagca

SEQ ID NO: 13220 - RNA, 19 nt, Artificial Sequence
  Synthetic
cucacuuuauggaaagcau

SEQ ID NO: 13221 - RNA, 19 nt, Artificial Sequence
  Synthetic
ucacuuuauggaaagcauc

SEQ ID NO: 13222 - RNA, 19 nt, Artificial Sequence
  Synthetic
cacuuuauggaaagcaucc

SEQ ID NO: 13223 - RNA, 19 nt, Artificial Sequence
  Synthetic
acuuuauggaaagcaucca

SEQ ID NO: 13224 - RNA, 19 nt, Artificial Sequence
  Synthetic
cuuuauggaaagcauccag

SEQ ID NO: 13225 - RNA, 19 nt, Artificial Sequence
  Synthetic
uuuauggaaagcauccagu

SEQ ID NO: 13226 - RNA, 19 nt, Artificial Sequence
  Synthetic
uuauggaaagcauccagug

SEQ ID NO: 13227 - RNA, 19 nt, Artificial Sequence
  Synthetic
uauggaaagcauccagugg

SEQ ID NO: 13228 - RNA, 19 nt, Artificial Sequence
  Synthetic
auggaaagcauccaguggg

SEQ ID NO: 13229 - RNA, 19 nt, Artificial Sequence
  Synthetic
uggaaagcauccagugggg

SEQ ID NO: 13230 - RNA, 19 nt, Artificial Sequence
  Synthetic
ggaaagcauccagugggga

SEQ ID NO: 13231 - RNA, 19 nt, Artificial Sequence
  Synthetic
gaaagcauccaguggggag

SEQ ID NO: 13232 - RNA, 19 nt, Artificial Sequence
  Synthetic
aaagcauccaguggggaga

SEQ ID NO: 13233 - RNA, 19 nt, Artificial Sequence
  Synthetic
aagcauccaguggggagac

SEQ ID NO: 13234 - RNA, 19 nt, Artificial Sequence
  Synthetic
agcauccaguggggagacu

SEQ ID NO: 13235 - RNA, 19 nt, Artificial Sequence
  Synthetic
gcauccaguggggagacuc

SEQ ID NO: 13236 - RNA, 19 nt, Artificial Sequence
  Synthetic
cauccaguggggagacuca

SEQ ID NO: 13237 - RNA, 19 nt, Artificial Sequence
  Synthetic
auccaguggggagacucau

SEQ ID NO: 13238 - RNA, 19 nt, Artificial Sequence
  Synthetic
uccaguggggagacucaug

SEQ ID NO: 13239 - RNA, 19 nt, Artificial Sequence
  Synthetic
ccaguggggagacucauga

SEQ ID NO: 13240 - RNA, 19 nt, Artificial Sequence
  Synthetic
caguggggagacucaugaa

SEQ ID NO: 13241 - RNA, 19 nt, Artificial Sequence
  Synthetic
aguggggagacucaugaac

SEQ ID NO: 13242 - RNA, 19 nt, Artificial Sequence
  Synthetic
guggggagacucaugaaca

SEQ ID NO: 13243 - RNA, 19 nt, Artificial Sequence
  Synthetic
uggggagacucaugaacau

SEQ ID NO: 13244 - RNA, 19 nt, Artificial Sequence
  Synthetic
ggggagacucaugaacauc

SEQ ID NO: 13245 - RNA, 19 nt, Artificial Sequence
  Synthetic
gggagacucaugaacauca

SEQ ID NO: 13246 - RNA, 19 nt, Artificial Sequence
  Synthetic
ggagacucaugaacaucag

SEQ ID NO: 13247 - RNA, 19 nt, Artificial Sequence
  Synthetic
gagacucaugaacaucagu

SEQ ID NO: 13248 - RNA, 19 nt, Artificial Sequence
  Synthetic
agacucaugaacaucaguc

SEQ ID NO: 13249 - RNA, 19 nt, Artificial Sequence
  Synthetic
gacucaugaacaucaguca

SEQ ID NO: 13250 - RNA, 19 nt, Artificial Sequence
  Synthetic
acucaugaacaucagucau

SEQ ID NO: 13251 - RNA, 19 nt, Artificial Sequence
  Synthetic
cucaugaacaucagucauu

SEQ ID NO: 13252 - RNA, 19 nt, Artificial Sequence
  Synthetic
ucaugaacaucagucauuc

SEQ ID NO: 13253 - RNA, 19 nt, Artificial Sequence
  Synthetic
caugaacaucagucauucu

SEQ ID NO: 13254 - RNA, 19 nt, Artificial Sequence
  Synthetic
augaacaucagucauucug

SEQ ID NO: 13255 - RNA, 19 nt, Artificial Sequence
  Synthetic
ugaacaucagucauucuga

SEQ ID NO: 13256 - RNA, 19 nt, Artificial Sequence
  Synthetic
gaacaucagucauucugag

SEQ ID NO: 13257 - RNA, 19 nt, Artificial Sequence
  Synthetic
aacaucagucauucugagg

SEQ ID NO: 13258 - RNA, 19 nt, Artificial Sequence
  Synthetic
acaucagucauucugaggc

SEQ ID NO: 13259 - RNA, 19 nt, Artificial Sequence
  Synthetic
caucagucauucugaggcc

SEQ ID NO: 13260 - RNA, 19 nt, Artificial Sequence
  Synthetic
aucagucauucugaggcca

SEQ ID NO: 13261 - RNA, 19 nt, Artificial Sequence
  Synthetic
ucagucauucugaggccac

SEQ ID NO: 13262 - RNA, 19 nt, Artificial Sequence
  Synthetic
cagucauucugaggccaca

SEQ ID NO: 13263 - RNA, 19 nt, Artificial Sequence
  Synthetic
agucauucugaggccacau

SEQ ID NO: 13264 - RNA, 19 nt, Artificial Sequence
  Synthetic
gucauucugaggccacauc

SEQ ID NO: 13265 - RNA, 19 nt, Artificial Sequence
  Synthetic
ucauucugaggccacaucc

SEQ ID NO: 13266 - RNA, 19 nt, Artificial Sequence
  Synthetic
cauucugaggccacauccu

SEQ ID NO: 13267 - RNA, 19 nt, Artificial Sequence
  Synthetic
auucugaggccacauccuu

SEQ ID NO: 13268 - RNA, 19 nt, Artificial Sequence
  Synthetic
uucugaggccacauccuuc

SEQ ID NO: 13269 - RNA, 19 nt, Artificial Sequence
  Synthetic
ucugaggccacauccuucu

SEQ ID NO: 13270 - RNA, 19 nt, Artificial Sequence
  Synthetic
cugaggccacauccuucua

SEQ ID NO: 13271 - RNA, 19 nt, Artificial Sequence
  Synthetic
ugaggccacauccuucuac

SEQ ID NO: 13272 - RNA, 19 nt, Artificial Sequence
  Synthetic
gaggccacauccuucuacu

SEQ ID NO: 13273 - RNA, 19 nt, Artificial Sequence
  Synthetic
aggccacauccuucuacua

SEQ ID NO: 13274 - RNA, 19 nt, Artificial Sequence
  Synthetic
ggccacauccuucuacuaa

SEQ ID NO: 13275 - RNA, 19 nt, Artificial Sequence
  Synthetic
gccacauccuucuacuaaa

SEQ ID NO: 13276 - RNA, 19 nt, Artificial Sequence
  Synthetic
ccacauccuucuacuaaac

SEQ ID NO: 13277 - RNA, 19 nt, Artificial Sequence
  Synthetic
cacauccuucuacuaaacu

SEQ ID NO: 13278 - RNA, 19 nt, Artificial Sequence
  Synthetic
acauccuucuacuaaacua

SEQ ID NO: 13279 - RNA, 19 nt, Artificial Sequence
  Synthetic
cauccuucuacuaaacuaa

SEQ ID NO: 13280 - RNA, 19 nt, Artificial Sequence
  Synthetic
auccuucuacuaaacuaau

SEQ ID NO: 13281 - RNA, 19 nt, Artificial Sequence
  Synthetic
uccuucuacuaaacuaauc

SEQ ID NO: 13282 - RNA, 19 nt, Artificial Sequence
  Synthetic
ccuucuacuaaacuaauca

SEQ ID NO: 13283 - RNA, 19 nt, Artificial Sequence
  Synthetic
cuucuacuaaacuaaucau

SEQ ID NO: 13284 - RNA, 19 nt, Artificial Sequence
  Synthetic
uucuacuaaacuaaucauu

SEQ ID NO: 13285 - RNA, 19 nt, Artificial Sequence
  Synthetic
ucuacuaaacuaaucauuc

SEQ ID NO: 13286 - RNA, 19 nt, Artificial Sequence
  Synthetic
cuacuaaacuaaucauucc

SEQ ID NO: 13287 - RNA, 19 nt, Artificial Sequence
  Synthetic
uacuaaacuaaucauuccg

SEQ ID NO: 13288 - RNA, 19 nt, Artificial Sequence
  Synthetic
acuaaacuaaucauuccgc

SEQ ID NO: 13289 - RNA, 19 nt, Artificial Sequence
  Synthetic
cuaaacuaaucauuccgca

SEQ ID NO: 13290 - RNA, 19 nt, Artificial Sequence
  Synthetic
uaaacuaaucauuccgcag

SEQ ID NO: 13291 - RNA, 19 nt, Artificial Sequence
  Synthetic
aaacuaaucauuccgcaga

SEQ ID NO: 13292 - RNA, 19 nt, Artificial Sequence
  Synthetic
aacuaaucauuccgcagac

SEQ ID NO: 13293 - RNA, 19 nt, Artificial Sequence
  Synthetic
acuaaucauuccgcagacu

SEQ ID NO: 13294 - RNA, 19 nt, Artificial Sequence
  Synthetic
cuaaucauuccgcagacuu

SEQ ID NO: 13295 - RNA, 19 nt, Artificial Sequence
  Synthetic
uaaucauuccgcagacuug

SEQ ID NO: 13296 - RNA, 19 nt, Artificial Sequence
  Synthetic
aaucauuccgcagacuugg

SEQ ID NO: 13297 - RNA, 19 nt, Artificial Sequence
  Synthetic
aucauuccgcagacuugga

SEQ ID NO: 13298 - RNA, 19 nt, Artificial Sequence
  Synthetic
ucauuccgcagacuuggau

SEQ ID NO: 13299 - RNA, 19 nt, Artificial Sequence
  Synthetic
cauuccgcagacuuggaug

SEQ ID NO: 13300 - RNA, 19 nt, Artificial Sequence
  Synthetic
auuccgcagacuuggaugc

SEQ ID NO: 13301 - RNA, 19 nt, Artificial Sequence
  Synthetic
uuccgcagacuuggaugca

SEQ ID NO: 13302 - RNA, 19 nt, Artificial Sequence
  Synthetic
uccgcagacuuggaugcac

SEQ ID NO: 13303 - RNA, 19 nt, Artificial Sequence
  Synthetic
ccgcagacuuggaugcacc

SEQ ID NO: 13304 - RNA, 19 nt, Artificial Sequence
  Synthetic
cgcagacuuggaugcaccc

SEQ ID NO: 13305 - RNA, 19 nt, Artificial Sequence
  Synthetic
gcagacuuggaugcacccc

SEQ ID NO: 13306 - RNA, 19 nt, Artificial Sequence
  Synthetic
cagacuuggaugcaccccg

SEQ ID NO: 13307 - RNA, 19 nt, Artificial Sequence
  Synthetic
agacuuggaugcaccccgc

SEQ ID NO: 13308 - RNA, 19 nt, Artificial Sequence
  Synthetic
gacuuggaugcaccccgcu

SEQ ID NO: 13309 - RNA, 19 nt, Artificial Sequence
  Synthetic
acuuggaugcaccccgcuu

SEQ ID NO: 13310 - RNA, 19 nt, Artificial Sequence
  Synthetic
cuuggaugcaccccgcuuc

SEQ ID NO: 13311 - RNA, 19 nt, Artificial Sequence
  Synthetic
uuggaugcaccccgcuucc

SEQ ID NO: 13312 - RNA, 19 nt, Artificial Sequence
  Synthetic
uggaugcaccccgcuucca

SEQ ID NO: 13313 - RNA, 19 nt, Artificial Sequence
  Synthetic
ggaugcaccccgcuuccac

SEQ ID NO: 13314 - RNA, 19 nt, Artificial Sequence
  Synthetic
gaugcaccccgcuuccaca

SEQ ID NO: 13315 - RNA, 19 nt, Artificial Sequence
  Synthetic
augcaccccgcuuccacau

SEQ ID NO: 13316 - RNA, 19 nt, Artificial Sequence
  Synthetic
ugcaccccgcuuccacaug

SEQ ID NO: 13317 - RNA, 19 nt, Artificial Sequence
  Synthetic
gcaccccgcuuccacaugg

SEQ ID NO: 13318 - RNA, 19 nt, Artificial Sequence
  Synthetic
caccccgcuuccacaugga

SEQ ID NO: 13319 - RNA, 19 nt, Artificial Sequence
  Synthetic
accccgcuuccacauggac

SEQ ID NO: 13320 - RNA, 19 nt, Artificial Sequence
  Synthetic
ccccgcuuccacauggacu

SEQ ID NO: 13321 - RNA, 19 nt, Artificial Sequence
  Synthetic
cccgcuuccacauggacuu

SEQ ID NO: 13322 - RNA, 19 nt, Artificial Sequence
  Synthetic
ccgcuuccacauggacuuu

SEQ ID NO: 13323 - RNA, 19 nt, Artificial Sequence
  Synthetic
cgcuuccacauggacuuua

SEQ ID NO: 13324 - RNA, 19 nt, Artificial Sequence
  Synthetic
gcuuccacauggacuuuac

SEQ ID NO: 13325 - RNA, 19 nt, Artificial Sequence
  Synthetic
cuuccacauggacuuuacc

SEQ ID NO: 13326 - RNA, 19 nt, Artificial Sequence
  Synthetic
uuccacauggacuuuacca

SEQ ID NO: 13327 - RNA, 19 nt, Artificial Sequence
  Synthetic
uccacauggacuuuaccau

SEQ ID NO: 13328 - RNA, 19 nt, Artificial Sequence
  Synthetic
ccacauggacuuuaccauc

SEQ ID NO: 13329 - RNA, 19 nt, Artificial Sequence
  Synthetic
cacauggacuuuaccaucc

SEQ ID NO: 13330 - RNA, 19 nt, Artificial Sequence
  Synthetic
acauggacuuuaccaucca

SEQ ID NO: 13331 - RNA, 19 nt, Artificial Sequence
  Synthetic
cauggacuuuaccauccac

SEQ ID NO: 13332 - RNA, 19 nt, Artificial Sequence
  Synthetic
auggacuuuaccauccaca

SEQ ID NO: 13333 - RNA, 19 nt, Artificial Sequence
  Synthetic
uggacuuuaccauccacaa

SEQ ID NO: 13334 - RNA, 19 nt, Artificial Sequence
  Synthetic
ggacuuuaccauccacaac

SEQ ID NO: 13335 - RNA, 19 nt, Artificial Sequence
  Synthetic
gacuuuaccauccacaacu

SEQ ID NO: 13336 - RNA, 19 nt, Artificial Sequence
  Synthetic
acuuuaccauccacaacuu

SEQ ID NO: 13337 - RNA, 19 nt, Artificial Sequence
  Synthetic
cuuuaccauccacaacuua

SEQ ID NO: 13338 - RNA, 19 nt, Artificial Sequence
  Synthetic
uuuaccauccacaacuuac

SEQ ID NO: 13339 - RNA, 19 nt, Artificial Sequence
  Synthetic
uuaccauccacaacuuacc

SEQ ID NO: 13340 - RNA, 19 nt, Artificial Sequence
  Synthetic
uaccauccacaacuuacca

SEQ ID NO: 13341 - RNA, 19 nt, Artificial Sequence
  Synthetic
accauccacaacuuaccag

SEQ ID NO: 13342 - RNA, 19 nt, Artificial Sequence
  Synthetic
ccauccacaacuuaccagc

SEQ ID NO: 13343 - RNA, 19 nt, Artificial Sequence
  Synthetic
cauccacaacuuaccagca

SEQ ID NO: 13344 - RNA, 19 nt, Artificial Sequence
  Synthetic
auccacaacuuaccagcaa

SEQ ID NO: 13345 - RNA, 19 nt, Artificial Sequence
  Synthetic
uccacaacuuaccagcaag

SEQ ID NO: 13346 - RNA, 19 nt, Artificial Sequence
  Synthetic
ccacaacuuaccagcaaga

SEQ ID NO: 13347 - RNA, 19 nt, Artificial Sequence
  Synthetic
cacaacuuaccagcaagaa

SEQ ID NO: 13348 - RNA, 19 nt, Artificial Sequence
  Synthetic
acaacuuaccagcaagaau

SEQ ID NO: 13349 - RNA, 19 nt, Artificial Sequence
  Synthetic
caacuuaccagcaagaauu

SEQ ID NO: 13350 - RNA, 19 nt, Artificial Sequence
  Synthetic
aacuuaccagcaagaauuu

SEQ ID NO: 13351 - RNA, 19 nt, Artificial Sequence
  Synthetic
acuuaccagcaagaauuug

SEQ ID NO: 13352 - RNA, 19 nt, Artificial Sequence
  Synthetic
cuuaccagcaagaauuugg

SEQ ID NO: 13353 - RNA, 19 nt, Artificial Sequence
  Synthetic
uuaccagcaagaauuugga

SEQ ID NO: 13354 - RNA, 19 nt, Artificial Sequence
  Synthetic
uaccagcaagaauuuggaa

SEQ ID NO: 13355 - RNA, 19 nt, Artificial Sequence
  Synthetic
accagcaagaauuuggaag

SEQ ID NO: 13356 - RNA, 19 nt, Artificial Sequence
  Synthetic
ccagcaagaauuuggaaga

SEQ ID NO: 13357 - RNA, 19 nt, Artificial Sequence
  Synthetic
cagcaagaauuuggaagau

SEQ ID NO: 13358 - RNA, 19 nt, Artificial Sequence
  Synthetic
agcaagaauuuggaagauu

SEQ ID NO: 13359 - RNA, 19 nt, Artificial Sequence
  Synthetic
gcaagaauuuggaagauuc

SEQ ID NO: 13360 - RNA, 19 nt, Artificial Sequence
  Synthetic
caagaauuuggaagauucc

SEQ ID NO: 13361 - RNA, 19 nt, Artificial Sequence
  Synthetic
aagaauuuggaagauucca

SEQ ID NO: 13362 - RNA, 19 nt, Artificial Sequence
  Synthetic
agaauuuggaagauuccag

SEQ ID NO: 13363 - RNA, 19 nt, Artificial Sequence
  Synthetic
gaauuuggaagauuccagu

SEQ ID NO: 13364 - RNA, 19 nt, Artificial Sequence
  Synthetic
aauuuggaagauuccagug

SEQ ID NO: 13365 - RNA, 19 nt, Artificial Sequence
  Synthetic
auuuggaagauuccaguga

SEQ ID NO: 13366 - RNA, 19 nt, Artificial Sequence
  Synthetic
uuuggaagauuccagugau

SEQ ID NO: 13367 - RNA, 19 nt, Artificial Sequence
  Synthetic
uuggaagauuccagugaug

SEQ ID NO: 13368 - RNA, 19 nt, Artificial Sequence
  Synthetic
uggaagauuccagugaugu

SEQ ID NO: 13369 - RNA, 19 nt, Artificial Sequence
  Synthetic
ggaagauuccagugaugua

SEQ ID NO: 13370 - RNA, 19 nt, Artificial Sequence
  Synthetic
gaagauuccagugauguaa

SEQ ID NO: 13371 - RNA, 19 nt, Artificial Sequence
  Synthetic
aagauuccagugauguaaa

SEQ ID NO: 13372 - RNA, 19 nt, Artificial Sequence
  Synthetic
agauuccagugauguaaaa

SEQ ID NO: 13373 - RNA, 19 nt, Artificial Sequence
  Synthetic
gauuccagugauguaaaac

SEQ ID NO: 13374 - RNA, 19 nt, Artificial Sequence
  Synthetic
auuccagugauguaaaacc

SEQ ID NO: 13375 - RNA, 19 nt, Artificial Sequence
  Synthetic
uuccagugauguaaaaccu

SEQ ID NO: 13376 - RNA, 19 nt, Artificial Sequence
  Synthetic
uccagugauguaaaaccug

SEQ ID NO: 13377 - RNA, 19 nt, Artificial Sequence
  Synthetic
ccagugauguaaaaccugc

SEQ ID NO: 13378 - RNA, 19 nt, Artificial Sequence
  Synthetic
cagugauguaaaaccugcc

SEQ ID NO: 13379 - RNA, 19 nt, Artificial Sequence
  Synthetic
agugauguaaaaccugccc

SEQ ID NO: 13380 - RNA, 19 nt, Artificial Sequence
  Synthetic
gugauguaaaaccugcccc

SEQ ID NO: 13381 - RNA, 19 nt, Artificial Sequence
  Synthetic
ugauguaaaaccugccccc

SEQ ID NO: 13382 - RNA, 19 nt, Artificial Sequence
  Synthetic
gauguaaaaccugcccccc

SEQ ID NO: 13383 - RNA, 19 nt, Artificial Sequence
  Synthetic
auguaaaaccugccccccu

SEQ ID NO: 13384 - RNA, 19 nt, Artificial Sequence
  Synthetic
uguaaaaccugccccccuu

SEQ ID NO: 13385 - RNA, 19 nt, Artificial Sequence
  Synthetic
guaaaaccugccccccuug

SEQ ID NO: 13386 - RNA, 19 nt, Artificial Sequence
  Synthetic
uaaaaccugccccccuugg

SEQ ID NO: 13387 - RNA, 19 nt, Artificial Sequence
  Synthetic
aaaaccugccccccuuggu

SEQ ID NO: 13388 - RNA, 19 nt, Artificial Sequence
  Synthetic
aaaccugccccccuuggug

SEQ ID NO: 13389 - RNA, 19 nt, Artificial Sequence
  Synthetic
aaccugccccccuugguga

SEQ ID NO: 13390 - RNA, 19 nt, Artificial Sequence
  Synthetic
accugccccccuuggugag

SEQ ID NO: 13391 - RNA, 19 nt, Artificial Sequence
  Synthetic
ccugccccccuuggugagg

SEQ ID NO: 13392 - RNA, 19 nt, Artificial Sequence
  Synthetic
cugccccccuuggugaggg

SEQ ID NO: 13393 - RNA, 19 nt, Artificial Sequence
  Synthetic
ugccccccuuggugagggu

SEQ ID NO: 13394 - RNA, 19 nt, Artificial Sequence
  Synthetic
gccccccuuggugagggug

SEQ ID NO: 13395 - RNA, 19 nt, Artificial Sequence
  Synthetic
ccccccuuggugaggguga

SEQ ID NO: 13396 - RNA, 19 nt, Artificial Sequence
  Synthetic
cccccuuggugagggugaa

SEQ ID NO: 13397 - RNA, 19 nt, Artificial Sequence
  Synthetic
ccccuuggugagggugaag

SEQ ID NO: 13398 - RNA, 19 nt, Artificial Sequence
  Synthetic
cccuuggugagggugaaga

SEQ ID NO: 13399 - RNA, 19 nt, Artificial Sequence
  Synthetic
ccuuggugagggugaagag

SEQ ID NO: 13400 - RNA, 19 nt, Artificial Sequence
  Synthetic
cuuggugagggugaagagu

SEQ ID NO: 13401 - RNA, 19 nt, Artificial Sequence
  Synthetic
uuggugagggugaagaguu

SEQ ID NO: 13402 - RNA, 19 nt, Artificial Sequence
  Synthetic
uggugagggugaagaguug

SEQ ID NO: 13403 - RNA, 19 nt, Artificial Sequence
  Synthetic
ggugagggugaagaguugg

SEQ ID NO: 13404 - RNA, 19 nt, Artificial Sequence
  Synthetic
gugagggugaagaguuggc

SEQ ID NO: 13405 - RNA, 19 nt, Artificial Sequence
  Synthetic
ugagggugaagaguuggca

SEQ ID NO: 13406 - RNA, 19 nt, Artificial Sequence
  Synthetic
gagggugaagaguuggcag

SEQ ID NO: 13407 - RNA, 19 nt, Artificial Sequence
  Synthetic
agggugaagaguuggcaga

SEQ ID NO: 13408 - RNA, 19 nt, Artificial Sequence
  Synthetic
gggugaagaguuggcagaa

SEQ ID NO: 13409 - RNA, 19 nt, Artificial Sequence
  Synthetic
ggugaagaguuggcagaag

SEQ ID NO: 13410 - RNA, 19 nt, Artificial Sequence
  Synthetic
gugaagaguuggcagaaga

SEQ ID NO: 13411 - RNA, 19 nt, Artificial Sequence
  Synthetic
ugaagaguuggcagaagaa

SEQ ID NO: 13412 - RNA, 19 nt, Artificial Sequence
  Synthetic
gaagaguuggcagaagaac

SEQ ID NO: 13413 - RNA, 19 nt, Artificial Sequence
  Synthetic
aagaguuggcagaagaaca

SEQ ID NO: 13414 - RNA, 19 nt, Artificial Sequence
  Synthetic
agaguuggcagaagaacag

SEQ ID NO: 13415 - RNA, 19 nt, Artificial Sequence
  Synthetic
gaguuggcagaagaacagg

SEQ ID NO: 13416 - RNA, 19 nt, Artificial Sequence
  Synthetic
aguuggcagaagaacagga

SEQ ID NO: 13417 - RNA, 19 nt, Artificial Sequence
  Synthetic
guuggcagaagaacaggaa

SEQ ID NO: 13418 - RNA, 19 nt, Artificial Sequence
  Synthetic
uuggcagaagaacaggaac

SEQ ID NO: 13419 - RNA, 19 nt, Artificial Sequence
  Synthetic
uggcagaagaacaggaaca

SEQ ID NO: 13420 - RNA, 19 nt, Artificial Sequence
  Synthetic
ggcagaagaacaggaacag

SEQ ID NO: 13421 - RNA, 19 nt, Artificial Sequence
  Synthetic
gcagaagaacaggaacaga

SEQ ID NO: 13422 - RNA, 19 nt, Artificial Sequence
  Synthetic
cagaagaacaggaacagag

SEQ ID NO: 13423 - RNA, 19 nt, Artificial Sequence
  Synthetic
agaagaacaggaacagaga

SEQ ID NO: 13424 - RNA, 19 nt, Artificial Sequence
  Synthetic
gaagaacaggaacagagac

SEQ ID NO: 13425 - RNA, 19 nt, Artificial Sequence
  Synthetic
aagaacaggaacagagaca

SEQ ID NO: 13426 - RNA, 19 nt, Artificial Sequence
  Synthetic
agaacaggaacagagacag

SEQ ID NO: 13427 - RNA, 19 nt, Artificial Sequence
  Synthetic
gaacaggaacagagacaga

SEQ ID NO: 13428 - RNA, 19 nt, Artificial Sequence
  Synthetic
aacaggaacagagacagaa

SEQ ID NO: 13429 - RNA, 19 nt, Artificial Sequence
  Synthetic
acaggaacagagacagaau

SEQ ID NO: 13430 - RNA, 19 nt, Artificial Sequence
  Synthetic
caggaacagagacagaaug

SEQ ID NO: 13431 - RNA, 19 nt, Artificial Sequence
  Synthetic
aggaacagagacagaaugc

SEQ ID NO: 13432 - RNA, 19 nt, Artificial Sequence
  Synthetic
ggaacagagacagaaugcu

SEQ ID NO: 13433 - RNA, 19 nt, Artificial Sequence
  Synthetic
gaacagagacagaaugcug

SEQ ID NO: 13434 - RNA, 19 nt, Artificial Sequence
  Synthetic
aacagagacagaaugcuga

SEQ ID NO: 13435 - RNA, 19 nt, Artificial Sequence
  Synthetic
acagagacagaaugcugaa

SEQ ID NO: 13436 - RNA, 19 nt, Artificial Sequence
  Synthetic
cagagacagaaugcugaag

SEQ ID NO: 13437 - RNA, 19 nt, Artificial Sequence
  Synthetic
agagacagaaugcugaaga

SEQ ID NO: 13438 - RNA, 19 nt, Artificial Sequence
  Synthetic
gagacagaaugcugaagau

SEQ ID NO: 13439 - RNA, 19 nt, Artificial Sequence
  Synthetic
agacagaaugcugaagaug

SEQ ID NO: 13440 - RNA, 19 nt, Artificial Sequence
  Synthetic
gacagaaugcugaagauga

SEQ ID NO: 13441 - RNA, 19 nt, Artificial Sequence
  Synthetic
acagaaugcugaagaugau

SEQ ID NO: 13442 - RNA, 19 nt, Artificial Sequence
  Synthetic
cagaaugcugaagaugauc

SEQ ID NO: 13443 - RNA, 19 nt, Artificial Sequence
  Synthetic
agaaugcugaagaugaucg

SEQ ID NO: 13444 - RNA, 19 nt, Artificial Sequence
  Synthetic
gaaugcugaagaugaucga

SEQ ID NO: 13445 - RNA, 19 nt, Artificial Sequence
  Synthetic
aaugcugaagaugaucgac

SEQ ID NO: 13446 - RNA, 19 nt, Artificial Sequence
  Synthetic
augcugaagaugaucgaca

SEQ ID NO: 13447 - RNA, 19 nt, Artificial Sequence
  Synthetic
ugcugaagaugaucgacag

SEQ ID NO: 13448 - RNA, 19 nt, Artificial Sequence
  Synthetic
gcugaagaugaucgacagg

SEQ ID NO: 13449 - RNA, 19 nt, Artificial Sequence
  Synthetic
cugaagaugaucgacagga

SEQ ID NO: 13450 - RNA, 19 nt, Artificial Sequence
  Synthetic
ugaagaugaucgacaggau

SEQ ID NO: 13451 - RNA, 19 nt, Artificial Sequence
  Synthetic
gaagaugaucgacaggauc

SEQ ID NO: 13452 - RNA, 19 nt, Artificial Sequence
  Synthetic
aagaugaucgacaggauca

SEQ ID NO: 13453 - RNA, 19 nt, Artificial Sequence
  Synthetic
agaugaucgacaggaucau

SEQ ID NO: 13454 - RNA, 19 nt, Artificial Sequence
  Synthetic
gaugaucgacaggaucaug

SEQ ID NO: 13455 - RNA, 19 nt, Artificial Sequence
  Synthetic
augaucgacaggaucaugg

SEQ ID NO: 13456 - RNA, 19 nt, Artificial Sequence
  Synthetic
ugaucgacaggaucauggu

SEQ ID NO: 13457 - RNA, 19 nt, Artificial Sequence
  Synthetic
gaucgacaggaucauggug

SEQ ID NO: 13458 - RNA, 19 nt, Artificial Sequence
  Synthetic
aucgacaggaucauggugg

SEQ ID NO: 13459 - RNA, 19 nt, Artificial Sequence
  Synthetic
ucgacaggaucaugguggc

SEQ ID NO: 13460 - RNA, 19 nt, Artificial Sequence
  Synthetic
cgacaggaucaugguggcc

SEQ ID NO: 13461 - RNA, 19 nt, Artificial Sequence
  Synthetic
gacaggaucaugguggccu

SEQ ID NO: 13462 - RNA, 19 nt, Artificial Sequence
  Synthetic
acaggaucaugguggccug

SEQ ID NO: 13463 - RNA, 19 nt, Artificial Sequence
  Synthetic
caggaucaugguggccugg

SEQ ID NO: 13464 - RNA, 19 nt, Artificial Sequence
  Synthetic
aggaucaugguggccugga

SEQ ID NO: 13465 - RNA, 19 nt, Artificial Sequence
  Synthetic
ggaucaugguggccuggac

SEQ ID NO: 13466 - RNA, 19 nt, Artificial Sequence
  Synthetic
gaucaugguggccuggaca

SEQ ID NO: 13467 - RNA, 19 nt, Artificial Sequence
  Synthetic
aucaugguggccuggacag

SEQ ID NO: 13468 - RNA, 19 nt, Artificial Sequence
  Synthetic
ucaugguggccuggacaga

SEQ ID NO: 13469 - RNA, 19 nt, Artificial Sequence
  Synthetic
caugguggccuggacagac

SEQ ID NO: 13470 - RNA, 19 nt, Artificial Sequence
  Synthetic
augguggccuggacagacu

SEQ ID NO: 13471 - RNA, 19 nt, Artificial Sequence
  Synthetic
ugguggccuggacagacug

SEQ ID NO: 13472 - RNA, 19 nt, Artificial Sequence
  Synthetic
gguggccuggacagacugc

SEQ ID NO: 13473 - RNA, 19 nt, Artificial Sequence
  Synthetic
guggccuggacagacugca

SEQ ID NO: 13474 - RNA, 19 nt, Artificial Sequence
  Synthetic
uggccuggacagacugcag

SEQ ID NO: 13475 - RNA, 19 nt, Artificial Sequence
  Synthetic
ggccuggacagacugcagc

SEQ ID NO: 13476 - RNA, 19 nt, Artificial Sequence
  Synthetic
gccuggacagacugcagcc

SEQ ID NO: 13477 - RNA, 19 nt, Artificial Sequence
  Synthetic
ccuggacagacugcagcca

SEQ ID NO: 13478 - RNA, 19 nt, Artificial Sequence
  Synthetic
cuggacagacugcagccau

SEQ ID NO: 13479 - RNA, 19 nt, Artificial Sequence
  Synthetic
uggacagacugcagccauu

SEQ ID NO: 13480 - RNA, 19 nt, Artificial Sequence
  Synthetic
ggacagacugcagccauuc

SEQ ID NO: 13481 - RNA, 19 nt, Artificial Sequence
  Synthetic
gacagacugcagccauucg

SEQ ID NO: 13482 - RNA, 19 nt, Artificial Sequence
  Synthetic
acagacugcagccauucgu

SEQ ID NO: 13483 - RNA, 19 nt, Artificial Sequence
  Synthetic
cagacugcagccauucguu

SEQ ID NO: 13484 - RNA, 19 nt, Artificial Sequence
  Synthetic
agacugcagccauucguuu

SEQ ID NO: 13485 - RNA, 19 nt, Artificial Sequence
  Synthetic
gacugcagccauucguuug

SEQ ID NO: 13486 - RNA, 19 nt, Artificial Sequence
  Synthetic
acugcagccauucguuugg

SEQ ID NO: 13487 - RNA, 19 nt, Artificial Sequence
  Synthetic
cugcagccauucguuuggu

SEQ ID NO: 13488 - RNA, 19 nt, Artificial Sequence
  Synthetic
ugcagccauucguuuggug

SEQ ID NO: 13489 - RNA, 19 nt, Artificial Sequence
  Synthetic
gcagccauucguuugguga

SEQ ID NO: 13490 - RNA, 19 nt, Artificial Sequence
  Synthetic
cagccauucguuuggugau

SEQ ID NO: 13491 - RNA, 19 nt, Artificial Sequence
  Synthetic
agccauucguuuggugaug

SEQ ID NO: 13492 - RNA, 19 nt, Artificial Sequence
  Synthetic
gccauucguuuggugauga

SEQ ID NO: 13493 - RNA, 19 nt, Artificial Sequence
  Synthetic
ccauucguuuggugaugau

SEQ ID NO: 13494 - RNA, 19 nt, Artificial Sequence
  Synthetic
cauucguuuggugaugaug

SEQ ID NO: 13495 - RNA, 19 nt, Artificial Sequence
  Synthetic
auucguuuggugaugauga

SEQ ID NO: 13496 - RNA, 19 nt, Artificial Sequence
  Synthetic
uucguuuggugaugaugag

SEQ ID NO: 13497 - RNA, 19 nt, Artificial Sequence
  Synthetic
ucguuuggugaugaugaga

SEQ ID NO: 13498 - RNA, 19 nt, Artificial Sequence
  Synthetic
cguuuggugaugaugagaa

SEQ ID NO: 13499 - RNA, 19 nt, Artificial Sequence
  Synthetic
guuuggugaugaugagaaa

SEQ ID NO: 13500 - RNA, 19 nt, Artificial Sequence
  Synthetic
uuuggugaugaugagaaac

SEQ ID NO: 13501 - RNA, 19 nt, Artificial Sequence
  Synthetic
uuggugaugaugagaaaca

SEQ ID NO: 13502 - RNA, 19 nt, Artificial Sequence
  Synthetic
uggugaugaugagaaacag

SEQ ID NO: 13503 - RNA, 19 nt, Artificial Sequence
  Synthetic
ggugaugaugagaaacagu

SEQ ID NO: 13504 - RNA, 19 nt, Artificial Sequence
  Synthetic
gugaugaugagaaacagug

SEQ ID NO: 13505 - RNA, 19 nt, Artificial Sequence
  Synthetic
ugaugaugagaaacagugg

SEQ ID NO: 13506 - RNA, 19 nt, Artificial Sequence
  Synthetic
gaugaugagaaacaguggu

SEQ ID NO: 13507 - RNA, 19 nt, Artificial Sequence
  Synthetic
augaugagaaacaguggug

SEQ ID NO: 13508 - RNA, 19 nt, Artificial Sequence
  Synthetic
ugaugagaaacaguggugg

SEQ ID NO: 13509 - RNA, 19 nt, Artificial Sequence
  Synthetic
gaugagaaacaguggugga

SEQ ID NO: 13510 - RNA, 19 nt, Artificial Sequence
  Synthetic
augagaaacagugguggac

SEQ ID NO: 13511 - RNA, 19 nt, Artificial Sequence
  Synthetic
ugagaaacagugguggaca

SEQ ID NO: 13512 - RNA, 19 nt, Artificial Sequence
  Synthetic
gagaaacagugguggacau

SEQ ID NO: 13513 - RNA, 19 nt, Artificial Sequence
  Synthetic
agaaacagugguggacauu

SEQ ID NO: 13514 - RNA, 19 nt, Artificial Sequence
  Synthetic
gaaacagugguggacauuu

SEQ ID NO: 13515 - RNA, 19 nt, Artificial Sequence
  Synthetic
aaacagugguggacauuuc

SEQ ID NO: 13516 - RNA, 19 nt, Artificial Sequence
  Synthetic
aacagugguggacauuucc

SEQ ID NO: 13517 - RNA, 19 nt, Artificial Sequence
  Synthetic
acagugguggacauuuccu

SEQ ID NO: 13518 - RNA, 19 nt, Artificial Sequence
  Synthetic
cagugguggacauuuccug

SEQ ID NO: 13519 - RNA, 19 nt, Artificial Sequence
  Synthetic
agugguggacauuuccuga

SEQ ID NO: 13520 - RNA, 19 nt, Artificial Sequence
  Synthetic
gugguggacauuuccugag

SEQ ID NO: 13521 - RNA, 19 nt, Artificial Sequence
  Synthetic
ugguggacauuuccugagg

SEQ ID NO: 13522 - RNA, 19 nt, Artificial Sequence
  Synthetic
gguggacauuuccugagga

SEQ ID NO: 13523 - RNA, 19 nt, Artificial Sequence
  Synthetic
guggacauuuccugaggaa

SEQ ID NO: 13524 - RNA, 19 nt, Artificial Sequence
  Synthetic
uggacauuuccugaggaag

SEQ ID NO: 13525 - RNA, 19 nt, Artificial Sequence
  Synthetic
ggacauuuccugaggaaga

SEQ ID NO: 13526 - RNA, 19 nt, Artificial Sequence
  Synthetic
gacauuuccugaggaagag

SEQ ID NO: 13527 - RNA, 19 nt, Artificial Sequence
  Synthetic
acauuuccugaggaagagg

SEQ ID NO: 13528 - RNA, 19 nt, Artificial Sequence
  Synthetic
cauuuccugaggaagaggu

SEQ ID NO: 13529 - RNA, 19 nt, Artificial Sequence
  Synthetic
auuuccugaggaagaggug

SEQ ID NO: 13530 - RNA, 19 nt, Artificial Sequence
  Synthetic
uuuccugaggaagaggugc

SEQ ID NO: 13531 - RNA, 19 nt, Artificial Sequence
  Synthetic
uuccugaggaagaggugcu

SEQ ID NO: 13532 - RNA, 19 nt, Artificial Sequence
  Synthetic
uccugaggaagaggugcua

SEQ ID NO: 13533 - RNA, 19 nt, Artificial Sequence
  Synthetic
ccugaggaagaggugcuac

SEQ ID NO: 13534 - RNA, 19 nt, Artificial Sequence
  Synthetic
cugaggaagaggugcuaca

SEQ ID NO: 13535 - RNA, 19 nt, Artificial Sequence
  Synthetic
ugaggaagaggugcuacag

SEQ ID NO: 13536 - RNA, 19 nt, Artificial Sequence
  Synthetic
gaggaagaggugcuacagu

SEQ ID NO: 13537 - RNA, 19 nt, Artificial Sequence
  Synthetic
aggaagaggugcuacaguu

SEQ ID NO: 13538 - RNA, 19 nt, Artificial Sequence
  Synthetic
ggaagaggugcuacaguuc

SEQ ID NO: 13539 - RNA, 19 nt, Artificial Sequence
  Synthetic
gaagaggugcuacaguucu

SEQ ID NO: 13540 - RNA, 19 nt, Artificial Sequence
  Synthetic
aagaggugcuacaguucug

SEQ ID NO: 13541 - RNA, 19 nt, Artificial Sequence
  Synthetic
agaggugcuacaguucugc

SEQ ID NO: 13542 - RNA, 19 nt, Artificial Sequence
  Synthetic
gaggugcuacaguucugcc

SEQ ID NO: 13543 - RNA, 19 nt, Artificial Sequence
  Synthetic
aggugcuacaguucugcca

SEQ ID NO: 13544 - RNA, 19 nt, Artificial Sequence
  Synthetic
ggugcuacaguucugccag

SEQ ID NO: 13545 - RNA, 19 nt, Artificial Sequence
  Synthetic
gugcuacaguucugccaga

SEQ ID NO: 13546 - RNA, 19 nt, Artificial Sequence
  Synthetic
ugcuacaguucugccagag

SEQ ID NO: 13547 - RNA, 19 nt, Artificial Sequence
  Synthetic
gcuacaguucugccagaga

SEQ ID NO: 13548 - RNA, 19 nt, Artificial Sequence
  Synthetic
cuacaguucugccagagau

SEQ ID NO: 13549 - RNA, 19 nt, Artificial Sequence
  Synthetic
uacaguucugccagagauc

SEQ ID NO: 13550 - RNA, 19 nt, Artificial Sequence
  Synthetic
acaguucugccagagauca

SEQ ID NO: 13551 - RNA, 19 nt, Artificial Sequence
  Synthetic
caguucugccagagaucag

SEQ ID NO: 13552 - RNA, 19 nt, Artificial Sequence
  Synthetic
aguucugccagagaucagu

SEQ ID NO: 13553 - RNA, 19 nt, Artificial Sequence
  Synthetic
guucugccagagaucaguu

SEQ ID NO: 13554 - RNA, 19 nt, Artificial Sequence
  Synthetic
uucugccagagaucaguug

SEQ ID NO: 13555 - RNA, 19 nt, Artificial Sequence
  Synthetic
ucugccagagaucaguugc

SEQ ID NO: 13556 - RNA, 19 nt, Artificial Sequence
  Synthetic
cugccagagaucaguugcg

SEQ ID NO: 13557 - RNA, 19 nt, Artificial Sequence
  Synthetic
ugccagagaucaguugcgu

SEQ ID NO: 13558 - RNA, 19 nt, Artificial Sequence
  Synthetic
gccagagaucaguugcgug

SEQ ID NO: 13559 - RNA, 19 nt, Artificial Sequence
  Synthetic
ccagagaucaguugcgugu

SEQ ID NO: 13560 - RNA, 19 nt, Artificial Sequence
  Synthetic
cagagaucaguugcguguc

SEQ ID NO: 13561 - RNA, 19 nt, Artificial Sequence
  Synthetic
agagaucaguugcgugucc

SEQ ID NO: 13562 - RNA, 19 nt, Artificial Sequence
  Synthetic
gagaucaguugcgugucca

SEQ ID NO: 13563 - RNA, 19 nt, Artificial Sequence
  Synthetic
agaucaguugcguguccau

SEQ ID NO: 13564 - RNA, 19 nt, Artificial Sequence
  Synthetic
gaucaguugcguguccauu

SEQ ID NO: 13565 - RNA, 19 nt, Artificial Sequence
  Synthetic
aucaguugcguguccauug

SEQ ID NO: 13566 - RNA, 19 nt, Artificial Sequence
  Synthetic
ucaguugcguguccauugc

SEQ ID NO: 13567 - RNA, 19 nt, Artificial Sequence
  Synthetic
caguugcguguccauugcc

SEQ ID NO: 13568 - RNA, 19 nt, Artificial Sequence
  Synthetic
aguugcguguccauugccc

SEQ ID NO: 13569 - RNA, 19 nt, Artificial Sequence
  Synthetic
guugcguguccauugccca

SEQ ID NO: 13570 - RNA, 19 nt, Artificial Sequence
  Synthetic
uugcguguccauugcccac

SEQ ID NO: 13571 - RNA, 19 nt, Artificial Sequence
  Synthetic
ugcguguccauugcccacg

SEQ ID NO: 13572 - RNA, 19 nt, Artificial Sequence
  Synthetic
gcguguccauugcccacga

SEQ ID NO: 13573 - RNA, 19 nt, Artificial Sequence
  Synthetic
cguguccauugcccacgau

SEQ ID NO: 13574 - RNA, 19 nt, Artificial Sequence
  Synthetic
guguccauugcccacgauc

SEQ ID NO: 13575 - RNA, 19 nt, Artificial Sequence
  Synthetic
uguccauugcccacgaucc

SEQ ID NO: 13576 - RNA, 19 nt, Artificial Sequence
  Synthetic
guccauugcccacgaucca

SEQ ID NO: 13577 - RNA, 19 nt, Artificial Sequence
  Synthetic
uccauugcccacgauccau

SEQ ID NO: 13578 - RNA, 19 nt, Artificial Sequence
  Synthetic
ccauugcccacgauccauu

SEQ ID NO: 13579 - RNA, 19 nt, Artificial Sequence
  Synthetic
cauugcccacgauccauug

SEQ ID NO: 13580 - RNA, 19 nt, Artificial Sequence
  Synthetic
auugcccacgauccauugg

SEQ ID NO: 13581 - RNA, 19 nt, Artificial Sequence
  Synthetic
uugcccacgauccauuggc

SEQ ID NO: 13582 - RNA, 19 nt, Artificial Sequence
  Synthetic
ugcccacgauccauuggcu

SEQ ID NO: 13583 - RNA, 19 nt, Artificial Sequence
  Synthetic
gcccacgauccauuggcug

SEQ ID NO: 13584 - RNA, 19 nt, Artificial Sequence
  Synthetic
cccacgauccauuggcuga

SEQ ID NO: 13585 - RNA, 19 nt, Artificial Sequence
  Synthetic
ccacgauccauuggcugac

SEQ ID NO: 13586 - RNA, 19 nt, Artificial Sequence
  Synthetic
cacgauccauuggcugacg

SEQ ID NO: 13587 - RNA, 19 nt, Artificial Sequence
  Synthetic
acgauccauuggcugacga

SEQ ID NO: 13588 - RNA, 19 nt, Artificial Sequence
  Synthetic
cgauccauuggcugacgau

SEQ ID NO: 13589 - RNA, 19 nt, Artificial Sequence
  Synthetic
gauccauuggcugacgauc

SEQ ID NO: 13590 - RNA, 19 nt, Artificial Sequence
  Synthetic
auccauuggcugacgaucg

SEQ ID NO: 13591 - RNA, 19 nt, Artificial Sequence
  Synthetic
uccauuggcugacgaucgu

SEQ ID NO: 13592 - RNA, 19 nt, Artificial Sequence
  Synthetic
ccauuggcugacgaucgug

SEQ ID NO: 13593 - RNA, 19 nt, Artificial Sequence
  Synthetic
cauuggcugacgaucgugg

SEQ ID NO: 13594 - RNA, 19 nt, Artificial Sequence
  Synthetic
auuggcugacgaucgugga

SEQ ID NO: 13595 - RNA, 19 nt, Artificial Sequence
  Synthetic
uuggcugacgaucguggag

SEQ ID NO: 13596 - RNA, 19 nt, Artificial Sequence
  Synthetic
uggcugacgaucguggaga

SEQ ID NO: 13597 - RNA, 19 nt, Artificial Sequence
  Synthetic
ggcugacgaucguggagac

SEQ ID NO: 13598 - RNA, 19 nt, Artificial Sequence
  Synthetic
gcugacgaucguggagacg

SEQ ID NO: 13599 - RNA, 19 nt, Artificial Sequence
  Synthetic
cugacgaucguggagacga

SEQ ID NO: 13600 - RNA, 19 nt, Artificial Sequence
  Synthetic
ugacgaucguggagacgaa

SEQ ID NO: 13601 - RNA, 19 nt, Artificial Sequence
  Synthetic
gacgaucguggagacgaac

SEQ ID NO: 13602 - RNA, 19 nt, Artificial Sequence
  Synthetic
acgaucguggagacgaaca

SEQ ID NO: 13603 - RNA, 19 nt, Artificial Sequence
  Synthetic
cgaucguggagacgaacag

SEQ ID NO: 13604 - RNA, 19 nt, Artificial Sequence
  Synthetic
gaucguggagacgaacagc

SEQ ID NO: 13605 - RNA, 19 nt, Artificial Sequence
  Synthetic
aucguggagacgaacagca

SEQ ID NO: 13606 - RNA, 19 nt, Artificial Sequence
  Synthetic
ucguggagacgaacagcag

SEQ ID NO: 13607 - RNA, 19 nt, Artificial Sequence
  Synthetic
cguggagacgaacagcagc

SEQ ID NO: 13608 - RNA, 19 nt, Artificial Sequence
  Synthetic
guggagacgaacagcagca

SEQ ID NO: 13609 - RNA, 19 nt, Artificial Sequence
  Synthetic
uggagacgaacagcagcac

SEQ ID NO: 13610 - RNA, 19 nt, Artificial Sequence
  Synthetic
ggagacgaacagcagcacc

SEQ ID NO: 13611 - RNA, 19 nt, Artificial Sequence
  Synthetic
gagacgaacagcagcacca

SEQ ID NO: 13612 - RNA, 19 nt, Artificial Sequence
  Synthetic
agacgaacagcagcaccag

SEQ ID NO: 13613 - RNA, 19 nt, Artificial Sequence
  Synthetic
gacgaacagcagcaccagc

SEQ ID NO: 13614 - RNA, 19 nt, Artificial Sequence
  Synthetic
acgaacagcagcaccagca

SEQ ID NO: 13615 - RNA, 19 nt, Artificial Sequence
  Synthetic
cgaacagcagcaccagcac

SEQ ID NO: 13616 - RNA, 19 nt, Artificial Sequence
  Synthetic
gaacagcagcaccagcacc

SEQ ID NO: 13617 - RNA, 19 nt, Artificial Sequence
  Synthetic
aacagcagcaccagcaccg

SEQ ID NO: 13618 - RNA, 19 nt, Artificial Sequence
  Synthetic
acagcagcaccagcaccgc

SEQ ID NO: 13619 - RNA, 19 nt, Artificial Sequence
  Synthetic
cagcagcaccagcaccgcg

SEQ ID NO: 13620 - RNA, 19 nt, Artificial Sequence
  Synthetic
agcagcaccagcaccgcga

SEQ ID NO: 13621 - RNA, 19 nt, Artificial Sequence
  Synthetic
gcagcaccagcaccgcgac

SEQ ID NO: 13622 - RNA, 19 nt, Artificial Sequence
  Synthetic
cagcaccagcaccgcgacg

SEQ ID NO: 13623 - RNA, 19 nt, Artificial Sequence
  Synthetic
agcaccagcaccgcgacgu

SEQ ID NO: 13624 - RNA, 19 nt, Artificial Sequence
  Synthetic
gcaccagcaccgcgacgug

SEQ ID NO: 13625 - RNA, 19 nt, Artificial Sequence
  Synthetic
caccagcaccgcgacgugg

SEQ ID NO: 13626 - RNA, 19 nt, Artificial Sequence
  Synthetic
accagcaccgcgacgugga

SEQ ID NO: 13627 - RNA, 19 nt, Artificial Sequence
  Synthetic
ccagcaccgcgacguggag

SEQ ID NO: 13628 - RNA, 19 nt, Artificial Sequence
  Synthetic
cagcaccgcgacguggagg

SEQ ID NO: 13629 - RNA, 19 nt, Artificial Sequence
  Synthetic
agcaccgcgacguggagga

SEQ ID NO: 13630 - RNA, 19 nt, Artificial Sequence
  Synthetic
gcaccgcgacguggaggac

SEQ ID NO: 13631 - RNA, 19 nt, Artificial Sequence
  Synthetic
caccgcgacguggaggacg

SEQ ID NO: 13632 - RNA, 19 nt, Artificial Sequence
  Synthetic
accgcgacguggaggacga

SEQ ID NO: 13633 - RNA, 19 nt, Artificial Sequence
  Synthetic
ccgcgacguggaggacgau

SEQ ID NO: 13634 - RNA, 19 nt, Artificial Sequence
  Synthetic
cgcgacguggaggacgaug

SEQ ID NO: 13635 - RNA, 19 nt, Artificial Sequence
  Synthetic
gcgacguggaggacgauga

SEQ ID NO: 13636 - RNA, 19 nt, Artificial Sequence
  Synthetic
cgacguggaggacgaugau

SEQ ID NO: 13637 - RNA, 19 nt, Artificial Sequence
  Synthetic
gacguggaggacgaugaua

SEQ ID NO: 13638 - RNA, 19 nt, Artificial Sequence
  Synthetic
acguggaggacgaugauac

SEQ ID NO: 13639 - RNA, 19 nt, Artificial Sequence
  Synthetic
cguggaggacgaugauacu

SEQ ID NO: 13640 - RNA, 19 nt, Artificial Sequence
  Synthetic
guggaggacgaugauacuc

SEQ ID NO: 13641 - RNA, 19 nt, Artificial Sequence
  Synthetic
uggaggacgaugauacuca

SEQ ID NO: 13642 - RNA, 19 nt, Artificial Sequence
  Synthetic
ggaggacgaugauacucag

SEQ ID NO: 13643 - RNA, 19 nt, Artificial Sequence
  Synthetic
gaggacgaugauacucagc

SEQ ID NO: 13644 - RNA, 19 nt, Artificial Sequence
  Synthetic
aggacgaugauacucagca

SEQ ID NO: 13645 - RNA, 19 nt, Artificial Sequence
  Synthetic
ggacgaugauacucagcaa

SEQ ID NO: 13646 - RNA, 19 nt, Artificial Sequence
  Synthetic
gacgaugauacucagcaac

SEQ ID NO: 13647 - RNA, 19 nt, Artificial Sequence
  Synthetic
acgaugauacucagcaaca

SEQ ID NO: 13648 - RNA, 19 nt, Artificial Sequence
  Synthetic
cgaugauacucagcaacag

SEQ ID NO: 13649 - RNA, 19 nt, Artificial Sequence
  Synthetic
gaugauacucagcaacagg

SEQ ID NO: 13650 - RNA, 19 nt, Artificial Sequence
  Synthetic
augauacucagcaacagga

SEQ ID NO: 13651 - RNA, 19 nt, Artificial Sequence
  Synthetic
ugauacucagcaacaggag

SEQ ID NO: 13652 - RNA, 19 nt, Artificial Sequence
  Synthetic
gauacucagcaacaggagg

SEQ ID NO: 13653 - RNA, 19 nt, Artificial Sequence
  Synthetic
auacucagcaacaggagga

SEQ ID NO: 13654 - RNA, 19 nt, Artificial Sequence
  Synthetic
uacucagcaacaggaggag

SEQ ID NO: 13655 - RNA, 19 nt, Artificial Sequence
  Synthetic
acucagcaacaggaggagc

SEQ ID NO: 13656 - RNA, 19 nt, Artificial Sequence
  Synthetic
cucagcaacaggaggagca

SEQ ID NO: 13657 - RNA, 19 nt, Artificial Sequence
  Synthetic
ucagcaacaggaggagcau

SEQ ID NO: 13658 - RNA, 19 nt, Artificial Sequence
  Synthetic
cagcaacaggaggagcauu

SEQ ID NO: 13659 - RNA, 19 nt, Artificial Sequence
  Synthetic
agcaacaggaggagcauuc

SEQ ID NO: 13660 - RNA, 19 nt, Artificial Sequence
  Synthetic
gcaacaggaggagcauucu

SEQ ID NO: 13661 - RNA, 19 nt, Artificial Sequence
  Synthetic
caacaggaggagcauucug

SEQ ID NO: 13662 - RNA, 19 nt, Artificial Sequence
  Synthetic
aacaggaggagcauucugg

SEQ ID NO: 13663 - RNA, 19 nt, Artificial Sequence
  Synthetic
acaggaggagcauucuggc

SEQ ID NO: 13664 - RNA, 19 nt, Artificial Sequence
  Synthetic
caggaggagcauucuggcg

SEQ ID NO: 13665 - RNA, 19 nt, Artificial Sequence
  Synthetic
aggaggagcauucuggcgg

SEQ ID NO: 13666 - RNA, 19 nt, Artificial Sequence
  Synthetic
ggaggagcauucuggcggc

SEQ ID NO: 13667 - RNA, 19 nt, Artificial Sequence
  Synthetic
gaggagcauucuggcggca

SEQ ID NO: 13668 - RNA, 19 nt, Artificial Sequence
  Synthetic
aggagcauucuggcggcaa

SEQ ID NO: 13669 - RNA, 19 nt, Artificial Sequence
  Synthetic
ggagcauucuggcggcaag

SEQ ID NO: 13670 - RNA, 19 nt, Artificial Sequence
  Synthetic
gagcauucuggcggcaagu

SEQ ID NO: 13671 - RNA, 19 nt, Artificial Sequence
  Synthetic
agcauucuggcggcaaguu

SEQ ID NO: 13672 - RNA, 19 nt, Artificial Sequence
  Synthetic
gcauucuggcggcaaguuc

SEQ ID NO: 13673 - RNA, 19 nt, Artificial Sequence
  Synthetic
cauucuggcggcaaguucu

SEQ ID NO: 13674 - RNA, 19 nt, Artificial Sequence
  Synthetic
auucuggcggcaaguucug

SEQ ID NO: 13675 - RNA, 19 nt, Artificial Sequence
  Synthetic
uucuggcggcaaguucugc

SEQ ID NO: 13676 - RNA, 19 nt, Artificial Sequence
  Synthetic
ucuggcggcaaguucugcu

SEQ ID NO: 13677 - RNA, 19 nt, Artificial Sequence
  Synthetic
cuggcggcaaguucugcuc

SEQ ID NO: 13678 - RNA, 19 nt, Artificial Sequence
  Synthetic
uggcggcaaguucugcuca

SEQ ID NO: 13679 - RNA, 19 nt, Artificial Sequence
  Synthetic
ggcggcaaguucugcucag

SEQ ID NO: 13680 - RNA, 19 nt, Artificial Sequence
  Synthetic
gcggcaaguucugcucagc

SEQ ID NO: 13681 - RNA, 19 nt, Artificial Sequence
  Synthetic
cggcaaguucugcucagcg

SEQ ID NO: 13682 - RNA, 19 nt, Artificial Sequence
  Synthetic
ggcaaguucugcucagcgg

SEQ ID NO: 13683 - RNA, 19 nt, Artificial Sequence
  Synthetic
gcaaguucugcucagcgga

SEQ ID NO: 13684 - RNA, 19 nt, Artificial Sequence
  Synthetic
caaguucugcucagcggag

SEQ ID NO: 13685 - RNA, 19 nt, Artificial Sequence
  Synthetic
aaguucugcucagcggagu

SEQ ID NO: 13686 - RNA, 19 nt, Artificial Sequence
  Synthetic
aguucugcucagcggaguu

SEQ ID NO: 13687 - RNA, 19 nt, Artificial Sequence
  Synthetic
guucugcucagcggaguuu

SEQ ID NO: 13688 - RNA, 19 nt, Artificial Sequence
  Synthetic
uucugcucagcggaguuuc

SEQ ID NO: 13689 - RNA, 19 nt, Artificial Sequence
  Synthetic
ucugcucagcggaguuucu

SEQ ID NO: 13690 - RNA, 19 nt, Artificial Sequence
  Synthetic
cugcucagcggaguuucug

SEQ ID NO: 13691 - RNA, 19 nt, Artificial Sequence
  Synthetic
ugcucagcggaguuucugc

SEQ ID NO: 13692 - RNA, 19 nt, Artificial Sequence
  Synthetic
gcucagcggaguuucugca

SEQ ID NO: 13693 - RNA, 19 nt, Artificial Sequence
  Synthetic
cucagcggaguuucugcag

SEQ ID NO: 13694 - RNA, 19 nt, Artificial Sequence
  Synthetic
ucagcggaguuucugcagc

SEQ ID NO: 13695 - RNA, 19 nt, Artificial Sequence
  Synthetic
cagcggaguuucugcagcc

SEQ ID NO: 13696 - RNA, 19 nt, Artificial Sequence
  Synthetic
agcggaguuucugcagccc

SEQ ID NO: 13697 - RNA, 19 nt, Artificial Sequence
  Synthetic
gcggaguuucugcagccca

SEQ ID NO: 13698 - RNA, 19 nt, Artificial Sequence
  Synthetic
cggaguuucugcagcccaa

SEQ ID NO: 13699 - RNA, 19 nt, Artificial Sequence
  Synthetic
ggaguuucugcagcccaaa

SEQ ID NO: 13700 - RNA, 19 nt, Artificial Sequence
  Synthetic
gaguuucugcagcccaaag

SEQ ID NO: 13701 - RNA, 19 nt, Artificial Sequence
  Synthetic
aguuucugcagcccaaagg

SEQ ID NO: 13702 - RNA, 19 nt, Artificial Sequence
  Synthetic
guuucugcagcccaaagga

SEQ ID NO: 13703 - RNA, 19 nt, Artificial Sequence
  Synthetic
uuucugcagcccaaaggaa

SEQ ID NO: 13704 - RNA, 19 nt, Artificial Sequence
  Synthetic
uucugcagcccaaaggaac

SEQ ID NO: 13705 - RNA, 19 nt, Artificial Sequence
  Synthetic
ucugcagcccaaaggaaca

SEQ ID NO: 13706 - RNA, 19 nt, Artificial Sequence
  Synthetic
cugcagcccaaaggaacag

SEQ ID NO: 13707 - RNA, 19 nt, Artificial Sequence
  Synthetic
ugcagcccaaaggaacagc

SEQ ID NO: 13708 - RNA, 19 nt, Artificial Sequence
  Synthetic
gcagcccaaaggaacagcu

SEQ ID NO: 13709 - RNA, 19 nt, Artificial Sequence
  Synthetic
cagcccaaaggaacagcug

SEQ ID NO: 13710 - RNA, 19 nt, Artificial Sequence
  Synthetic
agcccaaaggaacagcugu

SEQ ID NO: 13711 - RNA, 19 nt, Artificial Sequence
  Synthetic
gcccaaaggaacagcuguc

SEQ ID NO: 13712 - RNA, 19 nt, Artificial Sequence
  Synthetic
cccaaaggaacagcugucc

SEQ ID NO: 13713 - RNA, 19 nt, Artificial Sequence
  Synthetic
ccaaaggaacagcuguccc

SEQ ID NO: 13714 - RNA, 19 nt, Artificial Sequence
  Synthetic
caaaggaacagcugucccg

SEQ ID NO: 13715 - RNA, 19 nt, Artificial Sequence
  Synthetic
aaaggaacagcugucccga

SEQ ID NO: 13716 - RNA, 19 nt, Artificial Sequence
  Synthetic
aaggaacagcugucccgau

SEQ ID NO: 13717 - RNA, 19 nt, Artificial Sequence
  Synthetic
aggaacagcugucccgauc

SEQ ID NO: 13718 - RNA, 19 nt, Artificial Sequence
  Synthetic
ggaacagcugucccgaucc

SEQ ID NO: 13719 - RNA, 19 nt, Artificial Sequence
  Synthetic
gaacagcugucccgauccu

SEQ ID NO: 13720 - RNA, 19 nt, Artificial Sequence
  Synthetic
aacagcugucccgauccuc

SEQ ID NO: 13721 - RNA, 19 nt, Artificial Sequence
  Synthetic
acagcugucccgauccuca

SEQ ID NO: 13722 - RNA, 19 nt, Artificial Sequence
  Synthetic
cagcugucccgauccucag

SEQ ID NO: 13723 - RNA, 19 nt, Artificial Sequence
  Synthetic
agcugucccgauccucagg

SEQ ID NO: 13724 - RNA, 19 nt, Artificial Sequence
  Synthetic
gcugucccgauccucaggg

SEQ ID NO: 13725 - RNA, 19 nt, Artificial Sequence
  Synthetic
cugucccgauccucagggu

SEQ ID NO: 13726 - RNA, 19 nt, Artificial Sequence
  Synthetic
ugucccgauccucagggug

SEQ ID NO: 13727 - RNA, 19 nt, Artificial Sequence
  Synthetic
gucccgauccucagggugg

SEQ ID NO: 13728 - RNA, 19 nt, Artificial Sequence
  Synthetic
ucccgauccucaggguggc

SEQ ID NO: 13729 - RNA, 19 nt, Artificial Sequence
  Synthetic
cccgauccucaggguggcc

SEQ ID NO: 13730 - RNA, 19 nt, Artificial Sequence
  Synthetic
ccgauccucaggguggccu

SEQ ID NO: 13731 - RNA, 19 nt, Artificial Sequence
  Synthetic
cgauccucaggguggccuc

SEQ ID NO: 13732 - RNA, 19 nt, Artificial Sequence
  Synthetic
gauccucaggguggccuca

SEQ ID NO: 13733 - RNA, 19 nt, Artificial Sequence
  Synthetic
auccucaggguggccucaa

SEQ ID NO: 13734 - RNA, 19 nt, Artificial Sequence
  Synthetic
uccucaggguggccucaaa

SEQ ID NO: 13735 - RNA, 19 nt, Artificial Sequence
  Synthetic
ccucaggguggccucaaac

SEQ ID NO: 13736 - RNA, 19 nt, Artificial Sequence
  Synthetic
cucaggguggccucaaaca

SEQ ID NO: 13737 - RNA, 19 nt, Artificial Sequence
  Synthetic
ucaggguggccucaaacac

SEQ ID NO: 13738 - RNA, 19 nt, Artificial Sequence
  Synthetic
caggguggccucaaacaca

SEQ ID NO: 13739 - RNA, 19 nt, Artificial Sequence
  Synthetic
aggguggccucaaacacaa

SEQ ID NO: 13740 - RNA, 19 nt, Artificial Sequence
  Synthetic
ggguggccucaaacacaaa

SEQ ID NO: 13741 - RNA, 19 nt, Artificial Sequence
  Synthetic
gguggccucaaacacaaac

SEQ ID NO: 13742 - RNA, 19 nt, Artificial Sequence
  Synthetic
guggccucaaacacaaacu

SEQ ID NO: 13743 - RNA, 19 nt, Artificial Sequence
  Synthetic
uggccucaaacacaaacuc

SEQ ID NO: 13744 - RNA, 19 nt, Artificial Sequence
  Synthetic
ggccucaaacacaaacucg

SEQ ID NO: 13745 - RNA, 19 nt, Artificial Sequence
  Synthetic
gccucaaacacaaacucgg

SEQ ID NO: 13746 - RNA, 19 nt, Artificial Sequence
  Synthetic
ccucaaacacaaacucggg

SEQ ID NO: 13747 - RNA, 19 nt, Artificial Sequence
  Synthetic
cucaaacacaaacucgggu

SEQ ID NO: 13748 - RNA, 19 nt, Artificial Sequence
  Synthetic
ucaaacacaaacucgggug

SEQ ID NO: 13749 - RNA, 19 nt, Artificial Sequence
  Synthetic
caaacacaaacucgggugc

SEQ ID NO: 13750 - RNA, 19 nt, Artificial Sequence
  Synthetic
aaacacaaacucgggugcg

SEQ ID NO: 13751 - RNA, 19 nt, Artificial Sequence
  Synthetic
aacacaaacucgggugcgu

SEQ ID NO: 13752 - RNA, 19 nt, Artificial Sequence
  Synthetic
acacaaacucgggugcguu

SEQ ID NO: 13753 - RNA, 19 nt, Artificial Sequence
  Synthetic
cacaaacucgggugcguug

SEQ ID NO: 13754 - RNA, 19 nt, Artificial Sequence
  Synthetic
acaaacucgggugcguugg

SEQ ID NO: 13755 - RNA, 19 nt, Artificial Sequence
  Synthetic
caaacucgggugcguuggc

SEQ ID NO: 13756 - RNA, 19 nt, Artificial Sequence
  Synthetic
aaacucgggugcguuggcu

SEQ ID NO: 13757 - RNA, 19 nt, Artificial Sequence
  Synthetic
aacucgggugcguuggcuc

SEQ ID NO: 13758 - RNA, 19 nt, Artificial Sequence
  Synthetic
acucgggugcguuggcucc

SEQ ID NO: 13759 - RNA, 19 nt, Artificial Sequence
  Synthetic
cucgggugcguuggcuccg

SEQ ID NO: 13760 - RNA, 19 nt, Artificial Sequence
  Synthetic
ucgggugcguuggcuccgc

SEQ ID NO: 13761 - RNA, 19 nt, Artificial Sequence
  Synthetic
cgggugcguuggcuccgcu

SEQ ID NO: 13762 - RNA, 19 nt, Artificial Sequence
  Synthetic
gggugcguuggcuccgcug

SEQ ID NO: 13763 - RNA, 19 nt, Artificial Sequence
  Synthetic
ggugcguuggcuccgcugc

SEQ ID NO: 13764 - RNA, 19 nt, Artificial Sequence
  Synthetic
gugcguuggcuccgcugcu

SEQ ID NO: 13765 - RNA, 19 nt, Artificial Sequence
  Synthetic
ugcguuggcuccgcugcug

SEQ ID NO: 13766 - RNA, 19 nt, Artificial Sequence
  Synthetic
gcguuggcuccgcugcugg

SEQ ID NO: 13767 - RNA, 19 nt, Artificial Sequence
  Synthetic
cguuggcuccgcugcuggc

SEQ ID NO: 13768 - RNA, 19 nt, Artificial Sequence
  Synthetic
guuggcuccgcugcuggcg

SEQ ID NO: 13769 - RNA, 19 nt, Artificial Sequence
  Synthetic
uuggcuccgcugcuggcgc

SEQ ID NO: 13770 - RNA, 19 nt, Artificial Sequence
  Synthetic
uggcuccgcugcuggcgcc

SEQ ID NO: 13771 - RNA, 19 nt, Artificial Sequence
  Synthetic
ggcuccgcugcuggcgccg

SEQ ID NO: 13772 - RNA, 19 nt, Artificial Sequence
  Synthetic
gcuccgcugcuggcgccgc

SEQ ID NO: 13773 - RNA, 19 nt, Artificial Sequence
  Synthetic
cuccgcugcuggcgccgcc

SEQ ID NO: 13774 - RNA, 19 nt, Artificial Sequence
  Synthetic
uccgcugcuggcgccgcca

SEQ ID NO: 13775 - RNA, 19 nt, Artificial Sequence
  Synthetic
ccgcugcuggcgccgccaa

SEQ ID NO: 13776 - RNA, 19 nt, Artificial Sequence
  Synthetic
cgcugcuggcgccgccaaa

SEQ ID NO: 13777 - RNA, 19 nt, Artificial Sequence
  Synthetic
gcugcuggcgccgccaaag

SEQ ID NO: 13778 - RNA, 19 nt, Artificial Sequence
  Synthetic
cugcuggcgccgccaaagc

SEQ ID NO: 13779 - RNA, 19 nt, Artificial Sequence
  Synthetic
ugcuggcgccgccaaagcu

SEQ ID NO: 13780 - RNA, 19 nt, Artificial Sequence
  Synthetic
gcuggcgccgccaaagcug

SEQ ID NO: 13781 - RNA, 19 nt, Artificial Sequence
  Synthetic
cuggcgccgccaaagcugc

SEQ ID NO: 13782 - RNA, 19 nt, Artificial Sequence
  Synthetic
uggcgccgccaaagcugcg

SEQ ID NO: 13783 - RNA, 19 nt, Artificial Sequence
  Synthetic
ggcgccgccaaagcugcgc

SEQ ID NO: 13784 - RNA, 19 nt, Artificial Sequence
  Synthetic
gcgccgccaaagcugcgcu

SEQ ID NO: 13785 - RNA, 19 nt, Artificial Sequence
  Synthetic
cgccgccaaagcugcgcug

SEQ ID NO: 13786 - RNA, 19 nt, Artificial Sequence
  Synthetic
gccgccaaagcugcgcugc

SEQ ID NO: 13787 - RNA, 19 nt, Artificial Sequence
  Synthetic
ccgccaaagcugcgcugcg

SEQ ID NO: 13788 - RNA, 19 nt, Artificial Sequence
  Synthetic
cgccaaagcugcgcugcgg

SEQ ID NO: 13789 - RNA, 19 nt, Artificial Sequence
  Synthetic
gccaaagcugcgcugcggg

SEQ ID NO: 13790 - RNA, 19 nt, Artificial Sequence
  Synthetic
ccaaagcugcgcugcgggg

SEQ ID NO: 13791 - RNA, 19 nt, Artificial Sequence
  Synthetic
caaagcugcgcugcggggc

SEQ ID NO: 13792 - RNA, 19 nt, Artificial Sequence
  Synthetic
aaagcugcgcugcggggcu

SEQ ID NO: 13793 - RNA, 19 nt, Artificial Sequence
  Synthetic
aagcugcgcugcggggcug

SEQ ID NO: 13794 - RNA, 19 nt, Artificial Sequence
  Synthetic
agcugcgcugcggggcugc

SEQ ID NO: 13795 - RNA, 19 nt, Artificial Sequence
  Synthetic
gcugcgcugcggggcugcg

SEQ ID NO: 13796 - RNA, 19 nt, Artificial Sequence
  Synthetic
cugcgcugcggggcugcgc

SEQ ID NO: 13797 - RNA, 19 nt, Artificial Sequence
  Synthetic
ugcgcugcggggcugcgcg

SEQ ID NO: 13798 - RNA, 19 nt, Artificial Sequence
  Synthetic
gcgcugcggggcugcgcgc

SEQ ID NO: 13799 - RNA, 19 nt, Artificial Sequence
  Synthetic
cgcugcggggcugcgcgcg

SEQ ID NO: 13800 - RNA, 19 nt, Artificial Sequence
  Synthetic
gcugcggggcugcgcgcgc

SEQ ID NO: 13801 - RNA, 19 nt, Artificial Sequence
  Synthetic
cugcggggcugcgcgcgcg

SEQ ID NO: 13802 - RNA, 19 nt, Artificial Sequence
  Synthetic
ugcggggcugcgcgcgcgc

SEQ ID NO: 13803 - RNA, 19 nt, Artificial Sequence
  Synthetic
gcggggcugcgcgcgcgcg

SEQ ID NO: 13804 - RNA, 19 nt, Artificial Sequence
  Synthetic
cggggcugcgcgcgcgcga

SEQ ID NO: 13805 - RNA, 19 nt, Artificial Sequence
  Synthetic
ggggcugcgcgcgcgcgaa

SEQ ID NO: 13806 - RNA, 19 nt, Artificial Sequence
  Synthetic
gggcugcgcgcgcgcgaag

SEQ ID NO: 13807 - RNA, 19 nt, Artificial Sequence
  Synthetic
ggcugcgcgcgcgcgaagc

SEQ ID NO: 13808 - RNA, 19 nt, Artificial Sequence
  Synthetic
gcugcgcgcgcgcgaagca

SEQ ID NO: 13809 - RNA, 19 nt, Artificial Sequence
  Synthetic
cugcgcgcgcgcgaagcaa

SEQ ID NO: 13810 - RNA, 19 nt, Artificial Sequence
  Synthetic
ugcgcgcgcgcgaagcaag

SEQ ID NO: 13811 - RNA, 19 nt, Artificial Sequence
  Synthetic
gcgcgcgcgcgaagcaagg

SEQ ID NO: 13812 - RNA, 19 nt, Artificial Sequence
  Synthetic
cgcgcgcgcgaagcaaggg

SEQ ID NO: 13813 - RNA, 19 nt, Artificial Sequence
  Synthetic
gcgcgcgcgaagcaagggg

SEQ ID NO: 13814 - RNA, 19 nt, Artificial Sequence
  Synthetic
cgcgcgcgaagcaaggggg

SEQ ID NO: 13815 - RNA, 19 nt, Artificial Sequence
  Synthetic
gcgcgcgaagcaagggggc

SEQ ID NO: 13816 - RNA, 20 nt, Artificial Sequence
  Synthetic
gucacccccaggcuggagug

SEQ ID NO: 13817 - RNA, 20 nt, Artificial Sequence
  Synthetic
ucacccccaggcuggagugc

SEQ ID NO: 13818 - RNA, 20 nt, Artificial Sequence
  Synthetic
cacccccaggcuggagugca

SEQ ID NO: 13819 - RNA, 20 nt, Artificial Sequence
  Synthetic
acccccaggcuggagugcag

SEQ ID NO: 13820 - RNA, 20 nt, Artificial Sequence
  Synthetic
cccccaggcuggagugcagu

SEQ ID NO: 13821 - RNA, 20 nt, Artificial Sequence
  Synthetic
ccccaggcuggagugcagug

SEQ ID NO: 13822 - RNA, 20 nt, Artificial Sequence
  Synthetic
cccaggcuggagugcagugg

SEQ ID NO: 13823 - RNA, 20 nt, Artificial Sequence
  Synthetic
ccaggcuggagugcaguggc

SEQ ID NO: 13824 - RNA, 20 nt, Artificial Sequence
  Synthetic
caggcuggagugcaguggca

SEQ ID NO: 13825 - RNA, 20 nt, Artificial Sequence
  Synthetic
aggcuggagugcaguggcau

SEQ ID NO: 13826 - RNA, 20 nt, Artificial Sequence
  Synthetic
ggcuggagugcaguggcaug

SEQ ID NO: 13827 - RNA, 20 nt, Artificial Sequence
  Synthetic
gcuggagugcaguggcauga

SEQ ID NO: 13828 - RNA, 20 nt, Artificial Sequence
  Synthetic
cuggagugcaguggcaugau

SEQ ID NO: 13829 - RNA, 20 nt, Artificial Sequence
  Synthetic
uggagugcaguggcaugauc

SEQ ID NO: 13830 - RNA, 20 nt, Artificial Sequence
  Synthetic
ggagugcaguggcaugaucu

SEQ ID NO: 13831 - RNA, 20 nt, Artificial Sequence
  Synthetic
gagugcaguggcaugaucuu

SEQ ID NO: 13832 - RNA, 20 nt, Artificial Sequence
  Synthetic
agugcaguggcaugaucuug

SEQ ID NO: 13833 - RNA, 20 nt, Artificial Sequence
  Synthetic
gugcaguggcaugaucuugg

SEQ ID NO: 13834 - RNA, 20 nt, Artificial Sequence
  Synthetic
ugcaguggcaugaucuuggc

SEQ ID NO: 13835 - RNA, 20 nt, Artificial Sequence
  Synthetic
gcaguggcaugaucuuggcu

SEQ ID NO: 13836 - RNA, 20 nt, Artificial Sequence
  Synthetic
caguggcaugaucuuggcuc

SEQ ID NO: 13837 - RNA, 20 nt, Artificial Sequence
  Synthetic
aguggcaugaucuuggcuca

SEQ ID NO: 13838 - RNA, 20 nt, Artificial Sequence
  Synthetic
guggcaugaucuuggcucac

SEQ ID NO: 13839 - RNA, 20 nt, Artificial Sequence
  Synthetic
uggcaugaucuuggcucacu

SEQ ID NO: 13840 - RNA, 20 nt, Artificial Sequence
  Synthetic
ggcaugaucuuggcucacug

SEQ ID NO: 13841 - RNA, 20 nt, Artificial Sequence
  Synthetic
gcaugaucuuggcucacugc

SEQ ID NO: 13842 - RNA, 20 nt, Artificial Sequence
  Synthetic
caugaucuuggcucacugca

SEQ ID NO: 13843 - RNA, 20 nt, Artificial Sequence
  Synthetic
augaucuuggcucacugcaa

SEQ ID NO: 13844 - RNA, 20 nt, Artificial Sequence
  Synthetic
ugaucuuggcucacugcaac

SEQ ID NO: 13845 - RNA, 20 nt, Artificial Sequence
  Synthetic
gaucuuggcucacugcaacc

SEQ ID NO: 13846 - RNA, 20 nt, Artificial Sequence
  Synthetic
aucuuggcucacugcaaccu

SEQ ID NO: 13847 - RNA, 20 nt, Artificial Sequence
  Synthetic
ucuuggcucacugcaaccuc

SEQ ID NO: 13848 - RNA, 20 nt, Artificial Sequence
  Synthetic
cuuggcucacugcaaccucc

SEQ ID NO: 13849 - RNA, 20 nt, Artificial Sequence
  Synthetic
uuggcucacugcaaccucca

SEQ ID NO: 13850 - RNA, 20 nt, Artificial Sequence
  Synthetic
uggcucacugcaaccuccac

SEQ ID NO: 13851 - RNA, 20 nt, Artificial Sequence
  Synthetic
ggcucacugcaaccuccacc

SEQ ID NO: 13852 - RNA, 20 nt, Artificial Sequence
  Synthetic
gcucacugcaaccuccaccu

SEQ ID NO: 13853 - RNA, 20 nt, Artificial Sequence
  Synthetic
cucacugcaaccuccaccuc

SEQ ID NO: 13854 - RNA, 20 nt, Artificial Sequence
  Synthetic
ucacugcaaccuccaccucc

SEQ ID NO: 13855 - RNA, 20 nt, Artificial Sequence
  Synthetic
cacugcaaccuccaccuccu

SEQ ID NO: 13856 - RNA, 20 nt, Artificial Sequence
  Synthetic
acugcaaccuccaccuccua

SEQ ID NO: 13857 - RNA, 20 nt, Artificial Sequence
  Synthetic
cugcaaccuccaccuccuag

SEQ ID NO: 13858 - RNA, 20 nt, Artificial Sequence
  Synthetic
ugcaaccuccaccuccuagg

SEQ ID NO: 13859 - RNA, 20 nt, Artificial Sequence
  Synthetic
gcaaccuccaccuccuaggu

SEQ ID NO: 13860 - RNA, 20 nt, Artificial Sequence
  Synthetic
caaccuccaccuccuagguu

SEQ ID NO: 13861 - RNA, 20 nt, Artificial Sequence
  Synthetic
aaccuccaccuccuagguuc

SEQ ID NO: 13862 - RNA, 20 nt, Artificial Sequence
  Synthetic
accuccaccuccuagguuca

SEQ ID NO: 13863 - RNA, 20 nt, Artificial Sequence
  Synthetic
ccuccaccuccuagguucaa

SEQ ID NO: 13864 - RNA, 20 nt, Artificial Sequence
  Synthetic
cuccaccuccuagguucaag

SEQ ID NO: 13865 - RNA, 20 nt, Artificial Sequence
  Synthetic
uccaccuccuagguucaagu

SEQ ID NO: 13866 - RNA, 20 nt, Artificial Sequence
  Synthetic
ccaccuccuagguucaagug

SEQ ID NO: 13867 - RNA, 20 nt, Artificial Sequence
  Synthetic
caccuccuagguucaaguga

SEQ ID NO: 13868 - RNA, 20 nt, Artificial Sequence
  Synthetic
accuccuagguucaagugau

SEQ ID NO: 13869 - RNA, 20 nt, Artificial Sequence
  Synthetic
ccuccuagguucaagugauu

SEQ ID NO: 13870 - RNA, 20 nt, Artificial Sequence
  Synthetic
cuccuagguucaagugauuc

SEQ ID NO: 13871 - RNA, 20 nt, Artificial Sequence
  Synthetic
uccuagguucaagugauucu

SEQ ID NO: 13872 - RNA, 20 nt, Artificial Sequence
  Synthetic
ccuagguucaagugauucuu

SEQ ID NO: 13873 - RNA, 20 nt, Artificial Sequence
  Synthetic
cuagguucaagugauucuuc

SEQ ID NO: 13874 - RNA, 20 nt, Artificial Sequence
  Synthetic
uagguucaagugauucuucu

SEQ ID NO: 13875 - RNA, 20 nt, Artificial Sequence
  Synthetic
agguucaagugauucuucuc

SEQ ID NO: 13876 - RNA, 20 nt, Artificial Sequence
  Synthetic
gguucaagugauucuucucu

SEQ ID NO: 13877 - RNA, 20 nt, Artificial Sequence
  Synthetic
guucaagugauucuucucug

SEQ ID NO: 13878 - RNA, 20 nt, Artificial Sequence
  Synthetic
uucaagugauucuucucugc

SEQ ID NO: 13879 - RNA, 20 nt, Artificial Sequence
  Synthetic
ucaagugauucuucucugcc

SEQ ID NO: 13880 - RNA, 20 nt, Artificial Sequence
  Synthetic
caagugauucuucucugccu

SEQ ID NO: 13881 - RNA, 20 nt, Artificial Sequence
  Synthetic
aagugauucuucucugccuc

SEQ ID NO: 13882 - RNA, 20 nt, Artificial Sequence
  Synthetic
agugauucuucucugccuca

SEQ ID NO: 13883 - RNA, 20 nt, Artificial Sequence
  Synthetic
gugauucuucucugccucag

SEQ ID NO: 13884 - RNA, 20 nt, Artificial Sequence
  Synthetic
ugauucuucucugccucagu

SEQ ID NO: 13885 - RNA, 20 nt, Artificial Sequence
  Synthetic
gauucuucucugccucaguu

SEQ ID NO: 13886 - RNA, 20 nt, Artificial Sequence
  Synthetic
auucuucucugccucaguuu

SEQ ID NO: 13887 - RNA, 20 nt, Artificial Sequence
  Synthetic
uucuucucugccucaguuuc

SEQ ID NO: 13888 - RNA, 20 nt, Artificial Sequence
  Synthetic
ucuucucugccucaguuucc

SEQ ID NO: 13889 - RNA, 20 nt, Artificial Sequence
  Synthetic
cuucucugccucaguuuccc

SEQ ID NO: 13890 - RNA, 20 nt, Artificial Sequence
  Synthetic
uucucugccucaguuuccca

SEQ ID NO: 13891 - RNA, 20 nt, Artificial Sequence
  Synthetic
ucucugccucaguuucccaa

SEQ ID NO: 13892 - RNA, 20 nt, Artificial Sequence
  Synthetic
cucugccucaguuucccaag

SEQ ID NO: 13893 - RNA, 20 nt, Artificial Sequence
  Synthetic
ucugccucaguuucccaagu

SEQ ID NO: 13894 - RNA, 20 nt, Artificial Sequence
  Synthetic
cugccucaguuucccaagua

SEQ ID NO: 13895 - RNA, 20 nt, Artificial Sequence
  Synthetic
ugccucaguuucccaaguag

SEQ ID NO: 13896 - RNA, 20 nt, Artificial Sequence
  Synthetic
gccucaguuucccaaguagc

SEQ ID NO: 13897 - RNA, 20 nt, Artificial Sequence
  Synthetic
ccucaguuucccaaguagcu

SEQ ID NO: 13898 - RNA, 20 nt, Artificial Sequence
  Synthetic
cucaguuucccaaguagcug

SEQ ID NO: 13899 - RNA, 20 nt, Artificial Sequence
  Synthetic
ucaguuucccaaguagcugg

SEQ ID NO: 13900 - RNA, 20 nt, Artificial Sequence
  Synthetic
caguuucccaaguagcuggg

SEQ ID NO: 13901 - RNA, 20 nt, Artificial Sequence
  Synthetic
aguuucccaaguagcuggga

SEQ ID NO: 13902 - RNA, 20 nt, Artificial Sequence
  Synthetic
guuucccaaguagcugggac

SEQ ID NO: 13903 - RNA, 20 nt, Artificial Sequence
  Synthetic
uuucccaaguagcugggacu

SEQ ID NO: 13904 - RNA, 20 nt, Artificial Sequence
  Synthetic
uucccaaguagcugggacua

SEQ ID NO: 13905 - RNA, 20 nt, Artificial Sequence
  Synthetic
ucccaaguagcugggacuac

SEQ ID NO: 13906 - RNA, 20 nt, Artificial Sequence
  Synthetic
cccaaguagcugggacuaca

SEQ ID NO: 13907 - RNA, 20 nt, Artificial Sequence
  Synthetic
ccaaguagcugggacuacag

SEQ ID NO: 13908 - RNA, 20 nt, Artificial Sequence
  Synthetic
caaguagcugggacuacagg

SEQ ID NO: 13909 - RNA, 20 nt, Artificial Sequence
  Synthetic
aaguagcugggacuacaggc

SEQ ID NO: 13910 - RNA, 20 nt, Artificial Sequence
  Synthetic
aguagcugggacuacaggca

SEQ ID NO: 13911 - RNA, 20 nt, Artificial Sequence
  Synthetic
guagcugggacuacaggcac

SEQ ID NO: 13912 - RNA, 20 nt, Artificial Sequence
  Synthetic
uagcugggacuacaggcacg

SEQ ID NO: 13913 - RNA, 20 nt, Artificial Sequence
  Synthetic
agcugggacuacaggcacgc

SEQ ID NO: 13914 - RNA, 20 nt, Artificial Sequence
  Synthetic
gcugggacuacaggcacgca

SEQ ID NO: 13915 - RNA, 20 nt, Artificial Sequence
  Synthetic
cugggacuacaggcacgcac

SEQ ID NO: 13916 - RNA, 20 nt, Artificial Sequence
  Synthetic
ugggacuacaggcacgcacc

SEQ ID NO: 13917 - RNA, 20 nt, Artificial Sequence
  Synthetic
gggacuacaggcacgcacca

SEQ ID NO: 13918 - RNA, 20 nt, Artificial Sequence
  Synthetic
ggacuacaggcacgcaccac

SEQ ID NO: 13919 - RNA, 20 nt, Artificial Sequence
  Synthetic
gacuacaggcacgcaccacc

SEQ ID NO: 13920 - RNA, 20 nt, Artificial Sequence
  Synthetic
acuacaggcacgcaccacca

SEQ ID NO: 13921 - RNA, 20 nt, Artificial Sequence
  Synthetic
cuacaggcacgcaccaccac

SEQ ID NO: 13922 - RNA, 20 nt, Artificial Sequence
  Synthetic
uacaggcacgcaccaccacg

SEQ ID NO: 13923 - RNA, 20 nt, Artificial Sequence
  Synthetic
acaggcacgcaccaccacgc

SEQ ID NO: 13924 - RNA, 20 nt, Artificial Sequence
  Synthetic
caggcacgcaccaccacgcc

SEQ ID NO: 13925 - RNA, 20 nt, Artificial Sequence
  Synthetic
aggcacgcaccaccacgccu

SEQ ID NO: 13926 - RNA, 20 nt, Artificial Sequence
  Synthetic
ggcacgcaccaccacgccug

SEQ ID NO: 13927 - RNA, 20 nt, Artificial Sequence
  Synthetic
gcacgcaccaccacgccugg

SEQ ID NO: 13928 - RNA, 20 nt, Artificial Sequence
  Synthetic
cacgcaccaccacgccuggc

SEQ ID NO: 13929 - RNA, 20 nt, Artificial Sequence
  Synthetic
acgcaccaccacgccuggcu

SEQ ID NO: 13930 - RNA, 20 nt, Artificial Sequence
  Synthetic
cgcaccaccacgccuggcua

SEQ ID NO: 13931 - RNA, 20 nt, Artificial Sequence
  Synthetic
gcaccaccacgccuggcuau

SEQ ID NO: 13932 - RNA, 20 nt, Artificial Sequence
  Synthetic
caccaccacgccuggcuauu

SEQ ID NO: 13933 - RNA, 20 nt, Artificial Sequence
  Synthetic
accaccacgccuggcuauuu

SEQ ID NO: 13934 - RNA, 20 nt, Artificial Sequence
  Synthetic
ccaccacgccuggcuauuuu

SEQ ID NO: 13935 - RNA, 20 nt, Artificial Sequence
  Synthetic
caccacgccuggcuauuuuu

SEQ ID NO: 13936 - RNA, 20 nt, Artificial Sequence
  Synthetic
accacgccuggcuauuuuuu

SEQ ID NO: 13937 - RNA, 20 nt, Artificial Sequence
  Synthetic
ccacgccuggcuauuuuuuu

SEQ ID NO: 13938 - RNA, 20 nt, Artificial Sequence
  Synthetic
cacgccuggcuauuuuuuua

SEQ ID NO: 13939 - RNA, 20 nt, Artificial Sequence
  Synthetic
acgccuggcuauuuuuuuau

SEQ ID NO: 13940 - RNA, 20 nt, Artificial Sequence
  Synthetic
cgccuggcuauuuuuuuauu

SEQ ID NO: 13941 - RNA, 20 nt, Artificial Sequence
  Synthetic
gccuggcuauuuuuuuauuu

SEQ ID NO: 13942 - RNA, 20 nt, Artificial Sequence
  Synthetic
ccuggcuauuuuuuuauuuu

SEQ ID NO: 13943 - RNA, 20 nt, Artificial Sequence
  Synthetic
cuggcuauuuuuuuauuuuu

SEQ ID NO: 13944 - RNA, 20 nt, Artificial Sequence
  Synthetic
uggcuauuuuuuuauuuuua

SEQ ID NO: 13945 - RNA, 20 nt, Artificial Sequence
  Synthetic
ggcuauuuuuuuauuuuuau

SEQ ID NO: 13946 - RNA, 20 nt, Artificial Sequence
  Synthetic
gcuauuuuuuuauuuuuauu

SEQ ID NO: 13947 - RNA, 20 nt, Artificial Sequence
  Synthetic
cuauuuuuuuauuuuuauuu

SEQ ID NO: 13948 - RNA, 20 nt, Artificial Sequence
  Synthetic
uauuuuuuuauuuuuauuuu

SEQ ID NO: 13949 - RNA, 20 nt, Artificial Sequence
  Synthetic
auuuuuuuauuuuuauuuuu

SEQ ID NO: 13950 - RNA, 20 nt, Artificial Sequence
  Synthetic
uuuuuuuauuuuuauuuuua

SEQ ID NO: 13951 - RNA, 20 nt, Artificial Sequence
  Synthetic
uuuuuuauuuuuauuuuuag

SEQ ID NO: 13952 - RNA, 20 nt, Artificial Sequence
  Synthetic
uuuuuauuuuuauuuuuagu

SEQ ID NO: 13953 - RNA, 20 nt, Artificial Sequence
  Synthetic
uuuuauuuuuauuuuuagua

SEQ ID NO: 13954 - RNA, 20 nt, Artificial Sequence
  Synthetic
uuuauuuuuauuuuuaguag

SEQ ID NO: 13955 - RNA, 20 nt, Artificial Sequence
  Synthetic
uuauuuuuauuuuuaguaga

SEQ ID NO: 13956 - RNA, 20 nt, Artificial Sequence
  Synthetic
uauuuuuauuuuuaguagag

SEQ ID NO: 13957 - RNA, 20 nt, Artificial Sequence
  Synthetic
auuuuuauuuuuaguagaga

SEQ ID NO: 13958 - RNA, 20 nt, Artificial Sequence
  Synthetic
uuuuuauuuuuaguagagac

SEQ ID NO: 13959 - RNA, 20 nt, Artificial Sequence
  Synthetic
uuuuauuuuuaguagagaca

SEQ ID NO: 13960 - RNA, 20 nt, Artificial Sequence
  Synthetic
uuuauuuuuaguagagacag

SEQ ID NO: 13961 - RNA, 20 nt, Artificial Sequence
  Synthetic
uuauuuuuaguagagacagg

SEQ ID NO: 13962 - RNA, 20 nt, Artificial Sequence
  Synthetic
uauuuuuaguagagacaggg

SEQ ID NO: 13963 - RNA, 20 nt, Artificial Sequence
  Synthetic
auuuuuaguagagacagggu

SEQ ID NO: 13964 - RNA, 20 nt, Artificial Sequence
  Synthetic
uuuuuaguagagacaggguu

SEQ ID NO: 13965 - RNA, 20 nt, Artificial Sequence
  Synthetic
uuuuaguagagacaggguuu

SEQ ID NO: 13966 - RNA, 20 nt, Artificial Sequence
  Synthetic
uuuaguagagacaggguuuc

SEQ ID NO: 13967 - RNA, 20 nt, Artificial Sequence
  Synthetic
uuaguagagacaggguuuca

SEQ ID NO: 13968 - RNA, 20 nt, Artificial Sequence
  Synthetic
uaguagagacaggguuucac

SEQ ID NO: 13969 - RNA, 20 nt, Artificial Sequence
  Synthetic
aguagagacaggguuucacc

SEQ ID NO: 13970 - RNA, 20 nt, Artificial Sequence
  Synthetic
guagagacaggguuucacca

SEQ ID NO: 13971 - RNA, 20 nt, Artificial Sequence
  Synthetic
uagagacaggguuucaccau

SEQ ID NO: 13972 - RNA, 20 nt, Artificial Sequence
  Synthetic
agagacaggguuucaccaug

SEQ ID NO: 13973 - RNA, 20 nt, Artificial Sequence
  Synthetic
gagacaggguuucaccaugu

SEQ ID NO: 13974 - RNA, 20 nt, Artificial Sequence
  Synthetic
agacaggguuucaccauguu

SEQ ID NO: 13975 - RNA, 20 nt, Artificial Sequence
  Synthetic
gacaggguuucaccauguug

SEQ ID NO: 13976 - RNA, 20 nt, Artificial Sequence
  Synthetic
acaggguuucaccauguugg

SEQ ID NO: 13977 - RNA, 20 nt, Artificial Sequence
  Synthetic
caggguuucaccauguuggc

SEQ ID NO: 13978 - RNA, 20 nt, Artificial Sequence
  Synthetic
aggguuucaccauguuggcc

SEQ ID NO: 13979 - RNA, 20 nt, Artificial Sequence
  Synthetic
ggguuucaccauguuggccg

SEQ ID NO: 13980 - RNA, 20 nt, Artificial Sequence
  Synthetic
gguuucaccauguuggccgg

SEQ ID NO: 13981 - RNA, 20 nt, Artificial Sequence
  Synthetic
guuucaccauguuggccggg

SEQ ID NO: 13982 - RNA, 20 nt, Artificial Sequence
  Synthetic
uuucaccauguuggccgggc

SEQ ID NO: 13983 - RNA, 20 nt, Artificial Sequence
  Synthetic
uucaccauguuggccgggcu

SEQ ID NO: 13984 - RNA, 20 nt, Artificial Sequence
  Synthetic
ucaccauguuggccgggcug

SEQ ID NO: 13985 - RNA, 20 nt, Artificial Sequence
  Synthetic
caccauguuggccgggcugg

SEQ ID NO: 13986 - RNA, 20 nt, Artificial Sequence
  Synthetic
accauguuggccgggcuggu

SEQ ID NO: 13987 - RNA, 20 nt, Artificial Sequence
  Synthetic
ccauguuggccgggcugguc

SEQ ID NO: 13988 - RNA, 20 nt, Artificial Sequence
  Synthetic
cauguuggccgggcuggucu

SEQ ID NO: 13989 - RNA, 20 nt, Artificial Sequence
  Synthetic
auguuggccgggcuggucuu

SEQ ID NO: 13990 - RNA, 20 nt, Artificial Sequence
  Synthetic
uguuggccgggcuggucuug

SEQ ID NO: 13991 - RNA, 20 nt, Artificial Sequence
  Synthetic
guuggccgggcuggucuuga

SEQ ID NO: 13992 - RNA, 20 nt, Artificial Sequence
  Synthetic
uuggccgggcuggucuugaa

SEQ ID NO: 13993 - RNA, 20 nt, Artificial Sequence
  Synthetic
uggccgggcuggucuugaac

SEQ ID NO: 13994 - RNA, 20 nt, Artificial Sequence
  Synthetic
ggccgggcuggucuugaacu

SEQ ID NO: 13995 - RNA, 20 nt, Artificial Sequence
  Synthetic
gccgggcuggucuugaacuc

SEQ ID NO: 13996 - RNA, 20 nt, Artificial Sequence
  Synthetic
ccgggcuggucuugaacucc

SEQ ID NO: 13997 - RNA, 20 nt, Artificial Sequence
  Synthetic
cgggcuggucuugaacuccu

SEQ ID NO: 13998 - RNA, 20 nt, Artificial Sequence
  Synthetic
gggcuggucuugaacuccug

SEQ ID NO: 13999 - RNA, 20 nt, Artificial Sequence
  Synthetic
ggcuggucuugaacuccuga

SEQ ID NO: 14000 - RNA, 20 nt, Artificial Sequence
  Synthetic
gcuggucuugaacuccugac

SEQ ID NO: 14001 - RNA, 20 nt, Artificial Sequence
  Synthetic
cuggucuugaacuccugacc

SEQ ID NO: 14002 - RNA, 20 nt, Artificial Sequence
  Synthetic
uggucuugaacuccugaccu

SEQ ID NO: 14003 - RNA, 20 nt, Artificial Sequence
  Synthetic
ggucuugaacuccugaccuc

SEQ ID NO: 14004 - RNA, 20 nt, Artificial Sequence
  Synthetic
gucuugaacuccugaccuca

SEQ ID NO: 14005 - RNA, 20 nt, Artificial Sequence
  Synthetic
ucuugaacuccugaccucaa

SEQ ID NO: 14006 - RNA, 20 nt, Artificial Sequence
  Synthetic
cuugaacuccugaccucaag

SEQ ID NO: 14007 - RNA, 20 nt, Artificial Sequence
  Synthetic
uugaacuccugaccucaagu

SEQ ID NO: 14008 - RNA, 20 nt, Artificial Sequence
  Synthetic
ugaacuccugaccucaagug

SEQ ID NO: 14009 - RNA, 20 nt, Artificial Sequence
  Synthetic
gaacuccugaccucaaguga

SEQ ID NO: 14010 - RNA, 20 nt, Artificial Sequence
  Synthetic
aacuccugaccucaagugau

SEQ ID NO: 14011 - RNA, 20 nt, Artificial Sequence
  Synthetic
acuccugaccucaagugauc

SEQ ID NO: 14012 - RNA, 20 nt, Artificial Sequence
  Synthetic
cuccugaccucaagugaucu

SEQ ID NO: 14013 - RNA, 20 nt, Artificial Sequence
  Synthetic
uccugaccucaagugaucug

SEQ ID NO: 14014 - RNA, 20 nt, Artificial Sequence
  Synthetic
ccugaccucaagugaucugc

SEQ ID NO: 14015 - RNA, 20 nt, Artificial Sequence
  Synthetic
cugaccucaagugaucugcc

SEQ ID NO: 14016 - RNA, 20 nt, Artificial Sequence
  Synthetic
ugaccucaagugaucugccc

SEQ ID NO: 14017 - RNA, 20 nt, Artificial Sequence
  Synthetic
gaccucaagugaucugccca

SEQ ID NO: 14018 - RNA, 20 nt, Artificial Sequence
  Synthetic
accucaagugaucugcccac

SEQ ID NO: 14019 - RNA, 20 nt, Artificial Sequence
  Synthetic
ccucaagugaucugcccacc

SEQ ID NO: 14020 - RNA, 20 nt, Artificial Sequence
  Synthetic
cucaagugaucugcccaccu

SEQ ID NO: 14021 - RNA, 20 nt, Artificial Sequence
  Synthetic
ucaagugaucugcccaccuc

SEQ ID NO: 14022 - RNA, 20 nt, Artificial Sequence
  Synthetic
caagugaucugcccaccuca

SEQ ID NO: 14023 - RNA, 20 nt, Artificial Sequence
  Synthetic
aagugaucugcccaccucag

SEQ ID NO: 14024 - RNA, 20 nt, Artificial Sequence
  Synthetic
agugaucugcccaccucagc

SEQ ID NO: 14025 - RNA, 20 nt, Artificial Sequence
  Synthetic
gugaucugcccaccucagcc

SEQ ID NO: 14026 - RNA, 20 nt, Artificial Sequence
  Synthetic
ugaucugcccaccucagccu

SEQ ID NO: 14027 - RNA, 20 nt, Artificial Sequence
  Synthetic
gaucugcccaccucagccuc

SEQ ID NO: 14028 - RNA, 20 nt, Artificial Sequence
  Synthetic
aucugcccaccucagccucc

SEQ ID NO: 14029 - RNA, 20 nt, Artificial Sequence
  Synthetic
ucugcccaccucagccuccc

SEQ ID NO: 14030 - RNA, 20 nt, Artificial Sequence
  Synthetic
cugcccaccucagccuccca

SEQ ID NO: 14031 - RNA, 20 nt, Artificial Sequence
  Synthetic
ugcccaccucagccucccaa

SEQ ID NO: 14032 - RNA, 20 nt, Artificial Sequence
  Synthetic
gcccaccucagccucccaaa

SEQ ID NO: 14033 - RNA, 20 nt, Artificial Sequence
  Synthetic
cccaccucagccucccaaag

SEQ ID NO: 14034 - RNA, 20 nt, Artificial Sequence
  Synthetic
ccaccucagccucccaaagu

SEQ ID NO: 14035 - RNA, 20 nt, Artificial Sequence
  Synthetic
caccucagccucccaaagug

SEQ ID NO: 14036 - RNA, 20 nt, Artificial Sequence
  Synthetic
accucagccucccaaagugc

SEQ ID NO: 14037 - RNA, 20 nt, Artificial Sequence
  Synthetic
ccucagccucccaaagugcu

SEQ ID NO: 14038 - RNA, 20 nt, Artificial Sequence
  Synthetic
cucagccucccaaagugcug

SEQ ID NO: 14039 - RNA, 20 nt, Artificial Sequence
  Synthetic
ucagccucccaaagugcugg

SEQ ID NO: 14040 - RNA, 20 nt, Artificial Sequence
  Synthetic
cagccucccaaagugcuggg

SEQ ID NO: 14041 - RNA, 20 nt, Artificial Sequence
  Synthetic
agccucccaaagugcuggga

SEQ ID NO: 14042 - RNA, 20 nt, Artificial Sequence
  Synthetic
gccucccaaagugcugggau

SEQ ID NO: 14043 - RNA, 20 nt, Artificial Sequence
  Synthetic
ccucccaaagugcugggauu

SEQ ID NO: 14044 - RNA, 20 nt, Artificial Sequence
  Synthetic
cucccaaagugcugggauua

SEQ ID NO: 14045 - RNA, 20 nt, Artificial Sequence
  Synthetic
ucccaaagugcugggauuac

SEQ ID NO: 14046 - RNA, 20 nt, Artificial Sequence
  Synthetic
cccaaagugcugggauuaca

SEQ ID NO: 14047 - RNA, 20 nt, Artificial Sequence
  Synthetic
ccaaagugcugggauuacag

SEQ ID NO: 14048 - RNA, 20 nt, Artificial Sequence
  Synthetic
caaagugcugggauuacagg

SEQ ID NO: 14049 - RNA, 20 nt, Artificial Sequence
  Synthetic
aaagugcugggauuacaggc

SEQ ID NO: 14050 - RNA, 20 nt, Artificial Sequence
  Synthetic
aagugcugggauuacaggcg

SEQ ID NO: 14051 - RNA, 20 nt, Artificial Sequence
  Synthetic
agugcugggauuacaggcgu

SEQ ID NO: 14052 - RNA, 20 nt, Artificial Sequence
  Synthetic
gugcugggauuacaggcgug

SEQ ID NO: 14053 - RNA, 20 nt, Artificial Sequence
  Synthetic
ugcugggauuacaggcguga

SEQ ID NO: 14054 - RNA, 20 nt, Artificial Sequence
  Synthetic
gcugggauuacaggcgugag

SEQ ID NO: 14055 - RNA, 20 nt, Artificial Sequence
  Synthetic
cugggauuacaggcgugagc

SEQ ID NO: 14056 - RNA, 20 nt, Artificial Sequence
  Synthetic
ugggauuacaggcgugagcc

SEQ ID NO: 14057 - RNA, 20 nt, Artificial Sequence
  Synthetic
gggauuacaggcgugagcca

SEQ ID NO: 14058 - RNA, 20 nt, Artificial Sequence
  Synthetic
ggauuacaggcgugagccac

SEQ ID NO: 14059 - RNA, 20 nt, Artificial Sequence
  Synthetic
gauuacaggcgugagccacu

SEQ ID NO: 14060 - RNA, 20 nt, Artificial Sequence
  Synthetic
auuacaggcgugagccacug

SEQ ID NO: 14061 - RNA, 20 nt, Artificial Sequence
  Synthetic
uuacaggcgugagccacugc

SEQ ID NO: 14062 - RNA, 20 nt, Artificial Sequence
  Synthetic
uacaggcgugagccacugcg

SEQ ID NO: 14063 - RNA, 20 nt, Artificial Sequence
  Synthetic
acaggcgugagccacugcgc

SEQ ID NO: 14064 - RNA, 20 nt, Artificial Sequence
  Synthetic
caggcgugagccacugcgcc

SEQ ID NO: 14065 - RNA, 20 nt, Artificial Sequence
  Synthetic
aggcgugagccacugcgccc

SEQ ID NO: 14066 - RNA, 20 nt, Artificial Sequence
  Synthetic
ggcgugagccacugcgcccc

SEQ ID NO: 14067 - RNA, 20 nt, Artificial Sequence
  Synthetic
gcgugagccacugcgccccg

SEQ ID NO: 14068 - RNA, 20 nt, Artificial Sequence
  Synthetic
cgugagccacugcgccccgc

SEQ ID NO: 14069 - RNA, 20 nt, Artificial Sequence
  Synthetic
gugagccacugcgccccgcc

SEQ ID NO: 14070 - RNA, 20 nt, Artificial Sequence
  Synthetic
ugagccacugcgccccgccc

SEQ ID NO: 14071 - RNA, 20 nt, Artificial Sequence
  Synthetic
gagccacugcgccccgccca

SEQ ID NO: 14072 - RNA, 20 nt, Artificial Sequence
  Synthetic
agccacugcgccccgcccac

SEQ ID NO: 14073 - RNA, 20 nt, Artificial Sequence
  Synthetic
gccacugcgccccgcccacu

SEQ ID NO: 14074 - RNA, 20 nt, Artificial Sequence
  Synthetic
ccacugcgccccgcccacug

SEQ ID NO: 14075 - RNA, 20 nt, Artificial Sequence
  Synthetic
cacugcgccccgcccacugu

SEQ ID NO: 14076 - RNA, 20 nt, Artificial Sequence
  Synthetic
acugcgccccgcccacuguc

SEQ ID NO: 14077 - RNA, 20 nt, Artificial Sequence
  Synthetic
cugcgccccgcccacugucu

SEQ ID NO: 14078 - RNA, 20 nt, Artificial Sequence
  Synthetic
ugcgccccgcccacugucuu

SEQ ID NO: 14079 - RNA, 20 nt, Artificial Sequence
  Synthetic
gcgccccgcccacugucuuu

SEQ ID NO: 14080 - RNA, 20 nt, Artificial Sequence
  Synthetic
cgccccgcccacugucuuuu

SEQ ID NO: 14081 - RNA, 20 nt, Artificial Sequence
  Synthetic
gccccgcccacugucuuuuu

SEQ ID NO: 14082 - RNA, 20 nt, Artificial Sequence
  Synthetic
ccccgcccacugucuuuuuu

SEQ ID NO: 14083 - RNA, 20 nt, Artificial Sequence
  Synthetic
cccgcccacugucuuuuuuu

SEQ ID NO: 14084 - RNA, 20 nt, Artificial Sequence
  Synthetic
ccgcccacugucuuuuuuuu

SEQ ID NO: 14085 - RNA, 20 nt, Artificial Sequence
  Synthetic
cgcccacugucuuuuuuuuu

SEQ ID NO: 14086 - RNA, 20 nt, Artificial Sequence
  Synthetic
gcccacugucuuuuuuuuuu

SEQ ID NO: 14087 - RNA, 20 nt, Artificial Sequence
  Synthetic
cccacugucuuuuuuuuuuu

SEQ ID NO: 14088 - RNA, 20 nt, Artificial Sequence
  Synthetic
ccacugucuuuuuuuuuuuu

SEQ ID NO: 14089 - RNA, 20 nt, Artificial Sequence
  Synthetic
cacugucuuuuuuuuuuuuu

SEQ ID NO: 14090 - RNA, 20 nt, Artificial Sequence
  Synthetic
acugucuuuuuuuuuuuuuu

SEQ ID NO: 14091 - RNA, 20 nt, Artificial Sequence
  Synthetic
cugucuuuuuuuuuuuuuua

SEQ ID NO: 14092 - RNA, 20 nt, Artificial Sequence
  Synthetic
ugucuuuuuuuuuuuuuuaa

SEQ ID NO: 14093 - RNA, 20 nt, Artificial Sequence
  Synthetic
gucuuuuuuuuuuuuuuaaa

SEQ ID NO: 14094 - RNA, 20 nt, Artificial Sequence
  Synthetic
ucuuuuuuuuuuuuuuaaag

SEQ ID NO: 14095 - RNA, 20 nt, Artificial Sequence
  Synthetic
cuuuuuuuuuuuuuuaaagg

SEQ ID NO: 14096 - RNA, 20 nt, Artificial Sequence
  Synthetic
uuuuuuuuuuuuuuaaagga

SEQ ID NO: 14097 - RNA, 20 nt, Artificial Sequence
  Synthetic
uuuuuuuuuuuuuaaaggac

SEQ ID NO: 14098 - RNA, 20 nt, Artificial Sequence
  Synthetic
uuuuuuuuuuuuaaaggacc

SEQ ID NO: 14099 - RNA, 20 nt, Artificial Sequence
  Synthetic
uuuuuuuuuuuaaaggaccu

SEQ ID NO: 14100 - RNA, 20 nt, Artificial Sequence
  Synthetic
uuuuuuuuuuaaaggaccuc

SEQ ID NO: 14101 - RNA, 20 nt, Artificial Sequence
  Synthetic
uuuuuuuuuaaaggaccuca

SEQ ID NO: 14102 - RNA, 20 nt, Artificial Sequence
  Synthetic
uuuuuuuuaaaggaccucag

SEQ ID NO: 14103 - RNA, 20 nt, Artificial Sequence
  Synthetic
uuuuuuuaaaggaccucagg

SEQ ID NO: 14104 - RNA, 20 nt, Artificial Sequence
  Synthetic
uuuuuuaaaggaccucaggu

SEQ ID NO: 14105 - RNA, 20 nt, Artificial Sequence
  Synthetic
uuuuuaaaggaccucaggug

SEQ ID NO: 14106 - RNA, 20 nt, Artificial Sequence
  Synthetic
uuuuaaaggaccucagguga

SEQ ID NO: 14107 - RNA, 20 nt, Artificial Sequence
  Synthetic
uuuaaaggaccucaggugau

SEQ ID NO: 14108 - RNA, 20 nt, Artificial Sequence
  Synthetic
uuaaaggaccucaggugauu

SEQ ID NO: 14109 - RNA, 20 nt, Artificial Sequence
  Synthetic
uaaaggaccucaggugauuc

SEQ ID NO: 14110 - RNA, 20 nt, Artificial Sequence
  Synthetic
aaaggaccucaggugauucu

SEQ ID NO: 14111 - RNA, 20 nt, Artificial Sequence
  Synthetic
aaggaccucaggugauucug

SEQ ID NO: 14112 - RNA, 20 nt, Artificial Sequence
  Synthetic
aggaccucaggugauucuga

SEQ ID NO: 14113 - RNA, 20 nt, Artificial Sequence
  Synthetic
ggaccucaggugauucugau

SEQ ID NO: 14114 - RNA, 20 nt, Artificial Sequence
  Synthetic
gaccucaggugauucugaug

SEQ ID NO: 14115 - RNA, 20 nt, Artificial Sequence
  Synthetic
accucaggugauucugaugc

SEQ ID NO: 14116 - RNA, 20 nt, Artificial Sequence
  Synthetic
ccucaggugauucugaugca

SEQ ID NO: 14117 - RNA, 20 nt, Artificial Sequence
  Synthetic
cucaggugauucugaugcac

SEQ ID NO: 14118 - RNA, 20 nt, Artificial Sequence
  Synthetic
ucaggugauucugaugcaca

SEQ ID NO: 14119 - RNA, 20 nt, Artificial Sequence
  Synthetic
caggugauucugaugcacag

SEQ ID NO: 14120 - RNA, 20 nt, Artificial Sequence
  Synthetic
aggugauucugaugcacagc

SEQ ID NO: 14121 - RNA, 20 nt, Artificial Sequence
  Synthetic
ggugauucugaugcacagcu

SEQ ID NO: 14122 - RNA, 20 nt, Artificial Sequence
  Synthetic
gugauucugaugcacagcuc

SEQ ID NO: 14123 - RNA, 20 nt, Artificial Sequence
  Synthetic
ugauucugaugcacagcuca

SEQ ID NO: 14124 - RNA, 20 nt, Artificial Sequence
  Synthetic
gauucugaugcacagcucag

SEQ ID NO: 14125 - RNA, 20 nt, Artificial Sequence
  Synthetic
auucugaugcacagcucagg

SEQ ID NO: 14126 - RNA, 20 nt, Artificial Sequence
  Synthetic
uucugaugcacagcucaggu

SEQ ID NO: 14127 - RNA, 20 nt, Artificial Sequence
  Synthetic
ucugaugcacagcucagguu

SEQ ID NO: 14128 - RNA, 20 nt, Artificial Sequence
  Synthetic
cugaugcacagcucagguug

SEQ ID NO: 14129 - RNA, 20 nt, Artificial Sequence
  Synthetic
ugaugcacagcucagguuga

SEQ ID NO: 14130 - RNA, 20 nt, Artificial Sequence
  Synthetic
gaugcacagcucagguugaa

SEQ ID NO: 14131 - RNA, 20 nt, Artificial Sequence
  Synthetic
augcacagcucagguugaaa

SEQ ID NO: 14132 - RNA, 20 nt, Artificial Sequence
  Synthetic
ugcacagcucagguugaaag

SEQ ID NO: 14133 - RNA, 20 nt, Artificial Sequence
  Synthetic
gcacagcucagguugaaagc

SEQ ID NO: 14134 - RNA, 20 nt, Artificial Sequence
  Synthetic
cacagcucagguugaaagca

SEQ ID NO: 14135 - RNA, 20 nt, Artificial Sequence
  Synthetic
acagcucagguugaaagcac

SEQ ID NO: 14136 - RNA, 20 nt, Artificial Sequence
  Synthetic
cagcucagguugaaagcacu

SEQ ID NO: 14137 - RNA, 20 nt, Artificial Sequence
  Synthetic
agcucagguugaaagcacug

SEQ ID NO: 14138 - RNA, 20 nt, Artificial Sequence
  Synthetic
gcucagguugaaagcacuga

SEQ ID NO: 14139 - RNA, 20 nt, Artificial Sequence
  Synthetic
cucagguugaaagcacugaa

SEQ ID NO: 14140 - RNA, 20 nt, Artificial Sequence
  Synthetic
ucagguugaaagcacugaac

SEQ ID NO: 14141 - RNA, 20 nt, Artificial Sequence
  Synthetic
cagguugaaagcacugaacu

SEQ ID NO: 14142 - RNA, 20 nt, Artificial Sequence
  Synthetic
agguugaaagcacugaacua

SEQ ID NO: 14143 - RNA, 20 nt, Artificial Sequence
  Synthetic
gguugaaagcacugaacuaa

SEQ ID NO: 14144 - RNA, 20 nt, Artificial Sequence
  Synthetic
guugaaagcacugaacuaaa

SEQ ID NO: 14145 - RNA, 20 nt, Artificial Sequence
  Synthetic
uugaaagcacugaacuaaag

SEQ ID NO: 14146 - RNA, 20 nt, Artificial Sequence
  Synthetic
ugaaagcacugaacuaaagg

SEQ ID NO: 14147 - RNA, 20 nt, Artificial Sequence
  Synthetic
gaaagcacugaacuaaagga

SEQ ID NO: 14148 - RNA, 20 nt, Artificial Sequence
  Synthetic
aaagcacugaacuaaaggaa

SEQ ID NO: 14149 - RNA, 20 nt, Artificial Sequence
  Synthetic
aagcacugaacuaaaggaag

SEQ ID NO: 14150 - RNA, 20 nt, Artificial Sequence
  Synthetic
agcacugaacuaaaggaagg

SEQ ID NO: 14151 - RNA, 20 nt, Artificial Sequence
  Synthetic
gcacugaacuaaaggaagga

SEQ ID NO: 14152 - RNA, 20 nt, Artificial Sequence
  Synthetic
cacugaacuaaaggaaggag

SEQ ID NO: 14153 - RNA, 20 nt, Artificial Sequence
  Synthetic
acugaacuaaaggaaggagc

SEQ ID NO: 14154 - RNA, 20 nt, Artificial Sequence
  Synthetic
cugaacuaaaggaaggagcc

SEQ ID NO: 14155 - RNA, 20 nt, Artificial Sequence
  Synthetic
ugaacuaaaggaaggagccu

SEQ ID NO: 14156 - RNA, 20 nt, Artificial Sequence
  Synthetic
gaacuaaaggaaggagccuu

SEQ ID NO: 14157 - RNA, 20 nt, Artificial Sequence
  Synthetic
aacuaaaggaaggagccuuu

SEQ ID NO: 14158 - RNA, 20 nt, Artificial Sequence
  Synthetic
acuaaaggaaggagccuuuu

SEQ ID NO: 14159 - RNA, 20 nt, Artificial Sequence
  Synthetic
cuaaaggaaggagccuuuug

SEQ ID NO: 14160 - RNA, 20 nt, Artificial Sequence
  Synthetic
uaaaggaaggagccuuuuga

SEQ ID NO: 14161 - RNA, 20 nt, Artificial Sequence
  Synthetic
aaaggaaggagccuuuugau

SEQ ID NO: 14162 - RNA, 20 nt, Artificial Sequence
  Synthetic
aaggaaggagccuuuugaua

SEQ ID NO: 14163 - RNA, 20 nt, Artificial Sequence
  Synthetic
aggaaggagccuuuugauau

SEQ ID NO: 14164 - RNA, 20 nt, Artificial Sequence
  Synthetic
ggaaggagccuuuugauaug

SEQ ID NO: 14165 - RNA, 20 nt, Artificial Sequence
  Synthetic
gaaggagccuuuugauaugc

SEQ ID NO: 14166 - RNA, 20 nt, Artificial Sequence
  Synthetic
aaggagccuuuugauaugca

SEQ ID NO: 14167 - RNA, 20 nt, Artificial Sequence
  Synthetic
aggagccuuuugauaugcau

SEQ ID NO: 14168 - RNA, 20 nt, Artificial Sequence
  Synthetic
ggagccuuuugauaugcauu

SEQ ID NO: 14169 - RNA, 20 nt, Artificial Sequence
  Synthetic
gagccuuuugauaugcauuc

SEQ ID NO: 14170 - RNA, 20 nt, Artificial Sequence
  Synthetic
agccuuuugauaugcauuca

SEQ ID NO: 14171 - RNA, 20 nt, Artificial Sequence
  Synthetic
gccuuuugauaugcauucag

SEQ ID NO: 14172 - RNA, 20 nt, Artificial Sequence
  Synthetic
ccuuuugauaugcauucagg

SEQ ID NO: 14173 - RNA, 20 nt, Artificial Sequence
  Synthetic
cuuuugauaugcauucagga

SEQ ID NO: 14174 - RNA, 20 nt, Artificial Sequence
  Synthetic
uuuugauaugcauucaggaa

SEQ ID NO: 14175 - RNA, 20 nt, Artificial Sequence
  Synthetic
uuugauaugcauucaggaag

SEQ ID NO: 14176 - RNA, 20 nt, Artificial Sequence
  Synthetic
uugauaugcauucaggaagc

SEQ ID NO: 14177 - RNA, 20 nt, Artificial Sequence
  Synthetic
ugauaugcauucaggaagca

SEQ ID NO: 14178 - RNA, 20 nt, Artificial Sequence
  Synthetic
gauaugcauucaggaagcag

SEQ ID NO: 14179 - RNA, 20 nt, Artificial Sequence
  Synthetic
auaugcauucaggaagcagc

SEQ ID NO: 14180 - RNA, 20 nt, Artificial Sequence
  Synthetic
uaugcauucaggaagcagcc

SEQ ID NO: 14181 - RNA, 20 nt, Artificial Sequence
  Synthetic
augcauucaggaagcagcca

SEQ ID NO: 14182 - RNA, 20 nt, Artificial Sequence
  Synthetic
ugcauucaggaagcagccaa

SEQ ID NO: 14183 - RNA, 20 nt, Artificial Sequence
  Synthetic
gcauucaggaagcagccaac

SEQ ID NO: 14184 - RNA, 20 nt, Artificial Sequence
  Synthetic
cauucaggaagcagccaacc

SEQ ID NO: 14185 - RNA, 20 nt, Artificial Sequence
  Synthetic
auucaggaagcagccaaccu

SEQ ID NO: 14186 - RNA, 20 nt, Artificial Sequence
  Synthetic
uucaggaagcagccaaccua

SEQ ID NO: 14187 - RNA, 20 nt, Artificial Sequence
  Synthetic
ucaggaagcagccaaccuaa

SEQ ID NO: 14188 - RNA, 20 nt, Artificial Sequence
  Synthetic
caggaagcagccaaccuaau

SEQ ID NO: 14189 - RNA, 20 nt, Artificial Sequence
  Synthetic
aggaagcagccaaccuaaug

SEQ ID NO: 14190 - RNA, 20 nt, Artificial Sequence
  Synthetic
ggaagcagccaaccuaaugc

SEQ ID NO: 14191 - RNA, 20 nt, Artificial Sequence
  Synthetic
gaagcagccaaccuaaugca

SEQ ID NO: 14192 - RNA, 20 nt, Artificial Sequence
  Synthetic
aagcagccaaccuaaugcaa

SEQ ID NO: 14193 - RNA, 20 nt, Artificial Sequence
  Synthetic
agcagccaaccuaaugcaau

SEQ ID NO: 14194 - RNA, 20 nt, Artificial Sequence
  Synthetic
gcagccaaccuaaugcaauc

SEQ ID NO: 14195 - RNA, 20 nt, Artificial Sequence
  Synthetic
cagccaaccuaaugcaauca

SEQ ID NO: 14196 - RNA, 20 nt, Artificial Sequence
  Synthetic
agccaaccuaaugcaaucaa

SEQ ID NO: 14197 - RNA, 20 nt, Artificial Sequence
  Synthetic
gccaaccuaaugcaaucaag

SEQ ID NO: 14198 - RNA, 20 nt, Artificial Sequence
  Synthetic
ccaaccuaaugcaaucaaga

SEQ ID NO: 14199 - RNA, 20 nt, Artificial Sequence
  Synthetic
caaccuaaugcaaucaagaa

SEQ ID NO: 14200 - RNA, 20 nt, Artificial Sequence
  Synthetic
aaccuaaugcaaucaagaag

SEQ ID NO: 14201 - RNA, 20 nt, Artificial Sequence
  Synthetic
accuaaugcaaucaagaaga

SEQ ID NO: 14202 - RNA, 20 nt, Artificial Sequence
  Synthetic
ccuaaugcaaucaagaagag

SEQ ID NO: 14203 - RNA, 20 nt, Artificial Sequence
  Synthetic
cuaaugcaaucaagaagaga

SEQ ID NO: 14204 - RNA, 20 nt, Artificial Sequence
  Synthetic
uaaugcaaucaagaagagau

SEQ ID NO: 14205 - RNA, 20 nt, Artificial Sequence
  Synthetic
aaugcaaucaagaagagaua

SEQ ID NO: 14206 - RNA, 20 nt, Artificial Sequence
  Synthetic
augcaaucaagaagagauag

SEQ ID NO: 14207 - RNA, 20 nt, Artificial Sequence
  Synthetic
ugcaaucaagaagagauagu

SEQ ID NO: 14208 - RNA, 20 nt, Artificial Sequence
  Synthetic
gcaaucaagaagagauaguu

SEQ ID NO: 14209 - RNA, 20 nt, Artificial Sequence
  Synthetic
caaucaagaagagauaguuc

SEQ ID NO: 14210 - RNA, 20 nt, Artificial Sequence
  Synthetic
aaucaagaagagauaguucc

SEQ ID NO: 14211 - RNA, 20 nt, Artificial Sequence
  Synthetic
aucaagaagagauaguuccu

SEQ ID NO: 14212 - RNA, 20 nt, Artificial Sequence
  Synthetic
ucaagaagagauaguuccua

SEQ ID NO: 14213 - RNA, 20 nt, Artificial Sequence
  Synthetic
caagaagagauaguuccuaa

SEQ ID NO: 14214 - RNA, 20 nt, Artificial Sequence
  Synthetic
aagaagagauaguuccuaac

SEQ ID NO: 14215 - RNA, 20 nt, Artificial Sequence
  Synthetic
agaagagauaguuccuaacu

SEQ ID NO: 14216 - RNA, 20 nt, Artificial Sequence
  Synthetic
gaagagauaguuccuaacug

SEQ ID NO: 14217 - RNA, 20 nt, Artificial Sequence
  Synthetic
aagagauaguuccuaacugu

SEQ ID NO: 14218 - RNA, 20 nt, Artificial Sequence
  Synthetic
agagauaguuccuaacuguc

SEQ ID NO: 14219 - RNA, 20 nt, Artificial Sequence
  Synthetic
gagauaguuccuaacuguca

SEQ ID NO: 14220 - RNA, 20 nt, Artificial Sequence
  Synthetic
agauaguuccuaacugucag

SEQ ID NO: 14221 - RNA, 20 nt, Artificial Sequence
  Synthetic
gauaguuccuaacugucagc

SEQ ID NO: 14222 - RNA, 20 nt, Artificial Sequence
  Synthetic
auaguuccuaacugucagcc

SEQ ID NO: 14223 - RNA, 20 nt, Artificial Sequence
  Synthetic
uaguuccuaacugucagccu

SEQ ID NO: 14224 - RNA, 20 nt, Artificial Sequence
  Synthetic
aguuccuaacugucagccuu

SEQ ID NO: 14225 - RNA, 20 nt, Artificial Sequence
  Synthetic
guuccuaacugucagccuug

SEQ ID NO: 14226 - RNA, 20 nt, Artificial Sequence
  Synthetic
uuccuaacugucagccuugu

SEQ ID NO: 14227 - RNA, 20 nt, Artificial Sequence
  Synthetic
uccuaacugucagccuugug

SEQ ID NO: 14228 - RNA, 20 nt, Artificial Sequence
  Synthetic
ccuaacugucagccuugugg

SEQ ID NO: 14229 - RNA, 20 nt, Artificial Sequence
  Synthetic
cuaacugucagccuuguggc

SEQ ID NO: 14230 - RNA, 20 nt, Artificial Sequence
  Synthetic
uaacugucagccuuguggcu

SEQ ID NO: 14231 - RNA, 20 nt, Artificial Sequence
  Synthetic
aacugucagccuuguggcua

SEQ ID NO: 14232 - RNA, 20 nt, Artificial Sequence
  Synthetic
acugucagccuuguggcuaa

SEQ ID NO: 14233 - RNA, 20 nt, Artificial Sequence
  Synthetic
cugucagccuuguggcuaag

SEQ ID NO: 14234 - RNA, 20 nt, Artificial Sequence
  Synthetic
ugucagccuuguggcuaagu

SEQ ID NO: 14235 - RNA, 20 nt, Artificial Sequence
  Synthetic
gucagccuuguggcuaagug

SEQ ID NO: 14236 - RNA, 20 nt, Artificial Sequence
  Synthetic
ucagccuuguggcuaaguga

SEQ ID NO: 14237 - RNA, 20 nt, Artificial Sequence
  Synthetic
cagccuuguggcuaagugag

SEQ ID NO: 14238 - RNA, 20 nt, Artificial Sequence
  Synthetic
agccuuguggcuaagugagg

SEQ ID NO: 14239 - RNA, 20 nt, Artificial Sequence
  Synthetic
gccuuguggcuaagugagga

SEQ ID NO: 14240 - RNA, 20 nt, Artificial Sequence
  Synthetic
ccuuguggcuaagugaggaa

SEQ ID NO: 14241 - RNA, 20 nt, Artificial Sequence
  Synthetic
cuuguggcuaagugaggaag

SEQ ID NO: 14242 - RNA, 20 nt, Artificial Sequence
  Synthetic
uuguggcuaagugaggaaga

SEQ ID NO: 14243 - RNA, 20 nt, Artificial Sequence
  Synthetic
uguggcuaagugaggaagag

SEQ ID NO: 14244 - RNA, 20 nt, Artificial Sequence
  Synthetic
guggcuaagugaggaagaga

SEQ ID NO: 14245 - RNA, 20 nt, Artificial Sequence
  Synthetic
uggcuaagugaggaagagau

SEQ ID NO: 14246 - RNA, 20 nt, Artificial Sequence
  Synthetic
ggcuaagugaggaagagaua

SEQ ID NO: 14247 - RNA, 20 nt, Artificial Sequence
  Synthetic
gcuaagugaggaagagauaa

SEQ ID NO: 14248 - RNA, 20 nt, Artificial Sequence
  Synthetic
cuaagugaggaagagauaau

SEQ ID NO: 14249 - RNA, 20 nt, Artificial Sequence
  Synthetic
uaagugaggaagagauaauu

SEQ ID NO: 14250 - RNA, 20 nt, Artificial Sequence
  Synthetic
aagugaggaagagauaauuu

SEQ ID NO: 14251 - RNA, 20 nt, Artificial Sequence
  Synthetic
agugaggaagagauaauuug

SEQ ID NO: 14252 - RNA, 20 nt, Artificial Sequence
  Synthetic
gugaggaagagauaauuugg

SEQ ID NO: 14253 - RNA, 20 nt, Artificial Sequence
  Synthetic
ugaggaagagauaauuuggc

SEQ ID NO: 14254 - RNA, 20 nt, Artificial Sequence
  Synthetic
gaggaagagauaauuuggca

SEQ ID NO: 14255 - RNA, 20 nt, Artificial Sequence
  Synthetic
aggaagagauaauuuggcaa

SEQ ID NO: 14256 - RNA, 20 nt, Artificial Sequence
  Synthetic
ggaagagauaauuuggcaaa

SEQ ID NO: 14257 - RNA, 20 nt, Artificial Sequence
  Synthetic
gaagagauaauuuggcaaac

SEQ ID NO: 14258 - RNA, 20 nt, Artificial Sequence
  Synthetic
aagagauaauuuggcaaacc

SEQ ID NO: 14259 - RNA, 20 nt, Artificial Sequence
  Synthetic
agagauaauuuggcaaacca

SEQ ID NO: 14260 - RNA, 20 nt, Artificial Sequence
  Synthetic
gagauaauuuggcaaaccau

SEQ ID NO: 14261 - RNA, 20 nt, Artificial Sequence
  Synthetic
agauaauuuggcaaaccaug

SEQ ID NO: 14262 - RNA, 20 nt, Artificial Sequence
  Synthetic
gauaauuuggcaaaccaugg

SEQ ID NO: 14263 - RNA, 20 nt, Artificial Sequence
  Synthetic
auaauuuggcaaaccaugga

SEQ ID NO: 14264 - RNA, 20 nt, Artificial Sequence
  Synthetic
uaauuuggcaaaccauggag

SEQ ID NO: 14265 - RNA, 20 nt, Artificial Sequence
  Synthetic
aauuuggcaaaccauggaga

SEQ ID NO: 14266 - RNA, 20 nt, Artificial Sequence
  Synthetic
auuuggcaaaccauggagac

SEQ ID NO: 14267 - RNA, 20 nt, Artificial Sequence
  Synthetic
uuuggcaaaccauggagacc

SEQ ID NO: 14268 - RNA, 20 nt, Artificial Sequence
  Synthetic
uuggcaaaccauggagaccc

SEQ ID NO: 14269 - RNA, 20 nt, Artificial Sequence
  Synthetic
uggcaaaccauggagacccc

SEQ ID NO: 14270 - RNA, 20 nt, Artificial Sequence
  Synthetic
ggcaaaccauggagacccca

SEQ ID NO: 14271 - RNA, 20 nt, Artificial Sequence
  Synthetic
gcaaaccauggagaccccac

SEQ ID NO: 14272 - RNA, 20 nt, Artificial Sequence
  Synthetic
caaaccauggagaccccaca

SEQ ID NO: 14273 - RNA, 20 nt, Artificial Sequence
  Synthetic
aaaccauggagaccccacac

SEQ ID NO: 14274 - RNA, 20 nt, Artificial Sequence
  Synthetic
aaccauggagaccccacaca

SEQ ID NO: 14275 - RNA, 20 nt, Artificial Sequence
  Synthetic
accauggagaccccacacaa

SEQ ID NO: 14276 - RNA, 20 nt, Artificial Sequence
  Synthetic
ccauggagaccccacacaac

SEQ ID NO: 14277 - RNA, 20 nt, Artificial Sequence
  Synthetic
cauggagaccccacacaaca

SEQ ID NO: 14278 - RNA, 20 nt, Artificial Sequence
  Synthetic
auggagaccccacacaacac

SEQ ID NO: 14279 - RNA, 20 nt, Artificial Sequence
  Synthetic
uggagaccccacacaacaca

SEQ ID NO: 14280 - RNA, 20 nt, Artificial Sequence
  Synthetic
ggagaccccacacaacacac

SEQ ID NO: 14281 - RNA, 20 nt, Artificial Sequence
  Synthetic
gagaccccacacaacacaca

SEQ ID NO: 14282 - RNA, 20 nt, Artificial Sequence
  Synthetic
agaccccacacaacacacag

SEQ ID NO: 14283 - RNA, 20 nt, Artificial Sequence
  Synthetic
gaccccacacaacacacaga

SEQ ID NO: 14284 - RNA, 20 nt, Artificial Sequence
  Synthetic
accccacacaacacacagag

SEQ ID NO: 14285 - RNA, 20 nt, Artificial Sequence
  Synthetic
ccccacacaacacacagagc

SEQ ID NO: 14286 - RNA, 20 nt, Artificial Sequence
  Synthetic
cccacacaacacacagagcu

SEQ ID NO: 14287 - RNA, 20 nt, Artificial Sequence
  Synthetic
ccacacaacacacagagcug

SEQ ID NO: 14288 - RNA, 20 nt, Artificial Sequence
  Synthetic
cacacaacacacagagcugu

SEQ ID NO: 14289 - RNA, 20 nt, Artificial Sequence
  Synthetic
acacaacacacagagcugua

SEQ ID NO: 14290 - RNA, 20 nt, Artificial Sequence
  Synthetic
cacaacacacagagcuguaa

SEQ ID NO: 14291 - RNA, 20 nt, Artificial Sequence
  Synthetic
acaacacacagagcuguaau

SEQ ID NO: 14292 - RNA, 20 nt, Artificial Sequence
  Synthetic
caacacacagagcuguaauc

SEQ ID NO: 14293 - RNA, 20 nt, Artificial Sequence
  Synthetic
aacacacagagcuguaaucu

SEQ ID NO: 14294 - RNA, 20 nt, Artificial Sequence
  Synthetic
acacacagagcuguaaucua

SEQ ID NO: 14295 - RNA, 20 nt, Artificial Sequence
  Synthetic
cacacagagcuguaaucuag

SEQ ID NO: 14296 - RNA, 20 nt, Artificial Sequence
  Synthetic
acacagagcuguaaucuaga

SEQ ID NO: 14297 - RNA, 20 nt, Artificial Sequence
  Synthetic
cacagagcuguaaucuagag

SEQ ID NO: 14298 - RNA, 20 nt, Artificial Sequence
  Synthetic
acagagcuguaaucuagagc

SEQ ID NO: 14299 - RNA, 20 nt, Artificial Sequence
  Synthetic
cagagcuguaaucuagagca

SEQ ID NO: 14300 - RNA, 20 nt, Artificial Sequence
  Synthetic
agagcuguaaucuagagcaa

SEQ ID NO: 14301 - RNA, 20 nt, Artificial Sequence
  Synthetic
gagcuguaaucuagagcaag

SEQ ID NO: 14302 - RNA, 20 nt, Artificial Sequence
  Synthetic
agcuguaaucuagagcaagg

SEQ ID NO: 14303 - RNA, 20 nt, Artificial Sequence
  Synthetic
gcuguaaucuagagcaagga

SEQ ID NO: 14304 - RNA, 20 nt, Artificial Sequence
  Synthetic
cuguaaucuagagcaaggag

SEQ ID NO: 14305 - RNA, 20 nt, Artificial Sequence
  Synthetic
uguaaucuagagcaaggaga

SEQ ID NO: 14306 - RNA, 20 nt, Artificial Sequence
  Synthetic
guaaucuagagcaaggagac

SEQ ID NO: 14307 - RNA, 20 nt, Artificial Sequence
  Synthetic
uaaucuagagcaaggagaca

SEQ ID NO: 14308 - RNA, 20 nt, Artificial Sequence
  Synthetic
aaucuagagcaaggagacag

SEQ ID NO: 14309 - RNA, 20 nt, Artificial Sequence
  Synthetic
aucuagagcaaggagacaga

SEQ ID NO: 14310 - RNA, 20 nt, Artificial Sequence
  Synthetic
ucuagagcaaggagacagac

SEQ ID NO: 14311 - RNA, 20 nt, Artificial Sequence
  Synthetic
cuagagcaaggagacagaca

SEQ ID NO: 14312 - RNA, 20 nt, Artificial Sequence
  Synthetic
uagagcaaggagacagacaa

SEQ ID NO: 14313 - RNA, 20 nt, Artificial Sequence
  Synthetic
agagcaaggagacagacaac

SEQ ID NO: 14314 - RNA, 20 nt, Artificial Sequence
  Synthetic
gagcaaggagacagacaacu

SEQ ID NO: 14315 - RNA, 20 nt, Artificial Sequence
  Synthetic
agcaaggagacagacaacuc

SEQ ID NO: 14316 - RNA, 20 nt, Artificial Sequence
  Synthetic
gcaaggagacagacaacucc

SEQ ID NO: 14317 - RNA, 20 nt, Artificial Sequence
  Synthetic
caaggagacagacaacuccc

SEQ ID NO: 14318 - RNA, 20 nt, Artificial Sequence
  Synthetic
aaggagacagacaacuccca

SEQ ID NO: 14319 - RNA, 20 nt, Artificial Sequence
  Synthetic
aggagacagacaacucccaa

SEQ ID NO: 14320 - RNA, 20 nt, Artificial Sequence
  Synthetic
ggagacagacaacucccaaa

SEQ ID NO: 14321 - RNA, 20 nt, Artificial Sequence
  Synthetic
gagacagacaacucccaaac

SEQ ID NO: 14322 - RNA, 20 nt, Artificial Sequence
  Synthetic
agacagacaacucccaaacc

SEQ ID NO: 14323 - RNA, 20 nt, Artificial Sequence
  Synthetic
gacagacaacucccaaaccu

SEQ ID NO: 14324 - RNA, 20 nt, Artificial Sequence
  Synthetic
acagacaacucccaaaccua

SEQ ID NO: 14325 - RNA, 20 nt, Artificial Sequence
  Synthetic
cagacaacucccaaaccuac

SEQ ID NO: 14326 - RNA, 20 nt, Artificial Sequence
  Synthetic
agacaacucccaaaccuaca

SEQ ID NO: 14327 - RNA, 20 nt, Artificial Sequence
  Synthetic
gacaacucccaaaccuacag

SEQ ID NO: 14328 - RNA, 20 nt, Artificial Sequence
  Synthetic
acaacucccaaaccuacagu

SEQ ID NO: 14329 - RNA, 20 nt, Artificial Sequence
  Synthetic
caacucccaaaccuacaguc

SEQ ID NO: 14330 - RNA, 20 nt, Artificial Sequence
  Synthetic
aacucccaaaccuacaguca

SEQ ID NO: 14331 - RNA, 20 nt, Artificial Sequence
  Synthetic
acucccaaaccuacagucag

SEQ ID NO: 14332 - RNA, 20 nt, Artificial Sequence
  Synthetic
cucccaaaccuacagucagc

SEQ ID NO: 14333 - RNA, 20 nt, Artificial Sequence
  Synthetic
ucccaaaccuacagucagcu

SEQ ID NO: 14334 - RNA, 20 nt, Artificial Sequence
  Synthetic
cccaaaccuacagucagcuc

SEQ ID NO: 14335 - RNA, 20 nt, Artificial Sequence
  Synthetic
ccaaaccuacagucagcucc

SEQ ID NO: 14336 - RNA, 20 nt, Artificial Sequence
  Synthetic
caaaccuacagucagcucca

SEQ ID NO: 14337 - RNA, 20 nt, Artificial Sequence
  Synthetic
aaaccuacagucagcuccaa

SEQ ID NO: 14338 - RNA, 20 nt, Artificial Sequence
  Synthetic
aaccuacagucagcuccaag

SEQ ID NO: 14339 - RNA, 20 nt, Artificial Sequence
  Synthetic
accuacagucagcuccaaga

SEQ ID NO: 14340 - RNA, 20 nt, Artificial Sequence
  Synthetic
ccuacagucagcuccaagag

SEQ ID NO: 14341 - RNA, 20 nt, Artificial Sequence
  Synthetic
cuacagucagcuccaagagc

SEQ ID NO: 14342 - RNA, 20 nt, Artificial Sequence
  Synthetic
uacagucagcuccaagagcc

SEQ ID NO: 14343 - RNA, 20 nt, Artificial Sequence
  Synthetic
acagucagcuccaagagccc

SEQ ID NO: 14344 - RNA, 20 nt, Artificial Sequence
  Synthetic
cagucagcuccaagagcccu

SEQ ID NO: 14345 - RNA, 20 nt, Artificial Sequence
  Synthetic
agucagcuccaagagcccua

SEQ ID NO: 14346 - RNA, 20 nt, Artificial Sequence
  Synthetic
gucagcuccaagagcccuag

SEQ ID NO: 14347 - RNA, 20 nt, Artificial Sequence
  Synthetic
ucagcuccaagagcccuagc

SEQ ID NO: 14348 - RNA, 20 nt, Artificial Sequence
  Synthetic
cagcuccaagagcccuagca

SEQ ID NO: 14349 - RNA, 20 nt, Artificial Sequence
  Synthetic
agcuccaagagcccuagcac

SEQ ID NO: 14350 - RNA, 20 nt, Artificial Sequence
  Synthetic
gcuccaagagcccuagcacc

SEQ ID NO: 14351 - RNA, 20 nt, Artificial Sequence
  Synthetic
cuccaagagcccuagcaccu

SEQ ID NO: 14352 - RNA, 20 nt, Artificial Sequence
  Synthetic
uccaagagcccuagcaccuu

SEQ ID NO: 14353 - RNA, 20 nt, Artificial Sequence
  Synthetic
ccaagagcccuagcaccuuu

SEQ ID NO: 14354 - RNA, 20 nt, Artificial Sequence
  Synthetic
caagagcccuagcaccuuuc

SEQ ID NO: 14355 - RNA, 20 nt, Artificial Sequence
  Synthetic
aagagcccuagcaccuuuca

SEQ ID NO: 14356 - RNA, 20 nt, Artificial Sequence
  Synthetic
agagcccuagcaccuuucau

SEQ ID NO: 14357 - RNA, 20 nt, Artificial Sequence
  Synthetic
gagcccuagcaccuuucaug

SEQ ID NO: 14358 - RNA, 20 nt, Artificial Sequence
  Synthetic
agcccuagcaccuuucaugu

SEQ ID NO: 14359 - RNA, 20 nt, Artificial Sequence
  Synthetic
gcccuagcaccuuucaugug

SEQ ID NO: 14360 - RNA, 20 nt, Artificial Sequence
  Synthetic
cccuagcaccuuucaugugc

SEQ ID NO: 14361 - RNA, 20 nt, Artificial Sequence
  Synthetic
ccuagcaccuuucaugugcu

SEQ ID NO: 14362 - RNA, 20 nt, Artificial Sequence
  Synthetic
cuagcaccuuucaugugcuu

SEQ ID NO: 14363 - RNA, 20 nt, Artificial Sequence
  Synthetic
uagcaccuuucaugugcuuu

SEQ ID NO: 14364 - RNA, 20 nt, Artificial Sequence
  Synthetic
agcaccuuucaugugcuuuu

SEQ ID NO: 14365 - RNA, 20 nt, Artificial Sequence
  Synthetic
gcaccuuucaugugcuuuuc

SEQ ID NO: 14366 - RNA, 20 nt, Artificial Sequence
  Synthetic
caccuuucaugugcuuuucc

SEQ ID NO: 14367 - RNA, 20 nt, Artificial Sequence
  Synthetic
accuuucaugugcuuuuccu

SEQ ID NO: 14368 - RNA, 20 nt, Artificial Sequence
  Synthetic
ccuuucaugugcuuuuccug

SEQ ID NO: 14369 - RNA, 20 nt, Artificial Sequence
  Synthetic
cuuucaugugcuuuuccuga

SEQ ID NO: 14370 - RNA, 20 nt, Artificial Sequence
  Synthetic
uuucaugugcuuuuccugaa

SEQ ID NO: 14371 - RNA, 20 nt, Artificial Sequence
  Synthetic
uucaugugcuuuuccugaaa

SEQ ID NO: 14372 - RNA, 20 nt, Artificial Sequence
  Synthetic
ucaugugcuuuuccugaaag

SEQ ID NO: 14373 - RNA, 20 nt, Artificial Sequence
  Synthetic
caugugcuuuuccugaaagc

SEQ ID NO: 14374 - RNA, 20 nt, Artificial Sequence
  Synthetic
augugcuuuuccugaaagcu

SEQ ID NO: 14375 - RNA, 20 nt, Artificial Sequence
  Synthetic
ugugcuuuuccugaaagcug

SEQ ID NO: 14376 - RNA, 20 nt, Artificial Sequence
  Synthetic
gugcuuuuccugaaagcuga

SEQ ID NO: 14377 - RNA, 20 nt, Artificial Sequence
  Synthetic
ugcuuuuccugaaagcugau

SEQ ID NO: 14378 - RNA, 20 nt, Artificial Sequence
  Synthetic
gcuuuuccugaaagcugaug

SEQ ID NO: 14379 - RNA, 20 nt, Artificial Sequence
  Synthetic
cuuuuccugaaagcugaugu

SEQ ID NO: 14380 - RNA, 20 nt, Artificial Sequence
  Synthetic
uuuuccugaaagcugaugug

SEQ ID NO: 14381 - RNA, 20 nt, Artificial Sequence
  Synthetic
uuuccugaaagcugaugugu

SEQ ID NO: 14382 - RNA, 20 nt, Artificial Sequence
  Synthetic
uuccugaaagcugaugugug

SEQ ID NO: 14383 - RNA, 20 nt, Artificial Sequence
  Synthetic
uccugaaagcugaugugugc

SEQ ID NO: 14384 - RNA, 20 nt, Artificial Sequence
  Synthetic
ccugaaagcugaugugugcc

SEQ ID NO: 14385 - RNA, 20 nt, Artificial Sequence
  Synthetic
cugaaagcugaugugugcca

SEQ ID NO: 14386 - RNA, 20 nt, Artificial Sequence
  Synthetic
ugaaagcugaugugugccau

SEQ ID NO: 14387 - RNA, 20 nt, Artificial Sequence
  Synthetic
gaaagcugaugugugccauc

SEQ ID NO: 14388 - RNA, 20 nt, Artificial Sequence
  Synthetic
aaagcugaugugugccaucc

SEQ ID NO: 14389 - RNA, 20 nt, Artificial Sequence
  Synthetic
aagcugaugugugccaucca

SEQ ID NO: 14390 - RNA, 20 nt, Artificial Sequence
  Synthetic
agcugaugugugccauccau

SEQ ID NO: 14391 - RNA, 20 nt, Artificial Sequence
  Synthetic
gcugaugugugccauccaua

SEQ ID NO: 14392 - RNA, 20 nt, Artificial Sequence
  Synthetic
cugaugugugccauccauaa

SEQ ID NO: 14393 - RNA, 20 nt, Artificial Sequence
  Synthetic
ugaugugugccauccauaaa

SEQ ID NO: 14394 - RNA, 20 nt, Artificial Sequence
  Synthetic
gaugugugccauccauaaag

SEQ ID NO: 14395 - RNA, 20 nt, Artificial Sequence
  Synthetic
augugugccauccauaaaga

SEQ ID NO: 14396 - RNA, 20 nt, Artificial Sequence
  Synthetic
ugugugccauccauaaagau

SEQ ID NO: 14397 - RNA, 20 nt, Artificial Sequence
  Synthetic
gugugccauccauaaagauc

SEQ ID NO: 14398 - RNA, 20 nt, Artificial Sequence
  Synthetic
ugugccauccauaaagauca

SEQ ID NO: 14399 - RNA, 20 nt, Artificial Sequence
  Synthetic
gugccauccauaaagaucac

SEQ ID NO: 14400 - RNA, 20 nt, Artificial Sequence
  Synthetic
ugccauccauaaagaucaca

SEQ ID NO: 14401 - RNA, 20 nt, Artificial Sequence
  Synthetic
gccauccauaaagaucacag

SEQ ID NO: 14402 - RNA, 20 nt, Artificial Sequence
  Synthetic
ccauccauaaagaucacagc

SEQ ID NO: 14403 - RNA, 20 nt, Artificial Sequence
  Synthetic
cauccauaaagaucacagcu

SEQ ID NO: 14404 - RNA, 20 nt, Artificial Sequence
  Synthetic
auccauaaagaucacagcug

SEQ ID NO: 14405 - RNA, 20 nt, Artificial Sequence
  Synthetic
uccauaaagaucacagcugg

SEQ ID NO: 14406 - RNA, 20 nt, Artificial Sequence
  Synthetic
ccauaaagaucacagcuggg

SEQ ID NO: 14407 - RNA, 20 nt, Artificial Sequence
  Synthetic
cauaaagaucacagcugggc

SEQ ID NO: 14408 - RNA, 20 nt, Artificial Sequence
  Synthetic
auaaagaucacagcugggcc

SEQ ID NO: 14409 - RNA, 20 nt, Artificial Sequence
  Synthetic
uaaagaucacagcugggccc

SEQ ID NO: 14410 - RNA, 20 nt, Artificial Sequence
  Synthetic
aaagaucacagcugggccca

SEQ ID NO: 14411 - RNA, 20 nt, Artificial Sequence
  Synthetic
aagaucacagcugggcccac

SEQ ID NO: 14412 - RNA, 20 nt, Artificial Sequence
  Synthetic
agaucacagcugggcccacc

SEQ ID NO: 14413 - RNA, 20 nt, Artificial Sequence
  Synthetic
gaucacagcugggcccacca

SEQ ID NO: 14414 - RNA, 20 nt, Artificial Sequence
  Synthetic
aucacagcugggcccaccaa

SEQ ID NO: 14415 - RNA, 20 nt, Artificial Sequence
  Synthetic
ucacagcugggcccaccaag

SEQ ID NO: 14416 - RNA, 20 nt, Artificial Sequence
  Synthetic
cacagcugggcccaccaaga

SEQ ID NO: 14417 - RNA, 20 nt, Artificial Sequence
  Synthetic
acagcugggcccaccaagag

SEQ ID NO: 14418 - RNA, 20 nt, Artificial Sequence
  Synthetic
cagcugggcccaccaagagg

SEQ ID NO: 14419 - RNA, 20 nt, Artificial Sequence
  Synthetic
agcugggcccaccaagagga

SEQ ID NO: 14420 - RNA, 20 nt, Artificial Sequence
  Synthetic
gcugggcccaccaagaggaa

SEQ ID NO: 14421 - RNA, 20 nt, Artificial Sequence
  Synthetic
cugggcccaccaagaggaag

SEQ ID NO: 14422 - RNA, 20 nt, Artificial Sequence
  Synthetic
ugggcccaccaagaggaagc

SEQ ID NO: 14423 - RNA, 20 nt, Artificial Sequence
  Synthetic
gggcccaccaagaggaagcu

SEQ ID NO: 14424 - RNA, 20 nt, Artificial Sequence
  Synthetic
ggcccaccaagaggaagcug

SEQ ID NO: 14425 - RNA, 20 nt, Artificial Sequence
  Synthetic
gcccaccaagaggaagcugu

SEQ ID NO: 14426 - RNA, 20 nt, Artificial Sequence
  Synthetic
cccaccaagaggaagcugug

SEQ ID NO: 14427 - RNA, 20 nt, Artificial Sequence
  Synthetic
ccaccaagaggaagcugugc

SEQ ID NO: 14428 - RNA, 20 nt, Artificial Sequence
  Synthetic
caccaagaggaagcugugca

SEQ ID NO: 14429 - RNA, 20 nt, Artificial Sequence
  Synthetic
accaagaggaagcugugcag

SEQ ID NO: 14430 - RNA, 20 nt, Artificial Sequence
  Synthetic
ccaagaggaagcugugcaga

SEQ ID NO: 14431 - RNA, 20 nt, Artificial Sequence
  Synthetic
caagaggaagcugugcagag

SEQ ID NO: 14432 - RNA, 20 nt, Artificial Sequence
  Synthetic
aagaggaagcugugcagaga

SEQ ID NO: 14433 - RNA, 20 nt, Artificial Sequence
  Synthetic
agaggaagcugugcagagau

SEQ ID NO: 14434 - RNA, 20 nt, Artificial Sequence
  Synthetic
gaggaagcugugcagagaua

SEQ ID NO: 14435 - RNA, 20 nt, Artificial Sequence
  Synthetic
aggaagcugugcagagauaa

SEQ ID NO: 14436 - RNA, 20 nt, Artificial Sequence
  Synthetic
ggaagcugugcagagauaau

SEQ ID NO: 14437 - RNA, 20 nt, Artificial Sequence
  Synthetic
gaagcugugcagagauaaug

SEQ ID NO: 14438 - RNA, 20 nt, Artificial Sequence
  Synthetic
aagcugugcagagauaaugc

SEQ ID NO: 14439 - RNA, 20 nt, Artificial Sequence
  Synthetic
agcugugcagagauaaugca

SEQ ID NO: 14440 - RNA, 20 nt, Artificial Sequence
  Synthetic
gcugugcagagauaaugcag

SEQ ID NO: 14441 - RNA, 20 nt, Artificial Sequence
  Synthetic
cugugcagagauaaugcagc

SEQ ID NO: 14442 - RNA, 20 nt, Artificial Sequence
  Synthetic
ugugcagagauaaugcagcc

SEQ ID NO: 14443 - RNA, 20 nt, Artificial Sequence
  Synthetic
gugcagagauaaugcagccc

SEQ ID NO: 14444 - RNA, 20 nt, Artificial Sequence
  Synthetic
ugcagagauaaugcagcccu

SEQ ID NO: 14445 - RNA, 20 nt, Artificial Sequence
  Synthetic
gcagagauaaugcagcccuc

SEQ ID NO: 14446 - RNA, 20 nt, Artificial Sequence
  Synthetic
cagagauaaugcagcccuca

SEQ ID NO: 14447 - RNA, 20 nt, Artificial Sequence
  Synthetic
agagauaaugcagcccucac

SEQ ID NO: 14448 - RNA, 20 nt, Artificial Sequence
  Synthetic
gagauaaugcagcccucaca

SEQ ID NO: 14449 - RNA, 20 nt, Artificial Sequence
  Synthetic
agauaaugcagcccucacag

SEQ ID NO: 14450 - RNA, 20 nt, Artificial Sequence
  Synthetic
gauaaugcagcccucacagc

SEQ ID NO: 14451 - RNA, 20 nt, Artificial Sequence
  Synthetic
auaaugcagcccucacagcc

SEQ ID NO: 14452 - RNA, 20 nt, Artificial Sequence
  Synthetic
uaaugcagcccucacagcca

SEQ ID NO: 14453 - RNA, 20 nt, Artificial Sequence
  Synthetic
aaugcagcccucacagccac

SEQ ID NO: 14454 - RNA, 20 nt, Artificial Sequence
  Synthetic
augcagcccucacagccacu

SEQ ID NO: 14455 - RNA, 20 nt, Artificial Sequence
  Synthetic
ugcagcccucacagccacuu

SEQ ID NO: 14456 - RNA, 20 nt, Artificial Sequence
  Synthetic
gcagcccucacagccacuuc

SEQ ID NO: 14457 - RNA, 20 nt, Artificial Sequence
  Synthetic
cagcccucacagccacuucc

SEQ ID NO: 14458 - RNA, 20 nt, Artificial Sequence
  Synthetic
agcccucacagccacuuccg

SEQ ID NO: 14459 - RNA, 20 nt, Artificial Sequence
  Synthetic
gcccucacagccacuuccgg

SEQ ID NO: 14460 - RNA, 20 nt, Artificial Sequence
  Synthetic
cccucacagccacuuccgga

SEQ ID NO: 14461 - RNA, 20 nt, Artificial Sequence
  Synthetic
ccucacagccacuuccggag

SEQ ID NO: 14462 - RNA, 20 nt, Artificial Sequence
  Synthetic
cucacagccacuuccggaga

SEQ ID NO: 14463 - RNA, 20 nt, Artificial Sequence
  Synthetic
ucacagccacuuccggagac

SEQ ID NO: 14464 - RNA, 20 nt, Artificial Sequence
  Synthetic
cacagccacuuccggagacu

SEQ ID NO: 14465 - RNA, 20 nt, Artificial Sequence
  Synthetic
acagccacuuccggagacua

SEQ ID NO: 14466 - RNA, 20 nt, Artificial Sequence
  Synthetic
cagccacuuccggagacuac

SEQ ID NO: 14467 - RNA, 20 nt, Artificial Sequence
  Synthetic
agccacuuccggagacuaca

SEQ ID NO: 14468 - RNA, 20 nt, Artificial Sequence
  Synthetic
gccacuuccggagacuacac

SEQ ID NO: 14469 - RNA, 20 nt, Artificial Sequence
  Synthetic
ccacuuccggagacuacaca

SEQ ID NO: 14470 - RNA, 20 nt, Artificial Sequence
  Synthetic
cacuuccggagacuacacag

SEQ ID NO: 14471 - RNA, 20 nt, Artificial Sequence
  Synthetic
acuuccggagacuacacaga

SEQ ID NO: 14472 - RNA, 20 nt, Artificial Sequence
  Synthetic
cuuccggagacuacacagag

SEQ ID NO: 14473 - RNA, 20 nt, Artificial Sequence
  Synthetic
uuccggagacuacacagaga

SEQ ID NO: 14474 - RNA, 20 nt, Artificial Sequence
  Synthetic
uccggagacuacacagagau

SEQ ID NO: 14475 - RNA, 20 nt, Artificial Sequence
  Synthetic
ccggagacuacacagagauu

SEQ ID NO: 14476 - RNA, 20 nt, Artificial Sequence
  Synthetic
cggagacuacacagagauuc

SEQ ID NO: 14477 - RNA, 20 nt, Artificial Sequence
  Synthetic
ggagacuacacagagauucu

SEQ ID NO: 14478 - RNA, 20 nt, Artificial Sequence
  Synthetic
gagacuacacagagauucua

SEQ ID NO: 14479 - RNA, 20 nt, Artificial Sequence
  Synthetic
agacuacacagagauucuag

SEQ ID NO: 14480 - RNA, 20 nt, Artificial Sequence
  Synthetic
gacuacacagagauucuagu

SEQ ID NO: 14481 - RNA, 20 nt, Artificial Sequence
  Synthetic
acuacacagagauucuagug

SEQ ID NO: 14482 - RNA, 20 nt, Artificial Sequence
  Synthetic
cuacacagagauucuagugg

SEQ ID NO: 14483 - RNA, 20 nt, Artificial Sequence
  Synthetic
uacacagagauucuaguggu

SEQ ID NO: 14484 - RNA, 20 nt, Artificial Sequence
  Synthetic
acacagagauucuagugguu

SEQ ID NO: 14485 - RNA, 20 nt, Artificial Sequence
  Synthetic
cacagagauucuagugguuu

SEQ ID NO: 14486 - RNA, 20 nt, Artificial Sequence
  Synthetic
acagagauucuagugguuuc

SEQ ID NO: 14487 - RNA, 20 nt, Artificial Sequence
  Synthetic
cagagauucuagugguuucc

SEQ ID NO: 14488 - RNA, 20 nt, Artificial Sequence
  Synthetic
agagauucuagugguuucca

SEQ ID NO: 14489 - RNA, 20 nt, Artificial Sequence
  Synthetic
gagauucuagugguuuccac

SEQ ID NO: 14490 - RNA, 20 nt, Artificial Sequence
  Synthetic
agauucuagugguuuccacu

SEQ ID NO: 14491 - RNA, 20 nt, Artificial Sequence
  Synthetic
gauucuagugguuuccacuu

SEQ ID NO: 14492 - RNA, 20 nt, Artificial Sequence
  Synthetic
auucuagugguuuccacuua

SEQ ID NO: 14493 - RNA, 20 nt, Artificial Sequence
  Synthetic
uucuagugguuuccacuuaa

SEQ ID NO: 14494 - RNA, 20 nt, Artificial Sequence
  Synthetic
ucuagugguuuccacuuaaa

SEQ ID NO: 14495 - RNA, 20 nt, Artificial Sequence
  Synthetic
cuagugguuuccacuuaaaa

SEQ ID NO: 14496 - RNA, 20 nt, Artificial Sequence
  Synthetic
uagugguuuccacuuaaaac

SEQ ID NO: 14497 - RNA, 20 nt, Artificial Sequence
  Synthetic
agugguuuccacuuaaaacg

SEQ ID NO: 14498 - RNA, 20 nt, Artificial Sequence
  Synthetic
gugguuuccacuuaaaacgc

SEQ ID NO: 14499 - RNA, 20 nt, Artificial Sequence
  Synthetic
ugguuuccacuuaaaacgcu

SEQ ID NO: 14500 - RNA, 20 nt, Artificial Sequence
  Synthetic
gguuuccacuuaaaacgcuc

SEQ ID NO: 14501 - RNA, 20 nt, Artificial Sequence
  Synthetic
guuuccacuuaaaacgcucc

SEQ ID NO: 14502 - RNA, 20 nt, Artificial Sequence
  Synthetic
uuuccacuuaaaacgcucca

SEQ ID NO: 14503 - RNA, 20 nt, Artificial Sequence
  Synthetic
uuccacuuaaaacgcuccag

SEQ ID NO: 14504 - RNA, 20 nt, Artificial Sequence
  Synthetic
uccacuuaaaacgcuccagu

SEQ ID NO: 14505 - RNA, 20 nt, Artificial Sequence
  Synthetic
ccacuuaaaacgcuccagug

SEQ ID NO: 14506 - RNA, 20 nt, Artificial Sequence
  Synthetic
cacuuaaaacgcuccagugc

SEQ ID NO: 14507 - RNA, 20 nt, Artificial Sequence
  Synthetic
acuuaaaacgcuccagugca

SEQ ID NO: 14508 - RNA, 20 nt, Artificial Sequence
  Synthetic
cuuaaaacgcuccagugcau

SEQ ID NO: 14509 - RNA, 20 nt, Artificial Sequence
  Synthetic
uuaaaacgcuccagugcauu

SEQ ID NO: 14510 - RNA, 20 nt, Artificial Sequence
  Synthetic
uaaaacgcuccagugcauug

SEQ ID NO: 14511 - RNA, 20 nt, Artificial Sequence
  Synthetic
aaaacgcuccagugcauugg

SEQ ID NO: 14512 - RNA, 20 nt, Artificial Sequence
  Synthetic
aaacgcuccagugcauugga

SEQ ID NO: 14513 - RNA, 20 nt, Artificial Sequence
  Synthetic
aacgcuccagugcauuggag

SEQ ID NO: 14514 - RNA, 20 nt, Artificial Sequence
  Synthetic
acgcuccagugcauuggaga

SEQ ID NO: 14515 - RNA, 20 nt, Artificial Sequence
  Synthetic
cgcuccagugcauuggagag

SEQ ID NO: 14516 - RNA, 20 nt, Artificial Sequence
  Synthetic
gcuccagugcauuggagagg

SEQ ID NO: 14517 - RNA, 20 nt, Artificial Sequence
  Synthetic
cuccagugcauuggagaggc

SEQ ID NO: 14518 - RNA, 20 nt, Artificial Sequence
  Synthetic
uccagugcauuggagaggca

SEQ ID NO: 14519 - RNA, 20 nt, Artificial Sequence
  Synthetic
ccagugcauuggagaggcau

SEQ ID NO: 14520 - RNA, 20 nt, Artificial Sequence
  Synthetic
cagugcauuggagaggcauu

SEQ ID NO: 14521 - RNA, 20 nt, Artificial Sequence
  Synthetic
agugcauuggagaggcauuu

SEQ ID NO: 14522 - RNA, 20 nt, Artificial Sequence
  Synthetic
gugcauuggagaggcauuug

SEQ ID NO: 14523 - RNA, 20 nt, Artificial Sequence
  Synthetic
ugcauuggagaggcauuugc

SEQ ID NO: 14524 - RNA, 20 nt, Artificial Sequence
  Synthetic
gcauuggagaggcauuugcc

SEQ ID NO: 14525 - RNA, 20 nt, Artificial Sequence
  Synthetic
cauuggagaggcauuugccg

SEQ ID NO: 14526 - RNA, 20 nt, Artificial Sequence
  Synthetic
auuggagaggcauuugccgg

SEQ ID NO: 14527 - RNA, 20 nt, Artificial Sequence
  Synthetic
uuggagaggcauuugccggg

SEQ ID NO: 14528 - RNA, 20 nt, Artificial Sequence
  Synthetic
uggagaggcauuugccgggc

SEQ ID NO: 14529 - RNA, 20 nt, Artificial Sequence
  Synthetic
ggagaggcauuugccgggca

SEQ ID NO: 14530 - RNA, 20 nt, Artificial Sequence
  Synthetic
gagaggcauuugccgggcau

SEQ ID NO: 14531 - RNA, 20 nt, Artificial Sequence
  Synthetic
agaggcauuugccgggcaug

SEQ ID NO: 14532 - RNA, 20 nt, Artificial Sequence
  Synthetic
gaggcauuugccgggcaugc

SEQ ID NO: 14533 - RNA, 20 nt, Artificial Sequence
  Synthetic
aggcauuugccgggcaugca

SEQ ID NO: 14534 - RNA, 20 nt, Artificial Sequence
  Synthetic
ggcauuugccgggcaugcac

SEQ ID NO: 14535 - RNA, 20 nt, Artificial Sequence
  Synthetic
gcauuugccgggcaugcacg

SEQ ID NO: 14536 - RNA, 20 nt, Artificial Sequence
  Synthetic
cauuugccgggcaugcacgc

SEQ ID NO: 14537 - RNA, 20 nt, Artificial Sequence
  Synthetic
auuugccgggcaugcacgcu

SEQ ID NO: 14538 - RNA, 20 nt, Artificial Sequence
  Synthetic
uuugccgggcaugcacgcuu

SEQ ID NO: 14539 - RNA, 20 nt, Artificial Sequence
  Synthetic
uugccgggcaugcacgcuug

SEQ ID NO: 14540 - RNA, 20 nt, Artificial Sequence
  Synthetic
ugccgggcaugcacgcuugu

SEQ ID NO: 14541 - RNA, 20 nt, Artificial Sequence
  Synthetic
gccgggcaugcacgcuugua

SEQ ID NO: 14542 - RNA, 20 nt, Artificial Sequence
  Synthetic
ccgggcaugcacgcuuguag

SEQ ID NO: 14543 - RNA, 20 nt, Artificial Sequence
  Synthetic
cgggcaugcacgcuuguaga

SEQ ID NO: 14544 - RNA, 20 nt, Artificial Sequence
  Synthetic
gggcaugcacgcuuguagau

SEQ ID NO: 14545 - RNA, 20 nt, Artificial Sequence
  Synthetic
ggcaugcacgcuuguagauu

SEQ ID NO: 14546 - RNA, 20 nt, Artificial Sequence
  Synthetic
gcaugcacgcuuguagauuu

SEQ ID NO: 14547 - RNA, 20 nt, Artificial Sequence
  Synthetic
caugcacgcuuguagauuuc

SEQ ID NO: 14548 - RNA, 20 nt, Artificial Sequence
  Synthetic
augcacgcuuguagauuuca

SEQ ID NO: 14549 - RNA, 20 nt, Artificial Sequence
  Synthetic
ugcacgcuuguagauuucac

SEQ ID NO: 14550 - RNA, 20 nt, Artificial Sequence
  Synthetic
gcacgcuuguagauuucaca

SEQ ID NO: 14551 - RNA, 20 nt, Artificial Sequence
  Synthetic
cacgcuuguagauuucacau

SEQ ID NO: 14552 - RNA, 20 nt, Artificial Sequence
  Synthetic
acgcuuguagauuucacauc

SEQ ID NO: 14553 - RNA, 20 nt, Artificial Sequence
  Synthetic
cgcuuguagauuucacaucc

SEQ ID NO: 14554 - RNA, 20 nt, Artificial Sequence
  Synthetic
gcuuguagauuucacauccc

SEQ ID NO: 14555 - RNA, 20 nt, Artificial Sequence
  Synthetic
cuuguagauuucacauccca

SEQ ID NO: 14556 - RNA, 20 nt, Artificial Sequence
  Synthetic
uuguagauuucacaucccau

SEQ ID NO: 14557 - RNA, 20 nt, Artificial Sequence
  Synthetic
uguagauuucacaucccaug

SEQ ID NO: 14558 - RNA, 20 nt, Artificial Sequence
  Synthetic
guagauuucacaucccauga

SEQ ID NO: 14559 - RNA, 20 nt, Artificial Sequence
  Synthetic
uagauuucacaucccaugag

SEQ ID NO: 14560 - RNA, 20 nt, Artificial Sequence
  Synthetic
agauuucacaucccaugagu

SEQ ID NO: 14561 - RNA, 20 nt, Artificial Sequence
  Synthetic
gauuucacaucccaugagug

SEQ ID NO: 14562 - RNA, 20 nt, Artificial Sequence
  Synthetic
auuucacaucccaugagugu

SEQ ID NO: 14563 - RNA, 20 nt, Artificial Sequence
  Synthetic
uuucacaucccaugagugug

SEQ ID NO: 14564 - RNA, 20 nt, Artificial Sequence
  Synthetic
uucacaucccaugagugugg

SEQ ID NO: 14565 - RNA, 20 nt, Artificial Sequence
  Synthetic
ucacaucccaugagugugga

SEQ ID NO: 14566 - RNA, 20 nt, Artificial Sequence
  Synthetic
cacaucccaugaguguggag

SEQ ID NO: 14567 - RNA, 20 nt, Artificial Sequence
  Synthetic
acaucccaugaguguggagc

SEQ ID NO: 14568 - RNA, 20 nt, Artificial Sequence
  Synthetic
caucccaugaguguggagcu

SEQ ID NO: 14569 - RNA, 20 nt, Artificial Sequence
  Synthetic
aucccaugaguguggagcua

SEQ ID NO: 14570 - RNA, 20 nt, Artificial Sequence
  Synthetic
ucccaugaguguggagcuac

SEQ ID NO: 14571 - RNA, 20 nt, Artificial Sequence
  Synthetic
cccaugaguguggagcuacu

SEQ ID NO: 14572 - RNA, 20 nt, Artificial Sequence
  Synthetic
ccaugaguguggagcuacuu

SEQ ID NO: 14573 - RNA, 20 nt, Artificial Sequence
  Synthetic
caugaguguggagcuacuuu

SEQ ID NO: 14574 - RNA, 20 nt, Artificial Sequence
  Synthetic
augaguguggagcuacuuuc

SEQ ID NO: 14575 - RNA, 20 nt, Artificial Sequence
  Synthetic
ugaguguggagcuacuuucu

SEQ ID NO: 14576 - RNA, 20 nt, Artificial Sequence
  Synthetic
gaguguggagcuacuuucuu

SEQ ID NO: 14577 - RNA, 20 nt, Artificial Sequence
  Synthetic
aguguggagcuacuuucuuc

SEQ ID NO: 14578 - RNA, 20 nt, Artificial Sequence
  Synthetic
guguggagcuacuuucuucu

SEQ ID NO: 14579 - RNA, 20 nt, Artificial Sequence
  Synthetic
uguggagcuacuuucuucua

SEQ ID NO: 14580 - RNA, 20 nt, Artificial Sequence
  Synthetic
guggagcuacuuucuucuac

SEQ ID NO: 14581 - RNA, 20 nt, Artificial Sequence
  Synthetic
uggagcuacuuucuucuacc

SEQ ID NO: 14582 - RNA, 20 nt, Artificial Sequence
  Synthetic
ggagcuacuuucuucuaccu

SEQ ID NO: 14583 - RNA, 20 nt, Artificial Sequence
  Synthetic
gagcuacuuucuucuaccuu

SEQ ID NO: 14584 - RNA, 20 nt, Artificial Sequence
  Synthetic
agcuacuuucuucuaccuuc

SEQ ID NO: 14585 - RNA, 20 nt, Artificial Sequence
  Synthetic
gcuacuuucuucuaccuucu

SEQ ID NO: 14586 - RNA, 20 nt, Artificial Sequence
  Synthetic
cuacuuucuucuaccuucug

SEQ ID NO: 14587 - RNA, 20 nt, Artificial Sequence
  Synthetic
uacuuucuucuaccuucugu

SEQ ID NO: 14588 - RNA, 20 nt, Artificial Sequence
  Synthetic
acuuucuucuaccuucuguu

SEQ ID NO: 14589 - RNA, 20 nt, Artificial Sequence
  Synthetic
cuuucuucuaccuucuguuu

SEQ ID NO: 14590 - RNA, 20 nt, Artificial Sequence
  Synthetic
uuucuucuaccuucuguuug

SEQ ID NO: 14591 - RNA, 20 nt, Artificial Sequence
  Synthetic
uucuucuaccuucuguuugu

SEQ ID NO: 14592 - RNA, 20 nt, Artificial Sequence
  Synthetic
ucuucuaccuucuguuuguc

SEQ ID NO: 14593 - RNA, 20 nt, Artificial Sequence
  Synthetic
cuucuaccuucuguuuguca

SEQ ID NO: 14594 - RNA, 20 nt, Artificial Sequence
  Synthetic
uucuaccuucuguuugucag

SEQ ID NO: 14595 - RNA, 20 nt, Artificial Sequence
  Synthetic
ucuaccuucuguuugucagu

SEQ ID NO: 14596 - RNA, 20 nt, Artificial Sequence
  Synthetic
cuaccuucuguuugucaguu

SEQ ID NO: 14597 - RNA, 20 nt, Artificial Sequence
  Synthetic
uaccuucuguuugucaguuu

SEQ ID NO: 14598 - RNA, 20 nt, Artificial Sequence
  Synthetic
accuucuguuugucaguuuu

SEQ ID NO: 14599 - RNA, 20 nt, Artificial Sequence
  Synthetic
ccuucuguuugucaguuuua

SEQ ID NO: 14600 - RNA, 20 nt, Artificial Sequence
  Synthetic
cuucuguuugucaguuuuag

SEQ ID NO: 14601 - RNA, 20 nt, Artificial Sequence
  Synthetic
uucuguuugucaguuuuagc

SEQ ID NO: 14602 - RNA, 20 nt, Artificial Sequence
  Synthetic
ucuguuugucaguuuuagcu

SEQ ID NO: 14603 - RNA, 20 nt, Artificial Sequence
  Synthetic
cuguuugucaguuuuagcuu

SEQ ID NO: 14604 - RNA, 20 nt, Artificial Sequence
  Synthetic
uguuugucaguuuuagcuuu

SEQ ID NO: 14605 - RNA, 20 nt, Artificial Sequence
  Synthetic
guuugucaguuuuagcuuuu

SEQ ID NO: 14606 - RNA, 20 nt, Artificial Sequence
  Synthetic
uuugucaguuuuagcuuuuc

SEQ ID NO: 14607 - RNA, 20 nt, Artificial Sequence
  Synthetic
uugucaguuuuagcuuuucu

SEQ ID NO: 14608 - RNA, 20 nt, Artificial Sequence
  Synthetic
ugucaguuuuagcuuuucug

SEQ ID NO: 14609 - RNA, 20 nt, Artificial Sequence
  Synthetic
gucaguuuuagcuuuucuga

SEQ ID NO: 14610 - RNA, 20 nt, Artificial Sequence
  Synthetic
ucaguuuuagcuuuucugac

SEQ ID NO: 14611 - RNA, 20 nt, Artificial Sequence
  Synthetic
caguuuuagcuuuucugacu

SEQ ID NO: 14612 - RNA, 20 nt, Artificial Sequence
  Synthetic
aguuuuagcuuuucugacua

SEQ ID NO: 14613 - RNA, 20 nt, Artificial Sequence
  Synthetic
guuuuagcuuuucugacuac

SEQ ID NO: 14614 - RNA, 20 nt, Artificial Sequence
  Synthetic
uuuuagcuuuucugacuacu

SEQ ID NO: 14615 - RNA, 20 nt, Artificial Sequence
  Synthetic
uuuagcuuuucugacuacuu

SEQ ID NO: 14616 - RNA, 20 nt, Artificial Sequence
  Synthetic
uuagcuuuucugacuacuuc

SEQ ID NO: 14617 - RNA, 20 nt, Artificial Sequence
  Synthetic
uagcuuuucugacuacuucc

SEQ ID NO: 14618 - RNA, 20 nt, Artificial Sequence
  Synthetic
agcuuuucugacuacuuccu

SEQ ID NO: 14619 - RNA, 20 nt, Artificial Sequence
  Synthetic
gcuuuucugacuacuuccuu

SEQ ID NO: 14620 - RNA, 20 nt, Artificial Sequence
  Synthetic
cuuuucugacuacuuccuug

SEQ ID NO: 14621 - RNA, 20 nt, Artificial Sequence
  Synthetic
uuuucugacuacuuccuuga

SEQ ID NO: 14622 - RNA, 20 nt, Artificial Sequence
  Synthetic
uuucugacuacuuccuugau

SEQ ID NO: 14623 - RNA, 20 nt, Artificial Sequence
  Synthetic
uucugacuacuuccuugaug

SEQ ID NO: 14624 - RNA, 20 nt, Artificial Sequence
  Synthetic
ucugacuacuuccuugaugu

SEQ ID NO: 14625 - RNA, 20 nt, Artificial Sequence
  Synthetic
cugacuacuuccuugauguu

SEQ ID NO: 14626 - RNA, 20 nt, Artificial Sequence
  Synthetic
ugacuacuuccuugauguua

SEQ ID NO: 14627 - RNA, 20 nt, Artificial Sequence
  Synthetic
gacuacuuccuugauguuaa

SEQ ID NO: 14628 - RNA, 20 nt, Artificial Sequence
  Synthetic
acuacuuccuugauguuaag

SEQ ID NO: 14629 - RNA, 20 nt, Artificial Sequence
  Synthetic
cuacuuccuugauguuaagu

SEQ ID NO: 14630 - RNA, 20 nt, Artificial Sequence
  Synthetic
uacuuccuugauguuaaguu

SEQ ID NO: 14631 - RNA, 20 nt, Artificial Sequence
  Synthetic
acuuccuugauguuaaguug

SEQ ID NO: 14632 - RNA, 20 nt, Artificial Sequence
  Synthetic
cuuccuugauguuaaguugu

SEQ ID NO: 14633 - RNA, 20 nt, Artificial Sequence
  Synthetic
uuccuugauguuaaguuguc

SEQ ID NO: 14634 - RNA, 20 nt, Artificial Sequence
  Synthetic
uccuugauguuaaguuguca

SEQ ID NO: 14635 - RNA, 20 nt, Artificial Sequence
  Synthetic
ccuugauguuaaguugucac

SEQ ID NO: 14636 - RNA, 20 nt, Artificial Sequence
  Synthetic
cuugauguuaaguugucacu

SEQ ID NO: 14637 - RNA, 20 nt, Artificial Sequence
  Synthetic
uugauguuaaguugucacuu

SEQ ID NO: 14638 - RNA, 20 nt, Artificial Sequence
  Synthetic
ugauguuaaguugucacuug

SEQ ID NO: 14639 - RNA, 20 nt, Artificial Sequence
  Synthetic
gauguuaaguugucacuugc

SEQ ID NO: 14640 - RNA, 20 nt, Artificial Sequence
  Synthetic
auguuaaguugucacuugcc

SEQ ID NO: 14641 - RNA, 20 nt, Artificial Sequence
  Synthetic
uguuaaguugucacuugcca

SEQ ID NO: 14642 - RNA, 20 nt, Artificial Sequence
  Synthetic
guuaaguugucacuugccag

SEQ ID NO: 14643 - RNA, 20 nt, Artificial Sequence
  Synthetic
uuaaguugucacuugccagg

SEQ ID NO: 14644 - RNA, 20 nt, Artificial Sequence
  Synthetic
uaaguugucacuugccaggu

SEQ ID NO: 14645 - RNA, 20 nt, Artificial Sequence
  Synthetic
aaguugucacuugccagguu

SEQ ID NO: 14646 - RNA, 20 nt, Artificial Sequence
  Synthetic
aguugucacuugccagguuu

SEQ ID NO: 14647 - RNA, 20 nt, Artificial Sequence
  Synthetic
guugucacuugccagguuuu

SEQ ID NO: 14648 - RNA, 20 nt, Artificial Sequence
  Synthetic
uugucacuugccagguuuuc

SEQ ID NO: 14649 - RNA, 20 nt, Artificial Sequence
  Synthetic
ugucacuugccagguuuucc

SEQ ID NO: 14650 - RNA, 20 nt, Artificial Sequence
  Synthetic
gucacuugccagguuuuccc

SEQ ID NO: 14651 - RNA, 20 nt, Artificial Sequence
  Synthetic
ucacuugccagguuuuccca

SEQ ID NO: 14652 - RNA, 20 nt, Artificial Sequence
  Synthetic
cacuugccagguuuucccaa

SEQ ID NO: 14653 - RNA, 20 nt, Artificial Sequence
  Synthetic
acuugccagguuuucccaaa

SEQ ID NO: 14654 - RNA, 20 nt, Artificial Sequence
  Synthetic
cuugccagguuuucccaaaa

SEQ ID NO: 14655 - RNA, 20 nt, Artificial Sequence
  Synthetic
uugccagguuuucccaaaac

SEQ ID NO: 14656 - RNA, 20 nt, Artificial Sequence
  Synthetic
ugccagguuuucccaaaacg

SEQ ID NO: 14657 - RNA, 20 nt, Artificial Sequence
  Synthetic
gccagguuuucccaaaacgu

SEQ ID NO: 14658 - RNA, 20 nt, Artificial Sequence
  Synthetic
ccagguuuucccaaaacgug

SEQ ID NO: 14659 - RNA, 20 nt, Artificial Sequence
  Synthetic
cagguuuucccaaaacgugg

SEQ ID NO: 14660 - RNA, 20 nt, Artificial Sequence
  Synthetic
agguuuucccaaaacguggg

SEQ ID NO: 14661 - RNA, 20 nt, Artificial Sequence
  Synthetic
gguuuucccaaaacgugggu

SEQ ID NO: 14662 - RNA, 20 nt, Artificial Sequence
  Synthetic
guuuucccaaaacguggguu

SEQ ID NO: 14663 - RNA, 20 nt, Artificial Sequence
  Synthetic
uuuucccaaaacguggguuu

SEQ ID NO: 14664 - RNA, 20 nt, Artificial Sequence
  Synthetic
uuucccaaaacguggguuuc

SEQ ID NO: 14665 - RNA, 20 nt, Artificial Sequence
  Synthetic
uucccaaaacguggguuucu

SEQ ID NO: 14666 - RNA, 20 nt, Artificial Sequence
  Synthetic
ucccaaaacguggguuucuc

SEQ ID NO: 14667 - RNA, 20 nt, Artificial Sequence
  Synthetic
cccaaaacguggguuucuca

SEQ ID NO: 14668 - RNA, 20 nt, Artificial Sequence
  Synthetic
ccaaaacguggguuucucau

SEQ ID NO: 14669 - RNA, 20 nt, Artificial Sequence
  Synthetic
caaaacguggguuucucauc

SEQ ID NO: 14670 - RNA, 20 nt, Artificial Sequence
  Synthetic
aaaacguggguuucucaucu

SEQ ID NO: 14671 - RNA, 20 nt, Artificial Sequence
  Synthetic
aaacguggguuucucaucuc

SEQ ID NO: 14672 - RNA, 20 nt, Artificial Sequence
  Synthetic
aacguggguuucucaucucc

SEQ ID NO: 14673 - RNA, 20 nt, Artificial Sequence
  Synthetic
acguggguuucucaucucca

SEQ ID NO: 14674 - RNA, 20 nt, Artificial Sequence
  Synthetic
cguggguuucucaucuccaa

SEQ ID NO: 14675 - RNA, 20 nt, Artificial Sequence
  Synthetic
guggguuucucaucuccaac

SEQ ID NO: 14676 - RNA, 20 nt, Artificial Sequence
  Synthetic
uggguuucucaucuccaaca

SEQ ID NO: 14677 - RNA, 20 nt, Artificial Sequence
  Synthetic
ggguuucucaucuccaacaa

SEQ ID NO: 14678 - RNA, 20 nt, Artificial Sequence
  Synthetic
gguuucucaucuccaacaac

SEQ ID NO: 14679 - RNA, 20 nt, Artificial Sequence
  Synthetic
guuucucaucuccaacaacc

SEQ ID NO: 14680 - RNA, 20 nt, Artificial Sequence
  Synthetic
uuucucaucuccaacaaccc

SEQ ID NO: 14681 - RNA, 20 nt, Artificial Sequence
  Synthetic
uucucaucuccaacaacccu

SEQ ID NO: 14682 - RNA, 20 nt, Artificial Sequence
  Synthetic
ucucaucuccaacaacccua

SEQ ID NO: 14683 - RNA, 20 nt, Artificial Sequence
  Synthetic
cucaucuccaacaacccuaa

SEQ ID NO: 14684 - RNA, 20 nt, Artificial Sequence
  Synthetic
ucaucuccaacaacccuaau

SEQ ID NO: 14685 - RNA, 20 nt, Artificial Sequence
  Synthetic
caucuccaacaacccuaauc

SEQ ID NO: 14686 - RNA, 20 nt, Artificial Sequence
  Synthetic
aucuccaacaacccuaaucu

SEQ ID NO: 14687 - RNA, 20 nt, Artificial Sequence
  Synthetic
ucuccaacaacccuaaucua

SEQ ID NO: 14688 - RNA, 20 nt, Artificial Sequence
  Synthetic
cuccaacaacccuaaucuac

SEQ ID NO: 14689 - RNA, 20 nt, Artificial Sequence
  Synthetic
uccaacaacccuaaucuacu

SEQ ID NO: 14690 - RNA, 20 nt, Artificial Sequence
  Synthetic
ccaacaacccuaaucuacuu

SEQ ID NO: 14691 - RNA, 20 nt, Artificial Sequence
  Synthetic
caacaacccuaaucuacuua

SEQ ID NO: 14692 - RNA, 20 nt, Artificial Sequence
  Synthetic
aacaacccuaaucuacuuag

SEQ ID NO: 14693 - RNA, 20 nt, Artificial Sequence
  Synthetic
acaacccuaaucuacuuagc

SEQ ID NO: 14694 - RNA, 20 nt, Artificial Sequence
  Synthetic
caacccuaaucuacuuagcu

SEQ ID NO: 14695 - RNA, 20 nt, Artificial Sequence
  Synthetic
aacccuaaucuacuuagcuc

SEQ ID NO: 14696 - RNA, 20 nt, Artificial Sequence
  Synthetic
acccuaaucuacuuagcucu

SEQ ID NO: 14697 - RNA, 20 nt, Artificial Sequence
  Synthetic
cccuaaucuacuuagcucuc

SEQ ID NO: 14698 - RNA, 20 nt, Artificial Sequence
  Synthetic
ccuaaucuacuuagcucucu

SEQ ID NO: 14699 - RNA, 20 nt, Artificial Sequence
  Synthetic
cuaaucuacuuagcucucua

SEQ ID NO: 14700 - RNA, 20 nt, Artificial Sequence
  Synthetic
uaaucuacuuagcucucuaa

SEQ ID NO: 14701 - RNA, 20 nt, Artificial Sequence
  Synthetic
aaucuacuuagcucucuaau

SEQ ID NO: 14702 - RNA, 20 nt, Artificial Sequence
  Synthetic
aucuacuuagcucucuaauu

SEQ ID NO: 14703 - RNA, 20 nt, Artificial Sequence
  Synthetic
ucuacuuagcucucuaauua

SEQ ID NO: 14704 - RNA, 20 nt, Artificial Sequence
  Synthetic
cuacuuagcucucuaauuac

SEQ ID NO: 14705 - RNA, 20 nt, Artificial Sequence
  Synthetic
uacuuagcucucuaauuacu

SEQ ID NO: 14706 - RNA, 20 nt, Artificial Sequence
  Synthetic
acuuagcucucuaauuacua

SEQ ID NO: 14707 - RNA, 20 nt, Artificial Sequence
  Synthetic
cuuagcucucuaauuacuaa

SEQ ID NO: 14708 - RNA, 20 nt, Artificial Sequence
  Synthetic
uuagcucucuaauuacuaac

SEQ ID NO: 14709 - RNA, 20 nt, Artificial Sequence
  Synthetic
uagcucucuaauuacuaacu

SEQ ID NO: 14710 - RNA, 20 nt, Artificial Sequence
  Synthetic
agcucucuaauuacuaacuu

SEQ ID NO: 14711 - RNA, 20 nt, Artificial Sequence
  Synthetic
gcucucuaauuacuaacuuc

SEQ ID NO: 14712 - RNA, 20 nt, Artificial Sequence
  Synthetic
cucucuaauuacuaacuucu

SEQ ID NO: 14713 - RNA, 20 nt, Artificial Sequence
  Synthetic
ucucuaauuacuaacuucuu

SEQ ID NO: 14714 - RNA, 20 nt, Artificial Sequence
  Synthetic
cucuaauuacuaacuucuua

SEQ ID NO: 14715 - RNA, 20 nt, Artificial Sequence
  Synthetic
ucuaauuacuaacuucuuac

SEQ ID NO: 14716 - RNA, 20 nt, Artificial Sequence
  Synthetic
cuaauuacuaacuucuuacu

SEQ ID NO: 14717 - RNA, 20 nt, Artificial Sequence
  Synthetic
uaauuacuaacuucuuacua

SEQ ID NO: 14718 - RNA, 20 nt, Artificial Sequence
  Synthetic
aauuacuaacuucuuacuag

SEQ ID NO: 14719 - RNA, 20 nt, Artificial Sequence
  Synthetic
auuacuaacuucuuacuagu

SEQ ID NO: 14720 - RNA, 20 nt, Artificial Sequence
  Synthetic
uuacuaacuucuuacuaguc

SEQ ID NO: 14721 - RNA, 20 nt, Artificial Sequence
  Synthetic
uacuaacuucuuacuagucu

SEQ ID NO: 14722 - RNA, 20 nt, Artificial Sequence
  Synthetic
acuaacuucuuacuagucug

SEQ ID NO: 14723 - RNA, 20 nt, Artificial Sequence
  Synthetic
cuaacuucuuacuagucugu

SEQ ID NO: 14724 - RNA, 20 nt, Artificial Sequence
  Synthetic
uaacuucuuacuagucugug

SEQ ID NO: 14725 - RNA, 20 nt, Artificial Sequence
  Synthetic
aacuucuuacuagucuguga

SEQ ID NO: 14726 - RNA, 20 nt, Artificial Sequence
  Synthetic
acuucuuacuagucugugag

SEQ ID NO: 14727 - RNA, 20 nt, Artificial Sequence
  Synthetic
cuucuuacuagucugugagu

SEQ ID NO: 14728 - RNA, 20 nt, Artificial Sequence
  Synthetic
uucuuacuagucugugaguc

SEQ ID NO: 14729 - RNA, 20 nt, Artificial Sequence
  Synthetic
ucuuacuagucugugaguca

SEQ ID NO: 14730 - RNA, 20 nt, Artificial Sequence
  Synthetic
cuuacuagucugugagucag

SEQ ID NO: 14731 - RNA, 20 nt, Artificial Sequence
  Synthetic
uuacuagucugugagucaga

SEQ ID NO: 14732 - RNA, 20 nt, Artificial Sequence
  Synthetic
uacuagucugugagucagaa

SEQ ID NO: 14733 - RNA, 20 nt, Artificial Sequence
  Synthetic
acuagucugugagucagaaa

SEQ ID NO: 14734 - RNA, 20 nt, Artificial Sequence
  Synthetic
cuagucugugagucagaaaa

SEQ ID NO: 14735 - RNA, 20 nt, Artificial Sequence
  Synthetic
uagucugugagucagaaaac

SEQ ID NO: 14736 - RNA, 20 nt, Artificial Sequence
  Synthetic
agucugugagucagaaaacc

SEQ ID NO: 14737 - RNA, 20 nt, Artificial Sequence
  Synthetic
gucugugagucagaaaacca

SEQ ID NO: 14738 - RNA, 20 nt, Artificial Sequence
  Synthetic
ucugugagucagaaaaccac

SEQ ID NO: 14739 - RNA, 20 nt, Artificial Sequence
  Synthetic
cugugagucagaaaaccaca

SEQ ID NO: 14740 - RNA, 20 nt, Artificial Sequence
  Synthetic
ugugagucagaaaaccacau

SEQ ID NO: 14741 - RNA, 20 nt, Artificial Sequence
  Synthetic
gugagucagaaaaccacaug

SEQ ID NO: 14742 - RNA, 20 nt, Artificial Sequence
  Synthetic
ugagucagaaaaccacauga

SEQ ID NO: 14743 - RNA, 20 nt, Artificial Sequence
  Synthetic
gagucagaaaaccacaugac

SEQ ID NO: 14744 - RNA, 20 nt, Artificial Sequence
  Synthetic
agucagaaaaccacaugaca

SEQ ID NO: 14745 - RNA, 20 nt, Artificial Sequence
  Synthetic
gucagaaaaccacaugacaa

SEQ ID NO: 14746 - RNA, 20 nt, Artificial Sequence
  Synthetic
ucagaaaaccacaugacaaa

SEQ ID NO: 14747 - RNA, 20 nt, Artificial Sequence
  Synthetic
cagaaaaccacaugacaaaa

SEQ ID NO: 14748 - RNA, 20 nt, Artificial Sequence
  Synthetic
agaaaaccacaugacaaaau

SEQ ID NO: 14749 - RNA, 20 nt, Artificial Sequence
  Synthetic
gaaaaccacaugacaaaauu

SEQ ID NO: 14750 - RNA, 20 nt, Artificial Sequence
  Synthetic
aaaaccacaugacaaaauug

SEQ ID NO: 14751 - RNA, 20 nt, Artificial Sequence
  Synthetic
aaaccacaugacaaaauuga

SEQ ID NO: 14752 - RNA, 20 nt, Artificial Sequence
  Synthetic
aaccacaugacaaaauugac

SEQ ID NO: 14753 - RNA, 20 nt, Artificial Sequence
  Synthetic
accacaugacaaaauugacu

SEQ ID NO: 14754 - RNA, 20 nt, Artificial Sequence
  Synthetic
ccacaugacaaaauugacuu

SEQ ID NO: 14755 - RNA, 20 nt, Artificial Sequence
  Synthetic
cacaugacaaaauugacuua

SEQ ID NO: 14756 - RNA, 20 nt, Artificial Sequence
  Synthetic
acaugacaaaauugacuuag

SEQ ID NO: 14757 - RNA, 20 nt, Artificial Sequence
  Synthetic
caugacaaaauugacuuaga

SEQ ID NO: 14758 - RNA, 20 nt, Artificial Sequence
  Synthetic
augacaaaauugacuuagaa

SEQ ID NO: 14759 - RNA, 20 nt, Artificial Sequence
  Synthetic
ugacaaaauugacuuagaac

SEQ ID NO: 14760 - RNA, 20 nt, Artificial Sequence
  Synthetic
gacaaaauugacuuagaacu

SEQ ID NO: 14761 - RNA, 20 nt, Artificial Sequence
  Synthetic
acaaaauugacuuagaacug

SEQ ID NO: 14762 - RNA, 20 nt, Artificial Sequence
  Synthetic
caaaauugacuuagaacugu

SEQ ID NO: 14763 - RNA, 20 nt, Artificial Sequence
  Synthetic
aaaauugacuuagaacuguc

SEQ ID NO: 14764 - RNA, 20 nt, Artificial Sequence
  Synthetic
aaauugacuuagaacuguca

SEQ ID NO: 14765 - RNA, 20 nt, Artificial Sequence
  Synthetic
aauugacuuagaacugucac

SEQ ID NO: 14766 - RNA, 20 nt, Artificial Sequence
  Synthetic
auugacuuagaacugucaca

SEQ ID NO: 14767 - RNA, 20 nt, Artificial Sequence
  Synthetic
uugacuuagaacugucacac

SEQ ID NO: 14768 - RNA, 20 nt, Artificial Sequence
  Synthetic
ugacuuagaacugucacacg

SEQ ID NO: 14769 - RNA, 20 nt, Artificial Sequence
  Synthetic
gacuuagaacugucacacga

SEQ ID NO: 14770 - RNA, 20 nt, Artificial Sequence
  Synthetic
acuuagaacugucacacgau

SEQ ID NO: 14771 - RNA, 20 nt, Artificial Sequence
  Synthetic
cuuagaacugucacacgaua

SEQ ID NO: 14772 - RNA, 20 nt, Artificial Sequence
  Synthetic
uuagaacugucacacgauaa

SEQ ID NO: 14773 - RNA, 20 nt, Artificial Sequence
  Synthetic
uagaacugucacacgauaag

SEQ ID NO: 14774 - RNA, 20 nt, Artificial Sequence
  Synthetic
agaacugucacacgauaagg

SEQ ID NO: 14775 - RNA, 20 nt, Artificial Sequence
  Synthetic
gaacugucacacgauaaggg

SEQ ID NO: 14776 - RNA, 20 nt, Artificial Sequence
  Synthetic
aacugucacacgauaaggga

SEQ ID NO: 14777 - RNA, 20 nt, Artificial Sequence
  Synthetic
acugucacacgauaagggaa

SEQ ID NO: 14778 - RNA, 20 nt, Artificial Sequence
  Synthetic
cugucacacgauaagggaac

SEQ ID NO: 14779 - RNA, 20 nt, Artificial Sequence
  Synthetic
ugucacacgauaagggaacc

SEQ ID NO: 14780 - RNA, 20 nt, Artificial Sequence
  Synthetic
gucacacgauaagggaacca

SEQ ID NO: 14781 - RNA, 20 nt, Artificial Sequence
  Synthetic
ucacacgauaagggaaccag

SEQ ID NO: 14782 - RNA, 20 nt, Artificial Sequence
  Synthetic
cacacgauaagggaaccagg

SEQ ID NO: 14783 - RNA, 20 nt, Artificial Sequence
  Synthetic
acacgauaagggaaccagga

SEQ ID NO: 14784 - RNA, 20 nt, Artificial Sequence
  Synthetic
cacgauaagggaaccaggaa

SEQ ID NO: 14785 - RNA, 20 nt, Artificial Sequence
  Synthetic
acgauaagggaaccaggaac

SEQ ID NO: 14786 - RNA, 20 nt, Artificial Sequence
  Synthetic
cgauaagggaaccaggaacu

SEQ ID NO: 14787 - RNA, 20 nt, Artificial Sequence
  Synthetic
gauaagggaaccaggaacuc

SEQ ID NO: 14788 - RNA, 20 nt, Artificial Sequence
  Synthetic
auaagggaaccaggaacucu

SEQ ID NO: 14789 - RNA, 20 nt, Artificial Sequence
  Synthetic
uaagggaaccaggaacucuc

SEQ ID NO: 14790 - RNA, 20 nt, Artificial Sequence
  Synthetic
aagggaaccaggaacucucc

SEQ ID NO: 14791 - RNA, 20 nt, Artificial Sequence
  Synthetic
agggaaccaggaacucucca

SEQ ID NO: 14792 - RNA, 20 nt, Artificial Sequence
  Synthetic
gggaaccaggaacucuccaa

SEQ ID NO: 14793 - RNA, 20 nt, Artificial Sequence
  Synthetic
ggaaccaggaacucuccaaa

SEQ ID NO: 14794 - RNA, 20 nt, Artificial Sequence
  Synthetic
gaaccaggaacucuccaaau

SEQ ID NO: 14795 - RNA, 20 nt, Artificial Sequence
  Synthetic
aaccaggaacucuccaaaua

SEQ ID NO: 14796 - RNA, 20 nt, Artificial Sequence
  Synthetic
accaggaacucuccaaauag

SEQ ID NO: 14797 - RNA, 20 nt, Artificial Sequence
  Synthetic
ccaggaacucuccaaauaga

SEQ ID NO: 14798 - RNA, 20 nt, Artificial Sequence
  Synthetic
caggaacucuccaaauagag

SEQ ID NO: 14799 - RNA, 20 nt, Artificial Sequence
  Synthetic
aggaacucuccaaauagagu

SEQ ID NO: 14800 - RNA, 20 nt, Artificial Sequence
  Synthetic
ggaacucuccaaauagaguu

SEQ ID NO: 14801 - RNA, 20 nt, Artificial Sequence
  Synthetic
gaacucuccaaauagaguuc

SEQ ID NO: 14802 - RNA, 20 nt, Artificial Sequence
  Synthetic
aacucuccaaauagaguucc

SEQ ID NO: 14803 - RNA, 20 nt, Artificial Sequence
  Synthetic
acucuccaaauagaguuccu

SEQ ID NO: 14804 - RNA, 20 nt, Artificial Sequence
  Synthetic
cucuccaaauagaguuccua

SEQ ID NO: 14805 - RNA, 20 nt, Artificial Sequence
  Synthetic
ucuccaaauagaguuccuaa

SEQ ID NO: 14806 - RNA, 20 nt, Artificial Sequence
  Synthetic
cuccaaauagaguuccuaac

SEQ ID NO: 14807 - RNA, 20 nt, Artificial Sequence
  Synthetic
uccaaauagaguuccuaacu

SEQ ID NO: 14808 - RNA, 20 nt, Artificial Sequence
  Synthetic
ccaaauagaguuccuaacuc

SEQ ID NO: 14809 - RNA, 20 nt, Artificial Sequence
  Synthetic
caaauagaguuccuaacucu

SEQ ID NO: 14810 - RNA, 20 nt, Artificial Sequence
  Synthetic
aaauagaguuccuaacucuu

SEQ ID NO: 14811 - RNA, 20 nt, Artificial Sequence
  Synthetic
aauagaguuccuaacucuuu

SEQ ID NO: 14812 - RNA, 20 nt, Artificial Sequence
  Synthetic
auagaguuccuaacucuuuc

SEQ ID NO: 14813 - RNA, 20 nt, Artificial Sequence
  Synthetic
uagaguuccuaacucuuuca

SEQ ID NO: 14814 - RNA, 20 nt, Artificial Sequence
  Synthetic
agaguuccuaacucuuucag

SEQ ID NO: 14815 - RNA, 20 nt, Artificial Sequence
  Synthetic
gaguuccuaacucuuucagu

SEQ ID NO: 14816 - RNA, 20 nt, Artificial Sequence
  Synthetic
aguuccuaacucuuucaguu

SEQ ID NO: 14817 - RNA, 20 nt, Artificial Sequence
  Synthetic
guuccuaacucuuucaguuc

SEQ ID NO: 14818 - RNA, 20 nt, Artificial Sequence
  Synthetic
uuccuaacucuuucaguucu

SEQ ID NO: 14819 - RNA, 20 nt, Artificial Sequence
  Synthetic
uccuaacucuuucaguucuc

SEQ ID NO: 14820 - RNA, 20 nt, Artificial Sequence
  Synthetic
ccuaacucuuucaguucuca

SEQ ID NO: 14821 - RNA, 20 nt, Artificial Sequence
  Synthetic
cuaacucuuucaguucucag

SEQ ID NO: 14822 - RNA, 20 nt, Artificial Sequence
  Synthetic
uaacucuuucaguucucaga

SEQ ID NO: 14823 - RNA, 20 nt, Artificial Sequence
  Synthetic
aacucuuucaguucucagaa

SEQ ID NO: 14824 - RNA, 20 nt, Artificial Sequence
  Synthetic
acucuuucaguucucagaau

SEQ ID NO: 14825 - RNA, 20 nt, Artificial Sequence
  Synthetic
cucuuucaguucucagaauu

SEQ ID NO: 14826 - RNA, 20 nt, Artificial Sequence
  Synthetic
ucuuucaguucucagaauua

SEQ ID NO: 14827 - RNA, 20 nt, Artificial Sequence
  Synthetic
cuuucaguucucagaauuag

SEQ ID NO: 14828 - RNA, 20 nt, Artificial Sequence
  Synthetic
uuucaguucucagaauuagu

SEQ ID NO: 14829 - RNA, 20 nt, Artificial Sequence
  Synthetic
uucaguucucagaauuagug

SEQ ID NO: 14830 - RNA, 20 nt, Artificial Sequence
  Synthetic
ucaguucucagaauuagugg

SEQ ID NO: 14831 - RNA, 20 nt, Artificial Sequence
  Synthetic
caguucucagaauuagugga

SEQ ID NO: 14832 - RNA, 20 nt, Artificial Sequence
  Synthetic
aguucucagaauuaguggaa

SEQ ID NO: 14833 - RNA, 20 nt, Artificial Sequence
  Synthetic
guucucagaauuaguggaaa

SEQ ID NO: 14834 - RNA, 20 nt, Artificial Sequence
  Synthetic
uucucagaauuaguggaaag

SEQ ID NO: 14835 - RNA, 20 nt, Artificial Sequence
  Synthetic
ucucagaauuaguggaaaga

SEQ ID NO: 14836 - RNA, 20 nt, Artificial Sequence
  Synthetic
cucagaauuaguggaaagau

SEQ ID NO: 14837 - RNA, 20 nt, Artificial Sequence
  Synthetic
ucagaauuaguggaaagauc

SEQ ID NO: 14838 - RNA, 20 nt, Artificial Sequence
  Synthetic
cagaauuaguggaaagaucc

SEQ ID NO: 14839 - RNA, 20 nt, Artificial Sequence
  Synthetic
agaauuaguggaaagauccu

SEQ ID NO: 14840 - RNA, 20 nt, Artificial Sequence
  Synthetic
gaauuaguggaaagauccug

SEQ ID NO: 14841 - RNA, 20 nt, Artificial Sequence
  Synthetic
aauuaguggaaagauccugc

SEQ ID NO: 14842 - RNA, 20 nt, Artificial Sequence
  Synthetic
auuaguggaaagauccugca

SEQ ID NO: 14843 - RNA, 20 nt, Artificial Sequence
  Synthetic
uuaguggaaagauccugcag

SEQ ID NO: 14844 - RNA, 20 nt, Artificial Sequence
  Synthetic
uaguggaaagauccugcagc

SEQ ID NO: 14845 - RNA, 20 nt, Artificial Sequence
  Synthetic
aguggaaagauccugcagcc

SEQ ID NO: 14846 - RNA, 20 nt, Artificial Sequence
  Synthetic
guggaaagauccugcagcca

SEQ ID NO: 14847 - RNA, 20 nt, Artificial Sequence
  Synthetic
uggaaagauccugcagccau

SEQ ID NO: 14848 - RNA, 20 nt, Artificial Sequence
  Synthetic
ggaaagauccugcagccauu

SEQ ID NO: 14849 - RNA, 20 nt, Artificial Sequence
  Synthetic
gaaagauccugcagccauuu

SEQ ID NO: 14850 - RNA, 20 nt, Artificial Sequence
  Synthetic
aaagauccugcagccauuuc

SEQ ID NO: 14851 - RNA, 20 nt, Artificial Sequence
  Synthetic
aagauccugcagccauuucc

SEQ ID NO: 14852 - RNA, 20 nt, Artificial Sequence
  Synthetic
agauccugcagccauuucca

SEQ ID NO: 14853 - RNA, 20 nt, Artificial Sequence
  Synthetic
gauccugcagccauuuccag

SEQ ID NO: 14854 - RNA, 20 nt, Artificial Sequence
  Synthetic
auccugcagccauuuccagu

SEQ ID NO: 14855 - RNA, 20 nt, Artificial Sequence
  Synthetic
uccugcagccauuuccagug

SEQ ID NO: 14856 - RNA, 20 nt, Artificial Sequence
  Synthetic
ccugcagccauuuccagugc

SEQ ID NO: 14857 - RNA, 20 nt, Artificial Sequence
  Synthetic
cugcagccauuuccagugca

SEQ ID NO: 14858 - RNA, 20 nt, Artificial Sequence
  Synthetic
ugcagccauuuccagugcaa

SEQ ID NO: 14859 - RNA, 20 nt, Artificial Sequence
  Synthetic
gcagccauuuccagugcaac

SEQ ID NO: 14860 - RNA, 20 nt, Artificial Sequence
  Synthetic
cagccauuuccagugcaaca

SEQ ID NO: 14861 - RNA, 20 nt, Artificial Sequence
  Synthetic
agccauuuccagugcaacau

SEQ ID NO: 14862 - RNA, 20 nt, Artificial Sequence
  Synthetic
gccauuuccagugcaacauc

SEQ ID NO: 14863 - RNA, 20 nt, Artificial Sequence
  Synthetic
ccauuuccagugcaacaucc

SEQ ID NO: 14864 - RNA, 20 nt, Artificial Sequence
  Synthetic
cauuuccagugcaacauccu

SEQ ID NO: 14865 - RNA, 20 nt, Artificial Sequence
  Synthetic
auuuccagugcaacauccua

SEQ ID NO: 14866 - RNA, 20 nt, Artificial Sequence
  Synthetic
uuuccagugcaacauccuag

SEQ ID NO: 14867 - RNA, 20 nt, Artificial Sequence
  Synthetic
uuccagugcaacauccuaga

SEQ ID NO: 14868 - RNA, 20 nt, Artificial Sequence
  Synthetic
uccagugcaacauccuagag

SEQ ID NO: 14869 - RNA, 20 nt, Artificial Sequence
  Synthetic
ccagugcaacauccuagaga

SEQ ID NO: 14870 - RNA, 20 nt, Artificial Sequence
  Synthetic
cagugcaacauccuagagau

SEQ ID NO: 14871 - RNA, 20 nt, Artificial Sequence
  Synthetic
agugcaacauccuagagauc

SEQ ID NO: 14872 - RNA, 20 nt, Artificial Sequence
  Synthetic
gugcaacauccuagagaucu

SEQ ID NO: 14873 - RNA, 20 nt, Artificial Sequence
  Synthetic
ugcaacauccuagagaucug

SEQ ID NO: 14874 - RNA, 20 nt, Artificial Sequence
  Synthetic
gcaacauccuagagaucuga

SEQ ID NO: 14875 - RNA, 20 nt, Artificial Sequence
  Synthetic
caacauccuagagaucugag

SEQ ID NO: 14876 - RNA, 20 nt, Artificial Sequence
  Synthetic
aacauccuagagaucugagg

SEQ ID NO: 14877 - RNA, 20 nt, Artificial Sequence
  Synthetic
acauccuagagaucugaggu

SEQ ID NO: 14878 - RNA, 20 nt, Artificial Sequence
  Synthetic
cauccuagagaucugagguu

SEQ ID NO: 14879 - RNA, 20 nt, Artificial Sequence
  Synthetic
auccuagagaucugagguuc

SEQ ID NO: 14880 - RNA, 20 nt, Artificial Sequence
  Synthetic
uccuagagaucugagguucc

SEQ ID NO: 14881 - RNA, 20 nt, Artificial Sequence
  Synthetic
ccuagagaucugagguuccc

SEQ ID NO: 14882 - RNA, 20 nt, Artificial Sequence
  Synthetic
cuagagaucugagguucccu

SEQ ID NO: 14883 - RNA, 20 nt, Artificial Sequence
  Synthetic
uagagaucugagguucccug

SEQ ID NO: 14884 - RNA, 20 nt, Artificial Sequence
  Synthetic
agagaucugagguucccugg

SEQ ID NO: 14885 - RNA, 20 nt, Artificial Sequence
  Synthetic
gagaucugagguucccugga

SEQ ID NO: 14886 - RNA, 20 nt, Artificial Sequence
  Synthetic
agaucugagguucccuggag

SEQ ID NO: 14887 - RNA, 20 nt, Artificial Sequence
  Synthetic
gaucugagguucccuggaga

SEQ ID NO: 14888 - RNA, 20 nt, Artificial Sequence
  Synthetic
aucugagguucccuggagac

SEQ ID NO: 14889 - RNA, 20 nt, Artificial Sequence
  Synthetic
ucugagguucccuggagacc

SEQ ID NO: 14890 - RNA, 20 nt, Artificial Sequence
  Synthetic
cugagguucccuggagacca

SEQ ID NO: 14891 - RNA, 20 nt, Artificial Sequence
  Synthetic
ugagguucccuggagaccaa

SEQ ID NO: 14892 - RNA, 20 nt, Artificial Sequence
  Synthetic
gagguucccuggagaccaac

SEQ ID NO: 14893 - RNA, 20 nt, Artificial Sequence
  Synthetic
agguucccuggagaccaacu

SEQ ID NO: 14894 - RNA, 20 nt, Artificial Sequence
  Synthetic
gguucccuggagaccaacuc

SEQ ID NO: 14895 - RNA, 20 nt, Artificial Sequence
  Synthetic
guucccuggagaccaacucu

SEQ ID NO: 14896 - RNA, 20 nt, Artificial Sequence
  Synthetic
uucccuggagaccaacucuc

SEQ ID NO: 14897 - RNA, 20 nt, Artificial Sequence
  Synthetic
ucccuggagaccaacucuca

SEQ ID NO: 14898 - RNA, 20 nt, Artificial Sequence
  Synthetic
cccuggagaccaacucucag

SEQ ID NO: 14899 - RNA, 20 nt, Artificial Sequence
  Synthetic
ccuggagaccaacucucaga

SEQ ID NO: 14900 - RNA, 20 nt, Artificial Sequence
  Synthetic
cuggagaccaacucucagau

SEQ ID NO: 14901 - RNA, 20 nt, Artificial Sequence
  Synthetic
uggagaccaacucucagaug

SEQ ID NO: 14902 - RNA, 20 nt, Artificial Sequence
  Synthetic
ggagaccaacucucagauga

SEQ ID NO: 14903 - RNA, 20 nt, Artificial Sequence
  Synthetic
gagaccaacucucagaugau

SEQ ID NO: 14904 - RNA, 20 nt, Artificial Sequence
  Synthetic
agaccaacucucagaugauc

SEQ ID NO: 14905 - RNA, 20 nt, Artificial Sequence
  Synthetic
gaccaacucucagaugaucu

SEQ ID NO: 14906 - RNA, 20 nt, Artificial Sequence
  Synthetic
accaacucucagaugaucuu

SEQ ID NO: 14907 - RNA, 20 nt, Artificial Sequence
  Synthetic
ccaacucucagaugaucuug

SEQ ID NO: 14908 - RNA, 20 nt, Artificial Sequence
  Synthetic
caacucucagaugaucuuga

SEQ ID NO: 14909 - RNA, 20 nt, Artificial Sequence
  Synthetic
aacucucagaugaucuugac

SEQ ID NO: 14910 - RNA, 20 nt, Artificial Sequence
  Synthetic
acucucagaugaucuugacu

SEQ ID NO: 14911 - RNA, 20 nt, Artificial Sequence
  Synthetic
cucucagaugaucuugacug

SEQ ID NO: 14912 - RNA, 20 nt, Artificial Sequence
  Synthetic
ucucagaugaucuugacugg

SEQ ID NO: 14913 - RNA, 20 nt, Artificial Sequence
  Synthetic
cucagaugaucuugacuggg

SEQ ID NO: 14914 - RNA, 20 nt, Artificial Sequence
  Synthetic
ucagaugaucuugacuggga

SEQ ID NO: 14915 - RNA, 20 nt, Artificial Sequence
  Synthetic
cagaugaucuugacugggau

SEQ ID NO: 14916 - RNA, 20 nt, Artificial Sequence
  Synthetic
agaugaucuugacugggauu

SEQ ID NO: 14917 - RNA, 20 nt, Artificial Sequence
  Synthetic
gaugaucuugacugggauua

SEQ ID NO: 14918 - RNA, 20 nt, Artificial Sequence
  Synthetic
augaucuugacugggauuaa

SEQ ID NO: 14919 - RNA, 20 nt, Artificial Sequence
  Synthetic
ugaucuugacugggauuaac

SEQ ID NO: 14920 - RNA, 20 nt, Artificial Sequence
  Synthetic
gaucuugacugggauuaaca

SEQ ID NO: 14921 - RNA, 20 nt, Artificial Sequence
  Synthetic
aucuugacugggauuaacaa

SEQ ID NO: 14922 - RNA, 20 nt, Artificial Sequence
  Synthetic
ucuugacugggauuaacaac

SEQ ID NO: 14923 - RNA, 20 nt, Artificial Sequence
  Synthetic
cuugacugggauuaacaacg

SEQ ID NO: 14924 - RNA, 20 nt, Artificial Sequence
  Synthetic
uugacugggauuaacaacgg

SEQ ID NO: 14925 - RNA, 20 nt, Artificial Sequence
  Synthetic
ugacugggauuaacaacgga

SEQ ID NO: 14926 - RNA, 20 nt, Artificial Sequence
  Synthetic
gacugggauuaacaacggag

SEQ ID NO: 14927 - RNA, 20 nt, Artificial Sequence
  Synthetic
acugggauuaacaacggagg

SEQ ID NO: 14928 - RNA, 20 nt, Artificial Sequence
  Synthetic
cugggauuaacaacggagga

SEQ ID NO: 14929 - RNA, 20 nt, Artificial Sequence
  Synthetic
ugggauuaacaacggaggac

SEQ ID NO: 14930 - RNA, 20 nt, Artificial Sequence
  Synthetic
gggauuaacaacggaggaca

SEQ ID NO: 14931 - RNA, 20 nt, Artificial Sequence
  Synthetic
ggauuaacaacggaggacag

SEQ ID NO: 14932 - RNA, 20 nt, Artificial Sequence
  Synthetic
gauuaacaacggaggacagg

SEQ ID NO: 14933 - RNA, 20 nt, Artificial Sequence
  Synthetic
auuaacaacggaggacagga

SEQ ID NO: 14934 - RNA, 20 nt, Artificial Sequence
  Synthetic
uuaacaacggaggacaggac

SEQ ID NO: 14935 - RNA, 20 nt, Artificial Sequence
  Synthetic
uaacaacggaggacaggaca

SEQ ID NO: 14936 - RNA, 20 nt, Artificial Sequence
  Synthetic
aacaacggaggacaggacac

SEQ ID NO: 14937 - RNA, 20 nt, Artificial Sequence
  Synthetic
acaacggaggacaggacacu

SEQ ID NO: 14938 - RNA, 20 nt, Artificial Sequence
  Synthetic
caacggaggacaggacacuc

SEQ ID NO: 14939 - RNA, 20 nt, Artificial Sequence
  Synthetic
aacggaggacaggacacucu

SEQ ID NO: 14940 - RNA, 20 nt, Artificial Sequence
  Synthetic
acggaggacaggacacucuc

SEQ ID NO: 14941 - RNA, 20 nt, Artificial Sequence
  Synthetic
cggaggacaggacacucuca

SEQ ID NO: 14942 - RNA, 20 nt, Artificial Sequence
  Synthetic
ggaggacaggacacucucag

SEQ ID NO: 14943 - RNA, 20 nt, Artificial Sequence
  Synthetic
gaggacaggacacucucagg

SEQ ID NO: 14944 - RNA, 20 nt, Artificial Sequence
  Synthetic
aggacaggacacucucagga

SEQ ID NO: 14945 - RNA, 20 nt, Artificial Sequence
  Synthetic
ggacaggacacucucaggac

SEQ ID NO: 14946 - RNA, 20 nt, Artificial Sequence
  Synthetic
gacaggacacucucaggacu

SEQ ID NO: 14947 - RNA, 20 nt, Artificial Sequence
  Synthetic
acaggacacucucaggacuu

SEQ ID NO: 14948 - RNA, 20 nt, Artificial Sequence
  Synthetic
caggacacucucaggacuua

SEQ ID NO: 14949 - RNA, 20 nt, Artificial Sequence
  Synthetic
aggacacucucaggacuuac

SEQ ID NO: 14950 - RNA, 20 nt, Artificial Sequence
  Synthetic
ggacacucucaggacuuaca

SEQ ID NO: 14951 - RNA, 20 nt, Artificial Sequence
  Synthetic
gacacucucaggacuuacaa

SEQ ID NO: 14952 - RNA, 20 nt, Artificial Sequence
  Synthetic
acacucucaggacuuacaaa

SEQ ID NO: 14953 - RNA, 20 nt, Artificial Sequence
  Synthetic
cacucucaggacuuacaaau

SEQ ID NO: 14954 - RNA, 20 nt, Artificial Sequence
  Synthetic
acucucaggacuuacaaauu

SEQ ID NO: 14955 - RNA, 20 nt, Artificial Sequence
  Synthetic
cucucaggacuuacaaauua

SEQ ID NO: 14956 - RNA, 20 nt, Artificial Sequence
  Synthetic
ucucaggacuuacaaauuac

SEQ ID NO: 14957 - RNA, 20 nt, Artificial Sequence
  Synthetic
cucaggacuuacaaauuaca

SEQ ID NO: 14958 - RNA, 20 nt, Artificial Sequence
  Synthetic
ucaggacuuacaaauuacaa

SEQ ID NO: 14959 - RNA, 20 nt, Artificial Sequence
  Synthetic
caggacuuacaaauuacaac

SEQ ID NO: 14960 - RNA, 20 nt, Artificial Sequence
  Synthetic
aggacuuacaaauuacaacu

SEQ ID NO: 14961 - RNA, 20 nt, Artificial Sequence
  Synthetic
ggacuuacaaauuacaacug

SEQ ID NO: 14962 - RNA, 20 nt, Artificial Sequence
  Synthetic
gacuuacaaauuacaacugc

SEQ ID NO: 14963 - RNA, 20 nt, Artificial Sequence
  Synthetic
acuuacaaauuacaacugcu

SEQ ID NO: 14964 - RNA, 20 nt, Artificial Sequence
  Synthetic
cuuacaaauuacaacugcua

SEQ ID NO: 14965 - RNA, 20 nt, Artificial Sequence
  Synthetic
uuacaaauuacaacugcuau

SEQ ID NO: 14966 - RNA, 20 nt, Artificial Sequence
  Synthetic
uacaaauuacaacugcuauu

SEQ ID NO: 14967 - RNA, 20 nt, Artificial Sequence
  Synthetic
acaaauuacaacugcuauua

SEQ ID NO: 14968 - RNA, 20 nt, Artificial Sequence
  Synthetic
caaauuacaacugcuauuac

SEQ ID NO: 14969 - RNA, 20 nt, Artificial Sequence
  Synthetic
aaauuacaacugcuauuaca

SEQ ID NO: 14970 - RNA, 20 nt, Artificial Sequence
  Synthetic
aauuacaacugcuauuacag

SEQ ID NO: 14971 - RNA, 20 nt, Artificial Sequence
  Synthetic
auuacaacugcuauuacagc

SEQ ID NO: 14972 - RNA, 20 nt, Artificial Sequence
  Synthetic
uuacaacugcuauuacagcu

SEQ ID NO: 14973 - RNA, 20 nt, Artificial Sequence
  Synthetic
uacaacugcuauuacagcuc

SEQ ID NO: 14974 - RNA, 20 nt, Artificial Sequence
  Synthetic
acaacugcuauuacagcuca

SEQ ID NO: 14975 - RNA, 20 nt, Artificial Sequence
  Synthetic
caacugcuauuacagcucag

SEQ ID NO: 14976 - RNA, 20 nt, Artificial Sequence
  Synthetic
aacugcuauuacagcucagc

SEQ ID NO: 14977 - RNA, 20 nt, Artificial Sequence
  Synthetic
acugcuauuacagcucagca

SEQ ID NO: 14978 - RNA, 20 nt, Artificial Sequence
  Synthetic
cugcuauuacagcucagcau

SEQ ID NO: 14979 - RNA, 20 nt, Artificial Sequence
  Synthetic
ugcuauuacagcucagcauu

SEQ ID NO: 14980 - RNA, 20 nt, Artificial Sequence
  Synthetic
gcuauuacagcucagcauuu

SEQ ID NO: 14981 - RNA, 20 nt, Artificial Sequence
  Synthetic
cuauuacagcucagcauuuc

SEQ ID NO: 14982 - RNA, 20 nt, Artificial Sequence
  Synthetic
uauuacagcucagcauuuca

SEQ ID NO: 14983 - RNA, 20 nt, Artificial Sequence
  Synthetic
auuacagcucagcauuucaa

SEQ ID NO: 14984 - RNA, 20 nt, Artificial Sequence
  Synthetic
uuacagcucagcauuucaaa

SEQ ID NO: 14985 - RNA, 20 nt, Artificial Sequence
  Synthetic
uacagcucagcauuucaaau

SEQ ID NO: 14986 - RNA, 20 nt, Artificial Sequence
  Synthetic
acagcucagcauuucaaauu

SEQ ID NO: 14987 - RNA, 20 nt, Artificial Sequence
  Synthetic
cagcucagcauuucaaauuc

SEQ ID NO: 14988 - RNA, 20 nt, Artificial Sequence
  Synthetic
agcucagcauuucaaauuca

SEQ ID NO: 14989 - RNA, 20 nt, Artificial Sequence
  Synthetic
gcucagcauuucaaauucaa

SEQ ID NO: 14990 - RNA, 20 nt, Artificial Sequence
  Synthetic
cucagcauuucaaauucaag

SEQ ID NO: 14991 - RNA, 20 nt, Artificial Sequence
  Synthetic
ucagcauuucaaauucaaga

SEQ ID NO: 14992 - RNA, 20 nt, Artificial Sequence
  Synthetic
cagcauuucaaauucaagau

SEQ ID NO: 14993 - RNA, 20 nt, Artificial Sequence
  Synthetic
agcauuucaaauucaagaua

SEQ ID NO: 14994 - RNA, 20 nt, Artificial Sequence
  Synthetic
gcauuucaaauucaagauaa

SEQ ID NO: 14995 - RNA, 20 nt, Artificial Sequence
  Synthetic
cauuucaaauucaagauaau

SEQ ID NO: 14996 - RNA, 20 nt, Artificial Sequence
  Synthetic
auuucaaauucaagauaauu

SEQ ID NO: 14997 - RNA, 20 nt, Artificial Sequence
  Synthetic
uuucaaauucaagauaauuu

SEQ ID NO: 14998 - RNA, 20 nt, Artificial Sequence
  Synthetic
uucaaauucaagauaauuuc

SEQ ID NO: 14999 - RNA, 20 nt, Artificial Sequence
  Synthetic
ucaaauucaagauaauuucu

SEQ ID NO: 15000 - RNA, 20 nt, Artificial Sequence
  Synthetic
caaauucaagauaauuucuu

SEQ ID NO: 15001 - RNA, 20 nt, Artificial Sequence
  Synthetic
aaauucaagauaauuucuua

SEQ ID NO: 15002 - RNA, 20 nt, Artificial Sequence
  Synthetic
aauucaagauaauuucuuau

SEQ ID NO: 15003 - RNA, 20 nt, Artificial Sequence
  Synthetic
auucaagauaauuucuuauu

SEQ ID NO: 15004 - RNA, 20 nt, Artificial Sequence
  Synthetic
uucaagauaauuucuuauuc

SEQ ID NO: 15005 - RNA, 20 nt, Artificial Sequence
  Synthetic
ucaagauaauuucuuauuca

SEQ ID NO: 15006 - RNA, 20 nt, Artificial Sequence
  Synthetic
caagauaauuucuuauucaa

SEQ ID NO: 15007 - RNA, 20 nt, Artificial Sequence
  Synthetic
aagauaauuucuuauucaaa

SEQ ID NO: 15008 - RNA, 20 nt, Artificial Sequence
  Synthetic
agauaauuucuuauucaaau

SEQ ID NO: 15009 - RNA, 20 nt, Artificial Sequence
  Synthetic
gauaauuucuuauucaaaug

SEQ ID NO: 15010 - RNA, 20 nt, Artificial Sequence
  Synthetic
auaauuucuuauucaaaugu

SEQ ID NO: 15011 - RNA, 20 nt, Artificial Sequence
  Synthetic
uaauuucuuauucaaaugug

SEQ ID NO: 15012 - RNA, 20 nt, Artificial Sequence
  Synthetic
aauuucuuauucaaaugugg

SEQ ID NO: 15013 - RNA, 20 nt, Artificial Sequence
  Synthetic
auuucuuauucaaaugugga

SEQ ID NO: 15014 - RNA, 20 nt, Artificial Sequence
  Synthetic
uuucuuauucaaauguggac

SEQ ID NO: 15015 - RNA, 20 nt, Artificial Sequence
  Synthetic
uucuuauucaaauguggacc

SEQ ID NO: 15016 - RNA, 20 nt, Artificial Sequence
  Synthetic
ucuuauucaaauguggacca

SEQ ID NO: 15017 - RNA, 20 nt, Artificial Sequence
  Synthetic
cuuauucaaauguggaccaa

SEQ ID NO: 15018 - RNA, 20 nt, Artificial Sequence
  Synthetic
uuauucaaauguggaccaac

SEQ ID NO: 15019 - RNA, 20 nt, Artificial Sequence
  Synthetic
uauucaaauguggaccaaca

SEQ ID NO: 15020 - RNA, 20 nt, Artificial Sequence
  Synthetic
auucaaauguggaccaacag

SEQ ID NO: 15021 - RNA, 20 nt, Artificial Sequence
  Synthetic
uucaaauguggaccaacaga

SEQ ID NO: 15022 - RNA, 20 nt, Artificial Sequence
  Synthetic
ucaaauguggaccaacagau

SEQ ID NO: 15023 - RNA, 20 nt, Artificial Sequence
  Synthetic
caaauguggaccaacagaua

SEQ ID NO: 15024 - RNA, 20 nt, Artificial Sequence
  Synthetic
aaauguggaccaacagauaa

SEQ ID NO: 15025 - RNA, 20 nt, Artificial Sequence
  Synthetic
aauguggaccaacagauaac

SEQ ID NO: 15026 - RNA, 20 nt, Artificial Sequence
  Synthetic
auguggaccaacagauaacu

SEQ ID NO: 15027 - RNA, 20 nt, Artificial Sequence
  Synthetic
uguggaccaacagauaacug

SEQ ID NO: 15028 - RNA, 20 nt, Artificial Sequence
  Synthetic
guggaccaacagauaacuga

SEQ ID NO: 15029 - RNA, 20 nt, Artificial Sequence
  Synthetic
uggaccaacagauaacugaa

SEQ ID NO: 15030 - RNA, 20 nt, Artificial Sequence
  Synthetic
ggaccaacagauaacugaaa

SEQ ID NO: 15031 - RNA, 20 nt, Artificial Sequence
  Synthetic
gaccaacagauaacugaaaa

SEQ ID NO: 15032 - RNA, 20 nt, Artificial Sequence
  Synthetic
accaacagauaacugaaaau

SEQ ID NO: 15033 - RNA, 20 nt, Artificial Sequence
  Synthetic
ccaacagauaacugaaaauu

SEQ ID NO: 15034 - RNA, 20 nt, Artificial Sequence
  Synthetic
caacagauaacugaaaauuc

SEQ ID NO: 15035 - RNA, 20 nt, Artificial Sequence
  Synthetic
aacagauaacugaaaauuca

SEQ ID NO: 15036 - RNA, 20 nt, Artificial Sequence
  Synthetic
acagauaacugaaaauucag

SEQ ID NO: 15037 - RNA, 20 nt, Artificial Sequence
  Synthetic
cagauaacugaaaauucagu

SEQ ID NO: 15038 - RNA, 20 nt, Artificial Sequence
  Synthetic
agauaacugaaaauucaguu

SEQ ID NO: 15039 - RNA, 20 nt, Artificial Sequence
  Synthetic
gauaacugaaaauucaguuu

SEQ ID NO: 15040 - RNA, 20 nt, Artificial Sequence
  Synthetic
auaacugaaaauucaguuuc

SEQ ID NO: 15041 - RNA, 20 nt, Artificial Sequence
  Synthetic
uaacugaaaauucaguuuca

SEQ ID NO: 15042 - RNA, 20 nt, Artificial Sequence
  Synthetic
aacugaaaauucaguuucau

SEQ ID NO: 15043 - RNA, 20 nt, Artificial Sequence
  Synthetic
acugaaaauucaguuucaug

SEQ ID NO: 15044 - RNA, 20 nt, Artificial Sequence
  Synthetic
cugaaaauucaguuucauga

SEQ ID NO: 15045 - RNA, 20 nt, Artificial Sequence
  Synthetic
ugaaaauucaguuucaugag

SEQ ID NO: 15046 - RNA, 20 nt, Artificial Sequence
  Synthetic
gaaaauucaguuucaugaga

SEQ ID NO: 15047 - RNA, 20 nt, Artificial Sequence
  Synthetic
aaaauucaguuucaugagac

SEQ ID NO: 15048 - RNA, 20 nt, Artificial Sequence
  Synthetic
aaauucaguuucaugagacg

SEQ ID NO: 15049 - RNA, 20 nt, Artificial Sequence
  Synthetic
aauucaguuucaugagacgu

SEQ ID NO: 15050 - RNA, 20 nt, Artificial Sequence
  Synthetic
auucaguuucaugagacgua

SEQ ID NO: 15051 - RNA, 20 nt, Artificial Sequence
  Synthetic
uucaguuucaugagacguaa

SEQ ID NO: 15052 - RNA, 20 nt, Artificial Sequence
  Synthetic
ucaguuucaugagacguaag

SEQ ID NO: 15053 - RNA, 20 nt, Artificial Sequence
  Synthetic
caguuucaugagacguaagc

SEQ ID NO: 15054 - RNA, 20 nt, Artificial Sequence
  Synthetic
aguuucaugagacguaagca

SEQ ID NO: 15055 - RNA, 20 nt, Artificial Sequence
  Synthetic
guuucaugagacguaagcag

SEQ ID NO: 15056 - RNA, 20 nt, Artificial Sequence
  Synthetic
uuucaugagacguaagcagc

SEQ ID NO: 15057 - RNA, 20 nt, Artificial Sequence
  Synthetic
uucaugagacguaagcagcu

SEQ ID NO: 15058 - RNA, 20 nt, Artificial Sequence
  Synthetic
ucaugagacguaagcagcua

SEQ ID NO: 15059 - RNA, 20 nt, Artificial Sequence
  Synthetic
caugagacguaagcagcuag

SEQ ID NO: 15060 - RNA, 20 nt, Artificial Sequence
  Synthetic
augagacguaagcagcuaga

SEQ ID NO: 15061 - RNA, 20 nt, Artificial Sequence
  Synthetic
ugagacguaagcagcuagau

SEQ ID NO: 15062 - RNA, 20 nt, Artificial Sequence
  Synthetic
gagacguaagcagcuagaug

SEQ ID NO: 15063 - RNA, 20 nt, Artificial Sequence
  Synthetic
agacguaagcagcuagaugu

SEQ ID NO: 15064 - RNA, 20 nt, Artificial Sequence
  Synthetic
gacguaagcagcuagaugua

SEQ ID NO: 15065 - RNA, 20 nt, Artificial Sequence
  Synthetic
acguaagcagcuagauguaa

SEQ ID NO: 15066 - RNA, 20 nt, Artificial Sequence
  Synthetic
cguaagcagcuagauguaaa

SEQ ID NO: 15067 - RNA, 20 nt, Artificial Sequence
  Synthetic
guaagcagcuagauguaaag

SEQ ID NO: 15068 - RNA, 20 nt, Artificial Sequence
  Synthetic
uaagcagcuagauguaaagg

SEQ ID NO: 15069 - RNA, 20 nt, Artificial Sequence
  Synthetic
aagcagcuagauguaaaggg

SEQ ID NO: 15070 - RNA, 20 nt, Artificial Sequence
  Synthetic
agcagcuagauguaaagggg

SEQ ID NO: 15071 - RNA, 20 nt, Artificial Sequence
  Synthetic
gcagcuagauguaaagggga

SEQ ID NO: 15072 - RNA, 20 nt, Artificial Sequence
  Synthetic
cagcuagauguaaaggggau

SEQ ID NO: 15073 - RNA, 20 nt, Artificial Sequence
  Synthetic
agcuagauguaaaggggaua

SEQ ID NO: 15074 - RNA, 20 nt, Artificial Sequence
  Synthetic
gcuagauguaaaggggauaa

SEQ ID NO: 15075 - RNA, 20 nt, Artificial Sequence
  Synthetic
cuagauguaaaggggauaaa

SEQ ID NO: 15076 - RNA, 20 nt, Artificial Sequence
  Synthetic
uagauguaaaggggauaaag

SEQ ID NO: 15077 - RNA, 20 nt, Artificial Sequence
  Synthetic
agauguaaaggggauaaaga

SEQ ID NO: 15078 - RNA, 20 nt, Artificial Sequence
  Synthetic
gauguaaaggggauaaagag

SEQ ID NO: 15079 - RNA, 20 nt, Artificial Sequence
  Synthetic
auguaaaggggauaaagagg

SEQ ID NO: 15080 - RNA, 20 nt, Artificial Sequence
  Synthetic
uguaaaggggauaaagagga

SEQ ID NO: 15081 - RNA, 20 nt, Artificial Sequence
  Synthetic
guaaaggggauaaagaggac

SEQ ID NO: 15082 - RNA, 20 nt, Artificial Sequence
  Synthetic
uaaaggggauaaagaggaca

SEQ ID NO: 15083 - RNA, 20 nt, Artificial Sequence
  Synthetic
aaaggggauaaagaggacaa

SEQ ID NO: 15084 - RNA, 20 nt, Artificial Sequence
  Synthetic
aaggggauaaagaggacaaa

SEQ ID NO: 15085 - RNA, 20 nt, Artificial Sequence
  Synthetic
aggggauaaagaggacaaag

SEQ ID NO: 15086 - RNA, 20 nt, Artificial Sequence
  Synthetic
ggggauaaagaggacaaagu

SEQ ID NO: 15087 - RNA, 20 nt, Artificial Sequence
  Synthetic
gggauaaagaggacaaaguc

SEQ ID NO: 15088 - RNA, 20 nt, Artificial Sequence
  Synthetic
ggauaaagaggacaaaguca

SEQ ID NO: 15089 - RNA, 20 nt, Artificial Sequence
  Synthetic
gauaaagaggacaaagucau

SEQ ID NO: 15090 - RNA, 20 nt, Artificial Sequence
  Synthetic
auaaagaggacaaagucaug

SEQ ID NO: 15091 - RNA, 20 nt, Artificial Sequence
  Synthetic
uaaagaggacaaagucaugc

SEQ ID NO: 15092 - RNA, 20 nt, Artificial Sequence
  Synthetic
aaagaggacaaagucaugcg

SEQ ID NO: 15093 - RNA, 20 nt, Artificial Sequence
  Synthetic
aagaggacaaagucaugcgc

SEQ ID NO: 15094 - RNA, 20 nt, Artificial Sequence
  Synthetic
agaggacaaagucaugcgcu

SEQ ID NO: 15095 - RNA, 20 nt, Artificial Sequence
  Synthetic
gaggacaaagucaugcgcuu

SEQ ID NO: 15096 - RNA, 20 nt, Artificial Sequence
  Synthetic
aggacaaagucaugcgcuuu

SEQ ID NO: 15097 - RNA, 20 nt, Artificial Sequence
  Synthetic
ggacaaagucaugcgcuuuu

SEQ ID NO: 15098 - RNA, 20 nt, Artificial Sequence
  Synthetic
gacaaagucaugcgcuuuua

SEQ ID NO: 15099 - RNA, 20 nt, Artificial Sequence
  Synthetic
acaaagucaugcgcuuuuac

SEQ ID NO: 15100 - RNA, 20 nt, Artificial Sequence
  Synthetic
caaagucaugcgcuuuuaca

SEQ ID NO: 15101 - RNA, 20 nt, Artificial Sequence
  Synthetic
aaagucaugcgcuuuuacau

SEQ ID NO: 15102 - RNA, 20 nt, Artificial Sequence
  Synthetic
aagucaugcgcuuuuacauu

SEQ ID NO: 15103 - RNA, 20 nt, Artificial Sequence
  Synthetic
agucaugcgcuuuuacauuc

SEQ ID NO: 15104 - RNA, 20 nt, Artificial Sequence
  Synthetic
gucaugcgcuuuuacauucg

SEQ ID NO: 15105 - RNA, 20 nt, Artificial Sequence
  Synthetic
ucaugcgcuuuuacauucgg

SEQ ID NO: 15106 - RNA, 20 nt, Artificial Sequence
  Synthetic
caugcgcuuuuacauucgga

SEQ ID NO: 15107 - RNA, 20 nt, Artificial Sequence
  Synthetic
augcgcuuuuacauucggaa

SEQ ID NO: 15108 - RNA, 20 nt, Artificial Sequence
  Synthetic
ugcgcuuuuacauucggaau

SEQ ID NO: 15109 - RNA, 20 nt, Artificial Sequence
  Synthetic
gcgcuuuuacauucggaauu

SEQ ID NO: 15110 - RNA, 20 nt, Artificial Sequence
  Synthetic
cgcuuuuacauucggaauuc

SEQ ID NO: 15111 - RNA, 20 nt, Artificial Sequence
  Synthetic
gcuuuuacauucggaauucu

SEQ ID NO: 15112 - RNA, 20 nt, Artificial Sequence
  Synthetic
cuuuuacauucggaauucug

SEQ ID NO: 15113 - RNA, 20 nt, Artificial Sequence
  Synthetic
uuuuacauucggaauucugc

SEQ ID NO: 15114 - RNA, 20 nt, Artificial Sequence
  Synthetic
uuuacauucggaauucugca

SEQ ID NO: 15115 - RNA, 20 nt, Artificial Sequence
  Synthetic
uuacauucggaauucugcac

SEQ ID NO: 15116 - RNA, 20 nt, Artificial Sequence
  Synthetic
uacauucggaauucugcacu

SEQ ID NO: 15117 - RNA, 20 nt, Artificial Sequence
  Synthetic
acauucggaauucugcacuu

SEQ ID NO: 15118 - RNA, 20 nt, Artificial Sequence
  Synthetic
cauucggaauucugcacuuc

SEQ ID NO: 15119 - RNA, 20 nt, Artificial Sequence
  Synthetic
auucggaauucugcacuucc

SEQ ID NO: 15120 - RNA, 20 nt, Artificial Sequence
  Synthetic
uucggaauucugcacuucca

SEQ ID NO: 15121 - RNA, 20 nt, Artificial Sequence
  Synthetic
ucggaauucugcacuuccag

SEQ ID NO: 15122 - RNA, 20 nt, Artificial Sequence
  Synthetic
cggaauucugcacuuccagc

SEQ ID NO: 15123 - RNA, 20 nt, Artificial Sequence
  Synthetic
ggaauucugcacuuccagca

SEQ ID NO: 15124 - RNA, 20 nt, Artificial Sequence
  Synthetic
gaauucugcacuuccagcac

SEQ ID NO: 15125 - RNA, 20 nt, Artificial Sequence
  Synthetic
aauucugcacuuccagcaca

SEQ ID NO: 15126 - RNA, 20 nt, Artificial Sequence
  Synthetic
auucugcacuuccagcacag

SEQ ID NO: 15127 - RNA, 20 nt, Artificial Sequence
  Synthetic
uucugcacuuccagcacagu

SEQ ID NO: 15128 - RNA, 20 nt, Artificial Sequence
  Synthetic
ucugcacuuccagcacaguu

SEQ ID NO: 15129 - RNA, 20 nt, Artificial Sequence
  Synthetic
cugcacuuccagcacaguuc

SEQ ID NO: 15130 - RNA, 20 nt, Artificial Sequence
  Synthetic
ugcacuuccagcacaguucu

SEQ ID NO: 15131 - RNA, 20 nt, Artificial Sequence
  Synthetic
gcacuuccagcacaguucua

SEQ ID NO: 15132 - RNA, 20 nt, Artificial Sequence
  Synthetic
cacuuccagcacaguucuaa

SEQ ID NO: 15133 - RNA, 20 nt, Artificial Sequence
  Synthetic
acuuccagcacaguucuaaa

SEQ ID NO: 15134 - RNA, 20 nt, Artificial Sequence
  Synthetic
cuuccagcacaguucuaaac

SEQ ID NO: 15135 - RNA, 20 nt, Artificial Sequence
  Synthetic
uuccagcacaguucuaaaca

SEQ ID NO: 15136 - RNA, 20 nt, Artificial Sequence
  Synthetic
uccagcacaguucuaaacau

SEQ ID NO: 15137 - RNA, 20 nt, Artificial Sequence
  Synthetic
ccagcacaguucuaaacauc

SEQ ID NO: 15138 - RNA, 20 nt, Artificial Sequence
  Synthetic
cagcacaguucuaaacaucu

SEQ ID NO: 15139 - RNA, 20 nt, Artificial Sequence
  Synthetic
agcacaguucuaaacaucuu

SEQ ID NO: 15140 - RNA, 20 nt, Artificial Sequence
  Synthetic
gcacaguucuaaacaucuug

SEQ ID NO: 15141 - RNA, 20 nt, Artificial Sequence
  Synthetic
cacaguucuaaacaucuugu

SEQ ID NO: 15142 - RNA, 20 nt, Artificial Sequence
  Synthetic
acaguucuaaacaucuugua

SEQ ID NO: 15143 - RNA, 20 nt, Artificial Sequence
  Synthetic
caguucuaaacaucuuguau

SEQ ID NO: 15144 - RNA, 20 nt, Artificial Sequence
  Synthetic
aguucuaaacaucuuguauu

SEQ ID NO: 15145 - RNA, 20 nt, Artificial Sequence
  Synthetic
guucuaaacaucuuguauug

SEQ ID NO: 15146 - RNA, 20 nt, Artificial Sequence
  Synthetic
uucuaaacaucuuguauuga

SEQ ID NO: 15147 - RNA, 20 nt, Artificial Sequence
  Synthetic
ucuaaacaucuuguauugac

SEQ ID NO: 15148 - RNA, 20 nt, Artificial Sequence
  Synthetic
cuaaacaucuuguauugacu

SEQ ID NO: 15149 - RNA, 20 nt, Artificial Sequence
  Synthetic
uaaacaucuuguauugacuu

SEQ ID NO: 15150 - RNA, 20 nt, Artificial Sequence
  Synthetic
aaacaucuuguauugacuuu

SEQ ID NO: 15151 - RNA, 20 nt, Artificial Sequence
  Synthetic
aacaucuuguauugacuuug

SEQ ID NO: 15152 - RNA, 20 nt, Artificial Sequence
  Synthetic
acaucuuguauugacuuugg

SEQ ID NO: 15153 - RNA, 20 nt, Artificial Sequence
  Synthetic
caucuuguauugacuuugga

SEQ ID NO: 15154 - RNA, 20 nt, Artificial Sequence
  Synthetic
aucuuguauugacuuuggag

SEQ ID NO: 15155 - RNA, 20 nt, Artificial Sequence
  Synthetic
ucuuguauugacuuuggagg

SEQ ID NO: 15156 - RNA, 20 nt, Artificial Sequence
  Synthetic
cuuguauugacuuuggagga

SEQ ID NO: 15157 - RNA, 20 nt, Artificial Sequence
  Synthetic
uuguauugacuuuggaggag

SEQ ID NO: 15158 - RNA, 20 nt, Artificial Sequence
  Synthetic
uguauugacuuuggaggaga

SEQ ID NO: 15159 - RNA, 20 nt, Artificial Sequence
  Synthetic
guauugacuuuggaggagaa

SEQ ID NO: 15160 - RNA, 20 nt, Artificial Sequence
  Synthetic
uauugacuuuggaggagaau

SEQ ID NO: 15161 - RNA, 20 nt, Artificial Sequence
  Synthetic
auugacuuuggaggagaaug

SEQ ID NO: 15162 - RNA, 20 nt, Artificial Sequence
  Synthetic
uugacuuuggaggagaauga

SEQ ID NO: 15163 - RNA, 20 nt, Artificial Sequence
  Synthetic
ugacuuuggaggagaaugaa

SEQ ID NO: 15164 - RNA, 20 nt, Artificial Sequence
  Synthetic
gacuuuggaggagaaugaaa

SEQ ID NO: 15165 - RNA, 20 nt, Artificial Sequence
  Synthetic
acuuuggaggagaaugaaaa

SEQ ID NO: 15166 - RNA, 20 nt, Artificial Sequence
  Synthetic
cuuuggaggagaaugaaaau

SEQ ID NO: 15167 - RNA, 20 nt, Artificial Sequence
  Synthetic
uuuggaggagaaugaaaaua

SEQ ID NO: 15168 - RNA, 20 nt, Artificial Sequence
  Synthetic
uuggaggagaaugaaaauag

SEQ ID NO: 15169 - RNA, 20 nt, Artificial Sequence
  Synthetic
uggaggagaaugaaaauagu

SEQ ID NO: 15170 - RNA, 20 nt, Artificial Sequence
  Synthetic
ggaggagaaugaaaauagug

SEQ ID NO: 15171 - RNA, 20 nt, Artificial Sequence
  Synthetic
gaggagaaugaaaauaguga

SEQ ID NO: 15172 - RNA, 20 nt, Artificial Sequence
  Synthetic
aggagaaugaaaauagugaa

SEQ ID NO: 15173 - RNA, 20 nt, Artificial Sequence
  Synthetic
ggagaaugaaaauagugaag

SEQ ID NO: 15174 - RNA, 20 nt, Artificial Sequence
  Synthetic
gagaaugaaaauagugaagc

SEQ ID NO: 15175 - RNA, 20 nt, Artificial Sequence
  Synthetic
agaaugaaaauagugaagca

SEQ ID NO: 15176 - RNA, 20 nt, Artificial Sequence
  Synthetic
gaaugaaaauagugaagcaa

SEQ ID NO: 15177 - RNA, 20 nt, Artificial Sequence
  Synthetic
aaugaaaauagugaagcaag

SEQ ID NO: 15178 - RNA, 20 nt, Artificial Sequence
  Synthetic
augaaaauagugaagcaaga

SEQ ID NO: 15179 - RNA, 20 nt, Artificial Sequence
  Synthetic
ugaaaauagugaagcaagag

SEQ ID NO: 15180 - RNA, 20 nt, Artificial Sequence
  Synthetic
gaaaauagugaagcaagagu

SEQ ID NO: 15181 - RNA, 20 nt, Artificial Sequence
  Synthetic
aaaauagugaagcaagagug

SEQ ID NO: 15182 - RNA, 20 nt, Artificial Sequence
  Synthetic
aaauagugaagcaagagugg

SEQ ID NO: 15183 - RNA, 20 nt, Artificial Sequence
  Synthetic
aauagugaagcaagagugga

SEQ ID NO: 15184 - RNA, 20 nt, Artificial Sequence
  Synthetic
auagugaagcaagaguggau

SEQ ID NO: 15185 - RNA, 20 nt, Artificial Sequence
  Synthetic
uagugaagcaagaguggauu

SEQ ID NO: 15186 - RNA, 20 nt, Artificial Sequence
  Synthetic
agugaagcaagaguggauua

SEQ ID NO: 15187 - RNA, 20 nt, Artificial Sequence
  Synthetic
gugaagcaagaguggauuag

SEQ ID NO: 15188 - RNA, 20 nt, Artificial Sequence
  Synthetic
ugaagcaagaguggauuagu

SEQ ID NO: 15189 - RNA, 20 nt, Artificial Sequence
  Synthetic
gaagcaagaguggauuagua

SEQ ID NO: 15190 - RNA, 20 nt, Artificial Sequence
  Synthetic
aagcaagaguggauuaguaa

SEQ ID NO: 15191 - RNA, 20 nt, Artificial Sequence
  Synthetic
agcaagaguggauuaguaaa

SEQ ID NO: 15192 - RNA, 20 nt, Artificial Sequence
  Synthetic
gcaagaguggauuaguaaau

SEQ ID NO: 15193 - RNA, 20 nt, Artificial Sequence
  Synthetic
caagaguggauuaguaaaua

SEQ ID NO: 15194 - RNA, 20 nt, Artificial Sequence
  Synthetic
aagaguggauuaguaaauau

SEQ ID NO: 15195 - RNA, 20 nt, Artificial Sequence
  Synthetic
agaguggauuaguaaauaua

SEQ ID NO: 15196 - RNA, 20 nt, Artificial Sequence
  Synthetic
gaguggauuaguaaauauac

SEQ ID NO: 15197 - RNA, 20 nt, Artificial Sequence
  Synthetic
aguggauuaguaaauauacu

SEQ ID NO: 15198 - RNA, 20 nt, Artificial Sequence
  Synthetic
guggauuaguaaauauacuu

SEQ ID NO: 15199 - RNA, 20 nt, Artificial Sequence
  Synthetic
uggauuaguaaauauacuua

SEQ ID NO: 15200 - RNA, 20 nt, Artificial Sequence
  Synthetic
ggauuaguaaauauacuuaa

SEQ ID NO: 15201 - RNA, 20 nt, Artificial Sequence
  Synthetic
gauuaguaaauauacuuaaa

SEQ ID NO: 15202 - RNA, 20 nt, Artificial Sequence
  Synthetic
auuaguaaauauacuuaaau

SEQ ID NO: 15203 - RNA, 20 nt, Artificial Sequence
  Synthetic
uuaguaaauauacuuaaauc

SEQ ID NO: 15204 - RNA, 20 nt, Artificial Sequence
  Synthetic
uaguaaauauacuuaaaucg

SEQ ID NO: 15205 - RNA, 20 nt, Artificial Sequence
  Synthetic
aguaaauauacuuaaaucgc

SEQ ID NO: 15206 - RNA, 20 nt, Artificial Sequence
  Synthetic
guaaauauacuuaaaucgca

SEQ ID NO: 15207 - RNA, 20 nt, Artificial Sequence
  Synthetic
uaaauauacuuaaaucgcaa

SEQ ID NO: 15208 - RNA, 20 nt, Artificial Sequence
  Synthetic
aaauauacuuaaaucgcaau

SEQ ID NO: 15209 - RNA, 20 nt, Artificial Sequence
  Synthetic
aauauacuuaaaucgcaaua

SEQ ID NO: 15210 - RNA, 20 nt, Artificial Sequence
  Synthetic
auauacuuaaaucgcaauac

SEQ ID NO: 15211 - RNA, 20 nt, Artificial Sequence
  Synthetic
uauacuuaaaucgcaauacc

SEQ ID NO: 15212 - RNA, 20 nt, Artificial Sequence
  Synthetic
auacuuaaaucgcaauaccu

SEQ ID NO: 15213 - RNA, 20 nt, Artificial Sequence
  Synthetic
uacuuaaaucgcaauaccua

SEQ ID NO: 15214 - RNA, 20 nt, Artificial Sequence
  Synthetic
acuuaaaucgcaauaccuag

SEQ ID NO: 15215 - RNA, 20 nt, Artificial Sequence
  Synthetic
cuuaaaucgcaauaccuagg

SEQ ID NO: 15216 - RNA, 20 nt, Artificial Sequence
  Synthetic
uuaaaucgcaauaccuagga

SEQ ID NO: 15217 - RNA, 20 nt, Artificial Sequence
  Synthetic
uaaaucgcaauaccuaggag

SEQ ID NO: 15218 - RNA, 20 nt, Artificial Sequence
  Synthetic
aaaucgcaauaccuaggaga

SEQ ID NO: 15219 - RNA, 20 nt, Artificial Sequence
  Synthetic
aaucgcaauaccuaggagaa

SEQ ID NO: 15220 - RNA, 20 nt, Artificial Sequence
  Synthetic
aucgcaauaccuaggagaag

SEQ ID NO: 15221 - RNA, 20 nt, Artificial Sequence
  Synthetic
ucgcaauaccuaggagaaga

SEQ ID NO: 15222 - RNA, 20 nt, Artificial Sequence
  Synthetic
cgcaauaccuaggagaagag

SEQ ID NO: 15223 - RNA, 20 nt, Artificial Sequence
  Synthetic
gcaauaccuaggagaagagu

SEQ ID NO: 15224 - RNA, 20 nt, Artificial Sequence
  Synthetic
caauaccuaggagaagagug

SEQ ID NO: 15225 - RNA, 20 nt, Artificial Sequence
  Synthetic
aauaccuaggagaagagugu

SEQ ID NO: 15226 - RNA, 20 nt, Artificial Sequence
  Synthetic
auaccuaggagaagaguguu

SEQ ID NO: 15227 - RNA, 20 nt, Artificial Sequence
  Synthetic
uaccuaggagaagaguguuu

SEQ ID NO: 15228 - RNA, 20 nt, Artificial Sequence
  Synthetic
accuaggagaagaguguuug

SEQ ID NO: 15229 - RNA, 20 nt, Artificial Sequence
  Synthetic
ccuaggagaagaguguuugg

SEQ ID NO: 15230 - RNA, 20 nt, Artificial Sequence
  Synthetic
cuaggagaagaguguuuggc

SEQ ID NO: 15231 - RNA, 20 nt, Artificial Sequence
  Synthetic
uaggagaagaguguuuggcu

SEQ ID NO: 15232 - RNA, 20 nt, Artificial Sequence
  Synthetic
aggagaagaguguuuggcug

SEQ ID NO: 15233 - RNA, 20 nt, Artificial Sequence
  Synthetic
ggagaagaguguuuggcuga

SEQ ID NO: 15234 - RNA, 20 nt, Artificial Sequence
  Synthetic
gagaagaguguuuggcugaa

SEQ ID NO: 15235 - RNA, 20 nt, Artificial Sequence
  Synthetic
agaagaguguuuggcugaac

SEQ ID NO: 15236 - RNA, 20 nt, Artificial Sequence
  Synthetic
gaagaguguuuggcugaacu

SEQ ID NO: 15237 - RNA, 20 nt, Artificial Sequence
  Synthetic
aagaguguuuggcugaacug

SEQ ID NO: 15238 - RNA, 20 nt, Artificial Sequence
  Synthetic
agaguguuuggcugaacuga

SEQ ID NO: 15239 - RNA, 20 nt, Artificial Sequence
  Synthetic
gaguguuuggcugaacugaa

SEQ ID NO: 15240 - RNA, 20 nt, Artificial Sequence
  Synthetic
aguguuuggcugaacugaaa

SEQ ID NO: 15241 - RNA, 20 nt, Artificial Sequence
  Synthetic
guguuuggcugaacugaaau

SEQ ID NO: 15242 - RNA, 20 nt, Artificial Sequence
  Synthetic
uguuuggcugaacugaaaua

SEQ ID NO: 15243 - RNA, 20 nt, Artificial Sequence
  Synthetic
guuuggcugaacugaaauac

SEQ ID NO: 15244 - RNA, 20 nt, Artificial Sequence
  Synthetic
uuuggcugaacugaaauacu

SEQ ID NO: 15245 - RNA, 20 nt, Artificial Sequence
  Synthetic
uuggcugaacugaaauacuu

SEQ ID NO: 15246 - RNA, 20 nt, Artificial Sequence
  Synthetic
uggcugaacugaaauacuuu

SEQ ID NO: 15247 - RNA, 20 nt, Artificial Sequence
  Synthetic
ggcugaacugaaauacuuuu

SEQ ID NO: 15248 - RNA, 20 nt, Artificial Sequence
  Synthetic
gcugaacugaaauacuuuua

SEQ ID NO: 15249 - RNA, 20 nt, Artificial Sequence
  Synthetic
cugaacugaaauacuuuuaa

SEQ ID NO: 15250 - RNA, 20 nt, Artificial Sequence
  Synthetic
ugaacugaaauacuuuuaac

SEQ ID NO: 15251 - RNA, 20 nt, Artificial Sequence
  Synthetic
gaacugaaauacuuuuaaca

SEQ ID NO: 15252 - RNA, 20 nt, Artificial Sequence
  Synthetic
aacugaaauacuuuuaacac

SEQ ID NO: 15253 - RNA, 20 nt, Artificial Sequence
  Synthetic
acugaaauacuuuuaacaca

SEQ ID NO: 15254 - RNA, 20 nt, Artificial Sequence
  Synthetic
cugaaauacuuuuaacacac

SEQ ID NO: 15255 - RNA, 20 nt, Artificial Sequence
  Synthetic
ugaaauacuuuuaacacaca

SEQ ID NO: 15256 - RNA, 20 nt, Artificial Sequence
  Synthetic
gaaauacuuuuaacacacag

SEQ ID NO: 15257 - RNA, 20 nt, Artificial Sequence
  Synthetic
aaauacuuuuaacacacagu

SEQ ID NO: 15258 - RNA, 20 nt, Artificial Sequence
  Synthetic
aauacuuuuaacacacagug

SEQ ID NO: 15259 - RNA, 20 nt, Artificial Sequence
  Synthetic
auacuuuuaacacacagugc

SEQ ID NO: 15260 - RNA, 20 nt, Artificial Sequence
  Synthetic
uacuuuuaacacacagugca

SEQ ID NO: 15261 - RNA, 20 nt, Artificial Sequence
  Synthetic
acuuuuaacacacagugcag

SEQ ID NO: 15262 - RNA, 20 nt, Artificial Sequence
  Synthetic
cuuuuaacacacagugcagu

SEQ ID NO: 15263 - RNA, 20 nt, Artificial Sequence
  Synthetic
uuuuaacacacagugcaguu

SEQ ID NO: 15264 - RNA, 20 nt, Artificial Sequence
  Synthetic
uuuaacacacagugcaguua

SEQ ID NO: 15265 - RNA, 20 nt, Artificial Sequence
  Synthetic
uuaacacacagugcaguuac

SEQ ID NO: 15266 - RNA, 20 nt, Artificial Sequence
  Synthetic
uaacacacagugcaguuaca

SEQ ID NO: 15267 - RNA, 20 nt, Artificial Sequence
  Synthetic
aacacacagugcaguuacau

SEQ ID NO: 15268 - RNA, 20 nt, Artificial Sequence
  Synthetic
acacacagugcaguuacaug

SEQ ID NO: 15269 - RNA, 20 nt, Artificial Sequence
  Synthetic
cacacagugcaguuacauga

SEQ ID NO: 15270 - RNA, 20 nt, Artificial Sequence
  Synthetic
acacagugcaguuacaugag

SEQ ID NO: 15271 - RNA, 20 nt, Artificial Sequence
  Synthetic
cacagugcaguuacaugagu

SEQ ID NO: 15272 - RNA, 20 nt, Artificial Sequence
  Synthetic
acagugcaguuacaugagug

SEQ ID NO: 15273 - RNA, 20 nt, Artificial Sequence
  Synthetic
cagugcaguuacaugaguga

SEQ ID NO: 15274 - RNA, 20 nt, Artificial Sequence
  Synthetic
agugcaguuacaugagugac

SEQ ID NO: 15275 - RNA, 20 nt, Artificial Sequence
  Synthetic
gugcaguuacaugagugacu

SEQ ID NO: 15276 - RNA, 20 nt, Artificial Sequence
  Synthetic
ugcaguuacaugagugacuu

SEQ ID NO: 15277 - RNA, 20 nt, Artificial Sequence
  Synthetic
gcaguuacaugagugacuua

SEQ ID NO: 15278 - RNA, 20 nt, Artificial Sequence
  Synthetic
caguuacaugagugacuuaa

SEQ ID NO: 15279 - RNA, 20 nt, Artificial Sequence
  Synthetic
aguuacaugagugacuuaag

SEQ ID NO: 15280 - RNA, 20 nt, Artificial Sequence
  Synthetic
guuacaugagugacuuaagg

SEQ ID NO: 15281 - RNA, 20 nt, Artificial Sequence
  Synthetic
uuacaugagugacuuaaggg

SEQ ID NO: 15282 - RNA, 20 nt, Artificial Sequence
  Synthetic
uacaugagugacuuaagggu

SEQ ID NO: 15283 - RNA, 20 nt, Artificial Sequence
  Synthetic
acaugagugacuuaaggguu

SEQ ID NO: 15284 - RNA, 20 nt, Artificial Sequence
  Synthetic
caugagugacuuaaggguuc

SEQ ID NO: 15285 - RNA, 20 nt, Artificial Sequence
  Synthetic
augagugacuuaaggguucu

SEQ ID NO: 15286 - RNA, 20 nt, Artificial Sequence
  Synthetic
ugagugacuuaaggguucuu

SEQ ID NO: 15287 - RNA, 20 nt, Artificial Sequence
  Synthetic
gagugacuuaaggguucuua

SEQ ID NO: 15288 - RNA, 20 nt, Artificial Sequence
  Synthetic
agugacuuaaggguucuuau

SEQ ID NO: 15289 - RNA, 20 nt, Artificial Sequence
  Synthetic
gugacuuaaggguucuuauc

SEQ ID NO: 15290 - RNA, 20 nt, Artificial Sequence
  Synthetic
ugacuuaaggguucuuaucu

SEQ ID NO: 15291 - RNA, 20 nt, Artificial Sequence
  Synthetic
gacuuaaggguucuuaucuc

SEQ ID NO: 15292 - RNA, 20 nt, Artificial Sequence
  Synthetic
acuuaaggguucuuaucucu

SEQ ID NO: 15293 - RNA, 20 nt, Artificial Sequence
  Synthetic
cuuaaggguucuuaucucug

SEQ ID NO: 15294 - RNA, 20 nt, Artificial Sequence
  Synthetic
uuaaggguucuuaucucugg

SEQ ID NO: 15295 - RNA, 20 nt, Artificial Sequence
  Synthetic
uaaggguucuuaucucugga

SEQ ID NO: 15296 - RNA, 20 nt, Artificial Sequence
  Synthetic
aaggguucuuaucucuggac

SEQ ID NO: 15297 - RNA, 20 nt, Artificial Sequence
  Synthetic
aggguucuuaucucuggacu

SEQ ID NO: 15298 - RNA, 20 nt, Artificial Sequence
  Synthetic
ggguucuuaucucuggacuu

SEQ ID NO: 15299 - RNA, 20 nt, Artificial Sequence
  Synthetic
gguucuuaucucuggacuuu

SEQ ID NO: 15300 - RNA, 20 nt, Artificial Sequence
  Synthetic
guucuuaucucuggacuuug

SEQ ID NO: 15301 - RNA, 20 nt, Artificial Sequence
  Synthetic
uucuuaucucuggacuuuga

SEQ ID NO: 15302 - RNA, 20 nt, Artificial Sequence
  Synthetic
ucuuaucucuggacuuugag

SEQ ID NO: 15303 - RNA, 20 nt, Artificial Sequence
  Synthetic
cuuaucucuggacuuugagu

SEQ ID NO: 15304 - RNA, 20 nt, Artificial Sequence
  Synthetic
uuaucucuggacuuugaguu

SEQ ID NO: 15305 - RNA, 20 nt, Artificial Sequence
  Synthetic
uaucucuggacuuugaguuu

SEQ ID NO: 15306 - RNA, 20 nt, Artificial Sequence
  Synthetic
aucucuggacuuugaguuuu

SEQ ID NO: 15307 - RNA, 20 nt, Artificial Sequence
  Synthetic
ucucuggacuuugaguuuug

SEQ ID NO: 15308 - RNA, 20 nt, Artificial Sequence
  Synthetic
cucuggacuuugaguuuugg

SEQ ID NO: 15309 - RNA, 20 nt, Artificial Sequence
  Synthetic
ucuggacuuugaguuuuggc

SEQ ID NO: 15310 - RNA, 20 nt, Artificial Sequence
  Synthetic
cuggacuuugaguuuuggcc

SEQ ID NO: 15311 - RNA, 20 nt, Artificial Sequence
  Synthetic
uggacuuugaguuuuggccu

SEQ ID NO: 15312 - RNA, 20 nt, Artificial Sequence
  Synthetic
ggacuuugaguuuuggccua

SEQ ID NO: 15313 - RNA, 20 nt, Artificial Sequence
  Synthetic
gacuuugaguuuuggccuaa

SEQ ID NO: 15314 - RNA, 20 nt, Artificial Sequence
  Synthetic
acuuugaguuuuggccuaaa

SEQ ID NO: 15315 - RNA, 20 nt, Artificial Sequence
  Synthetic
cuuugaguuuuggccuaaaa

SEQ ID NO: 15316 - RNA, 20 nt, Artificial Sequence
  Synthetic
uuugaguuuuggccuaaaau

SEQ ID NO: 15317 - RNA, 20 nt, Artificial Sequence
  Synthetic
uugaguuuuggccuaaaaug

SEQ ID NO: 15318 - RNA, 20 nt, Artificial Sequence
  Synthetic
ugaguuuuggccuaaaauga

SEQ ID NO: 15319 - RNA, 20 nt, Artificial Sequence
  Synthetic
gaguuuuggccuaaaaugau

SEQ ID NO: 15320 - RNA, 20 nt, Artificial Sequence
  Synthetic
aguuuuggccuaaaaugaug

SEQ ID NO: 15321 - RNA, 20 nt, Artificial Sequence
  Synthetic
guuuuggccuaaaaugaugu

SEQ ID NO: 15322 - RNA, 20 nt, Artificial Sequence
  Synthetic
uuuuggccuaaaaugaugua

SEQ ID NO: 15323 - RNA, 20 nt, Artificial Sequence
  Synthetic
uuuggccuaaaaugauguaa

SEQ ID NO: 15324 - RNA, 20 nt, Artificial Sequence
  Synthetic
uuggccuaaaaugauguaau

SEQ ID NO: 15325 - RNA, 20 nt, Artificial Sequence
  Synthetic
uggccuaaaaugauguaaug

SEQ ID NO: 15326 - RNA, 20 nt, Artificial Sequence
  Synthetic
ggccuaaaaugauguaauga

SEQ ID NO: 15327 - RNA, 20 nt, Artificial Sequence
  Synthetic
gccuaaaaugauguaaugau

SEQ ID NO: 15328 - RNA, 20 nt, Artificial Sequence
  Synthetic
ccuaaaaugauguaaugaug

SEQ ID NO: 15329 - RNA, 20 nt, Artificial Sequence
  Synthetic
cuaaaaugauguaaugaugu

SEQ ID NO: 15330 - RNA, 20 nt, Artificial Sequence
  Synthetic
uaaaaugauguaaugauguu

SEQ ID NO: 15331 - RNA, 20 nt, Artificial Sequence
  Synthetic
aaaaugauguaaugauguug

SEQ ID NO: 15332 - RNA, 20 nt, Artificial Sequence
  Synthetic
aaaugauguaaugauguugc

SEQ ID NO: 15333 - RNA, 20 nt, Artificial Sequence
  Synthetic
aaugauguaaugauguugcu

SEQ ID NO: 15334 - RNA, 20 nt, Artificial Sequence
  Synthetic
augauguaaugauguugcua

SEQ ID NO: 15335 - RNA, 20 nt, Artificial Sequence
  Synthetic
ugauguaaugauguugcuaa

SEQ ID NO: 15336 - RNA, 20 nt, Artificial Sequence
  Synthetic
gauguaaugauguugcuaaa

SEQ ID NO: 15337 - RNA, 20 nt, Artificial Sequence
  Synthetic
auguaaugauguugcuaaaa

SEQ ID NO: 15338 - RNA, 20 nt, Artificial Sequence
  Synthetic
uguaaugauguugcuaaaaa

SEQ ID NO: 15339 - RNA, 20 nt, Artificial Sequence
  Synthetic
guaaugauguugcuaaaaag

SEQ ID NO: 15340 - RNA, 20 nt, Artificial Sequence
  Synthetic
uaaugauguugcuaaaaaga

SEQ ID NO: 15341 - RNA, 20 nt, Artificial Sequence
  Synthetic
aaugauguugcuaaaaagac

SEQ ID NO: 15342 - RNA, 20 nt, Artificial Sequence
  Synthetic
augauguugcuaaaaagaca

SEQ ID NO: 15343 - RNA, 20 nt, Artificial Sequence
  Synthetic
ugauguugcuaaaaagacau

SEQ ID NO: 15344 - RNA, 20 nt, Artificial Sequence
  Synthetic
gauguugcuaaaaagacauu

SEQ ID NO: 15345 - RNA, 20 nt, Artificial Sequence
  Synthetic
auguugcuaaaaagacauug

SEQ ID NO: 15346 - RNA, 20 nt, Artificial Sequence
  Synthetic
uguugcuaaaaagacauugu

SEQ ID NO: 15347 - RNA, 20 nt, Artificial Sequence
  Synthetic
guugcuaaaaagacauuguu

SEQ ID NO: 15348 - RNA, 20 nt, Artificial Sequence
  Synthetic
uugcuaaaaagacauuguua

SEQ ID NO: 15349 - RNA, 20 nt, Artificial Sequence
  Synthetic
ugcuaaaaagacauuguuaa

SEQ ID NO: 15350 - RNA, 20 nt, Artificial Sequence
  Synthetic
gcuaaaaagacauuguuaaa

SEQ ID NO: 15351 - RNA, 20 nt, Artificial Sequence
  Synthetic
cuaaaaagacauuguuaaag

SEQ ID NO: 15352 - RNA, 20 nt, Artificial Sequence
  Synthetic
uaaaaagacauuguuaaaga

SEQ ID NO: 15353 - RNA, 20 nt, Artificial Sequence
  Synthetic
aaaaagacauuguuaaagaa

SEQ ID NO: 15354 - RNA, 20 nt, Artificial Sequence
  Synthetic
aaaagacauuguuaaagaac

SEQ ID NO: 15355 - RNA, 20 nt, Artificial Sequence
  Synthetic
aaagacauuguuaaagaacu

SEQ ID NO: 15356 - RNA, 20 nt, Artificial Sequence
  Synthetic
aagacauuguuaaagaacuu

SEQ ID NO: 15357 - RNA, 20 nt, Artificial Sequence
  Synthetic
agacauuguuaaagaacuua

SEQ ID NO: 15358 - RNA, 20 nt, Artificial Sequence
  Synthetic
gacauuguuaaagaacuuaa

SEQ ID NO: 15359 - RNA, 20 nt, Artificial Sequence
  Synthetic
acauuguuaaagaacuuaaa

SEQ ID NO: 15360 - RNA, 20 nt, Artificial Sequence
  Synthetic
cauuguuaaagaacuuaaag

SEQ ID NO: 15361 - RNA, 20 nt, Artificial Sequence
  Synthetic
auuguuaaagaacuuaaagc

SEQ ID NO: 15362 - RNA, 20 nt, Artificial Sequence
  Synthetic
uuguuaaagaacuuaaagcc

SEQ ID NO: 15363 - RNA, 20 nt, Artificial Sequence
  Synthetic
uguuaaagaacuuaaagccg

SEQ ID NO: 15364 - RNA, 20 nt, Artificial Sequence
  Synthetic
guuaaagaacuuaaagccga

SEQ ID NO: 15365 - RNA, 20 nt, Artificial Sequence
  Synthetic
uuaaagaacuuaaagccgaa

SEQ ID NO: 15366 - RNA, 20 nt, Artificial Sequence
  Synthetic
uaaagaacuuaaagccgaaa

SEQ ID NO: 15367 - RNA, 20 nt, Artificial Sequence
  Synthetic
aaagaacuuaaagccgaaac

SEQ ID NO: 15368 - RNA, 20 nt, Artificial Sequence
  Synthetic
aagaacuuaaagccgaaaca

SEQ ID NO: 15369 - RNA, 20 nt, Artificial Sequence
  Synthetic
agaacuuaaagccgaaacag

SEQ ID NO: 15370 - RNA, 20 nt, Artificial Sequence
  Synthetic
gaacuuaaagccgaaacagc

SEQ ID NO: 15371 - RNA, 20 nt, Artificial Sequence
  Synthetic
aacuuaaagccgaaacagcu

SEQ ID NO: 15372 - RNA, 20 nt, Artificial Sequence
  Synthetic
acuuaaagccgaaacagcuc

SEQ ID NO: 15373 - RNA, 20 nt, Artificial Sequence
  Synthetic
cuuaaagccgaaacagcuca

SEQ ID NO: 15374 - RNA, 20 nt, Artificial Sequence
  Synthetic
uuaaagccgaaacagcucag

SEQ ID NO: 15375 - RNA, 20 nt, Artificial Sequence
  Synthetic
uaaagccgaaacagcucagc

SEQ ID NO: 15376 - RNA, 20 nt, Artificial Sequence
  Synthetic
aaagccgaaacagcucagca

SEQ ID NO: 15377 - RNA, 20 nt, Artificial Sequence
  Synthetic
aagccgaaacagcucagcag

SEQ ID NO: 15378 - RNA, 20 nt, Artificial Sequence
  Synthetic
agccgaaacagcucagcagg

SEQ ID NO: 15379 - RNA, 20 nt, Artificial Sequence
  Synthetic
gccgaaacagcucagcagga

SEQ ID NO: 15380 - RNA, 20 nt, Artificial Sequence
  Synthetic
ccgaaacagcucagcaggau

SEQ ID NO: 15381 - RNA, 20 nt, Artificial Sequence
  Synthetic
cgaaacagcucagcaggaug

SEQ ID NO: 15382 - RNA, 20 nt, Artificial Sequence
  Synthetic
gaaacagcucagcaggauga

SEQ ID NO: 15383 - RNA, 20 nt, Artificial Sequence
  Synthetic
aaacagcucagcaggaugaa

SEQ ID NO: 15384 - RNA, 20 nt, Artificial Sequence
  Synthetic
aacagcucagcaggaugaau

SEQ ID NO: 15385 - RNA, 20 nt, Artificial Sequence
  Synthetic
acagcucagcaggaugaaug

SEQ ID NO: 15386 - RNA, 20 nt, Artificial Sequence
  Synthetic
cagcucagcaggaugaauga

SEQ ID NO: 15387 - RNA, 20 nt, Artificial Sequence
  Synthetic
agcucagcaggaugaaugaa

SEQ ID NO: 15388 - RNA, 20 nt, Artificial Sequence
  Synthetic
gcucagcaggaugaaugaag

SEQ ID NO: 15389 - RNA, 20 nt, Artificial Sequence
  Synthetic
cucagcaggaugaaugaaga

SEQ ID NO: 15390 - RNA, 20 nt, Artificial Sequence
  Synthetic
ucagcaggaugaaugaagau

SEQ ID NO: 15391 - RNA, 20 nt, Artificial Sequence
  Synthetic
cagcaggaugaaugaagaug

SEQ ID NO: 15392 - RNA, 20 nt, Artificial Sequence
  Synthetic
agcaggaugaaugaagauga

SEQ ID NO: 15393 - RNA, 20 nt, Artificial Sequence
  Synthetic
gcaggaugaaugaagaugaa

SEQ ID NO: 15394 - RNA, 20 nt, Artificial Sequence
  Synthetic
caggaugaaugaagaugaag

SEQ ID NO: 15395 - RNA, 20 nt, Artificial Sequence
  Synthetic
aggaugaaugaagaugaagg

SEQ ID NO: 15396 - RNA, 20 nt, Artificial Sequence
  Synthetic
ggaugaaugaagaugaaggu

SEQ ID NO: 15397 - RNA, 20 nt, Artificial Sequence
  Synthetic
gaugaaugaagaugaaggua

SEQ ID NO: 15398 - RNA, 20 nt, Artificial Sequence
  Synthetic
augaaugaagaugaagguac

SEQ ID NO: 15399 - RNA, 20 nt, Artificial Sequence
  Synthetic
ugaaugaagaugaagguacu

SEQ ID NO: 15400 - RNA, 20 nt, Artificial Sequence
  Synthetic
gaaugaagaugaagguacug

SEQ ID NO: 15401 - RNA, 20 nt, Artificial Sequence
  Synthetic
aaugaagaugaagguacugg

SEQ ID NO: 15402 - RNA, 20 nt, Artificial Sequence
  Synthetic
augaagaugaagguacuggc

SEQ ID NO: 15403 - RNA, 20 nt, Artificial Sequence
  Synthetic
ugaagaugaagguacuggcu

SEQ ID NO: 15404 - RNA, 20 nt, Artificial Sequence
  Synthetic
gaagaugaagguacuggcua

SEQ ID NO: 15405 - RNA, 20 nt, Artificial Sequence
  Synthetic
aagaugaagguacuggcuau

SEQ ID NO: 15406 - RNA, 20 nt, Artificial Sequence
  Synthetic
agaugaagguacuggcuauc

SEQ ID NO: 15407 - RNA, 20 nt, Artificial Sequence
  Synthetic
gaugaagguacuggcuaucc

SEQ ID NO: 15408 - RNA, 20 nt, Artificial Sequence
  Synthetic
augaagguacuggcuauccc

SEQ ID NO: 15409 - RNA, 20 nt, Artificial Sequence
  Synthetic
ugaagguacuggcuauccca

SEQ ID NO: 15410 - RNA, 20 nt, Artificial Sequence
  Synthetic
gaagguacuggcuaucccaa

SEQ ID NO: 15411 - RNA, 20 nt, Artificial Sequence
  Synthetic
aagguacuggcuaucccaag

SEQ ID NO: 15412 - RNA, 20 nt, Artificial Sequence
  Synthetic
agguacuggcuaucccaagg

SEQ ID NO: 15413 - RNA, 20 nt, Artificial Sequence
  Synthetic
gguacuggcuaucccaagga

SEQ ID NO: 15414 - RNA, 20 nt, Artificial Sequence
  Synthetic
guacuggcuaucccaaggag

SEQ ID NO: 15415 - RNA, 20 nt, Artificial Sequence
  Synthetic
uacuggcuaucccaaggagc

SEQ ID NO: 15416 - RNA, 20 nt, Artificial Sequence
  Synthetic
acuggcuaucccaaggagcc

SEQ ID NO: 15417 - RNA, 20 nt, Artificial Sequence
  Synthetic
cuggcuaucccaaggagccc

SEQ ID NO: 15418 - RNA, 20 nt, Artificial Sequence
  Synthetic
uggcuaucccaaggagccca

SEQ ID NO: 15419 - RNA, 20 nt, Artificial Sequence
  Synthetic
ggcuaucccaaggagcccau

SEQ ID NO: 15420 - RNA, 20 nt, Artificial Sequence
  Synthetic
gcuaucccaaggagcccauu

SEQ ID NO: 15421 - RNA, 20 nt, Artificial Sequence
  Synthetic
cuaucccaaggagcccauuc

SEQ ID NO: 15422 - RNA, 20 nt, Artificial Sequence
  Synthetic
uaucccaaggagcccauuca

SEQ ID NO: 15423 - RNA, 20 nt, Artificial Sequence
  Synthetic
aucccaaggagcccauucaa

SEQ ID NO: 15424 - RNA, 20 nt, Artificial Sequence
  Synthetic
ucccaaggagcccauucaac

SEQ ID NO: 15425 - RNA, 20 nt, Artificial Sequence
  Synthetic
cccaaggagcccauucaaca

SEQ ID NO: 15426 - RNA, 20 nt, Artificial Sequence
  Synthetic
ccaaggagcccauucaacag

SEQ ID NO: 15427 - RNA, 20 nt, Artificial Sequence
  Synthetic
caaggagcccauucaacagc

SEQ ID NO: 15428 - RNA, 20 nt, Artificial Sequence
  Synthetic
aaggagcccauucaacagca

SEQ ID NO: 15429 - RNA, 20 nt, Artificial Sequence
  Synthetic
aggagcccauucaacagcag

SEQ ID NO: 15430 - RNA, 20 nt, Artificial Sequence
  Synthetic
ggagcccauucaacagcagc

SEQ ID NO: 15431 - RNA, 20 nt, Artificial Sequence
  Synthetic
gagcccauucaacagcagcu

SEQ ID NO: 15432 - RNA, 20 nt, Artificial Sequence
  Synthetic
agcccauucaacagcagcuu

SEQ ID NO: 15433 - RNA, 20 nt, Artificial Sequence
  Synthetic
gcccauucaacagcagcuua

SEQ ID NO: 15434 - RNA, 20 nt, Artificial Sequence
  Synthetic
cccauucaacagcagcuuac

SEQ ID NO: 15435 - RNA, 20 nt, Artificial Sequence
  Synthetic
ccauucaacagcagcuuacc

SEQ ID NO: 15436 - RNA, 20 nt, Artificial Sequence
  Synthetic
cauucaacagcagcuuaccu

SEQ ID NO: 15437 - RNA, 20 nt, Artificial Sequence
  Synthetic
auucaacagcagcuuaccuc

SEQ ID NO: 15438 - RNA, 20 nt, Artificial Sequence
  Synthetic
uucaacagcagcuuaccucu

SEQ ID NO: 15439 - RNA, 20 nt, Artificial Sequence
  Synthetic
ucaacagcagcuuaccucuu

SEQ ID NO: 15440 - RNA, 20 nt, Artificial Sequence
  Synthetic
caacagcagcuuaccucuuc

SEQ ID NO: 15441 - RNA, 20 nt, Artificial Sequence
  Synthetic
aacagcagcuuaccucuucu

SEQ ID NO: 15442 - RNA, 20 nt, Artificial Sequence
  Synthetic
acagcagcuuaccucuucuc

SEQ ID NO: 15443 - RNA, 20 nt, Artificial Sequence
  Synthetic
cagcagcuuaccucuucuca

SEQ ID NO: 15444 - RNA, 20 nt, Artificial Sequence
  Synthetic
agcagcuuaccucuucucag

SEQ ID NO: 15445 - RNA, 20 nt, Artificial Sequence
  Synthetic
gcagcuuaccucuucucagc

SEQ ID NO: 15446 - RNA, 20 nt, Artificial Sequence
  Synthetic
cagcuuaccucuucucagcu

SEQ ID NO: 15447 - RNA, 20 nt, Artificial Sequence
  Synthetic
agcuuaccucuucucagcuc

SEQ ID NO: 15448 - RNA, 20 nt, Artificial Sequence
  Synthetic
gcuuaccucuucucagcucc

SEQ ID NO: 15449 - RNA, 20 nt, Artificial Sequence
  Synthetic
cuuaccucuucucagcucca

SEQ ID NO: 15450 - RNA, 20 nt, Artificial Sequence
  Synthetic
uuaccucuucucagcuccau

SEQ ID NO: 15451 - RNA, 20 nt, Artificial Sequence
  Synthetic
uaccucuucucagcuccaua

SEQ ID NO: 15452 - RNA, 20 nt, Artificial Sequence
  Synthetic
accucuucucagcuccauau

SEQ ID NO: 15453 - RNA, 20 nt, Artificial Sequence
  Synthetic
ccucuucucagcuccauauu

SEQ ID NO: 15454 - RNA, 20 nt, Artificial Sequence
  Synthetic
cucuucucagcuccauauuu

SEQ ID NO: 15455 - RNA, 20 nt, Artificial Sequence
  Synthetic
ucuucucagcuccauauuuu

SEQ ID NO: 15456 - RNA, 20 nt, Artificial Sequence
  Synthetic
cuucucagcuccauauuuuc

SEQ ID NO: 15457 - RNA, 20 nt, Artificial Sequence
  Synthetic
uucucagcuccauauuuuca

SEQ ID NO: 15458 - RNA, 20 nt, Artificial Sequence
  Synthetic
ucucagcuccauauuuucaa

SEQ ID NO: 15459 - RNA, 20 nt, Artificial Sequence
  Synthetic
cucagcuccauauuuucaau

SEQ ID NO: 15460 - RNA, 20 nt, Artificial Sequence
  Synthetic
ucagcuccauauuuucaaug

SEQ ID NO: 15461 - RNA, 20 nt, Artificial Sequence
  Synthetic
cagcuccauauuuucaaugu

SEQ ID NO: 15462 - RNA, 20 nt, Artificial Sequence
  Synthetic
agcuccauauuuucaaugug

SEQ ID NO: 15463 - RNA, 20 nt, Artificial Sequence
  Synthetic
gcuccauauuuucaauguga

SEQ ID NO: 15464 - RNA, 20 nt, Artificial Sequence
  Synthetic
cuccauauuuucaaugugac

SEQ ID NO: 15465 - RNA, 20 nt, Artificial Sequence
  Synthetic
uccauauuuucaaugugacu

SEQ ID NO: 15466 - RNA, 20 nt, Artificial Sequence
  Synthetic
ccauauuuucaaugugacug

SEQ ID NO: 15467 - RNA, 20 nt, Artificial Sequence
  Synthetic
cauauuuucaaugugacugg

SEQ ID NO: 15468 - RNA, 20 nt, Artificial Sequence
  Synthetic
auauuuucaaugugacuggg

SEQ ID NO: 15469 - RNA, 20 nt, Artificial Sequence
  Synthetic
uauuuucaaugugacugggu

SEQ ID NO: 15470 - RNA, 20 nt, Artificial Sequence
  Synthetic
auuuucaaugugacuggguc

SEQ ID NO: 15471 - RNA, 20 nt, Artificial Sequence
  Synthetic
uuuucaaugugacugggucu

SEQ ID NO: 15472 - RNA, 20 nt, Artificial Sequence
  Synthetic
uuucaaugugacugggucuu

SEQ ID NO: 15473 - RNA, 20 nt, Artificial Sequence
  Synthetic
uucaaugugacugggucuua

SEQ ID NO: 15474 - RNA, 20 nt, Artificial Sequence
  Synthetic
ucaaugugacugggucuuau

SEQ ID NO: 15475 - RNA, 20 nt, Artificial Sequence
  Synthetic
caaugugacugggucuuaua

SEQ ID NO: 15476 - RNA, 20 nt, Artificial Sequence
  Synthetic
aaugugacugggucuuauag

SEQ ID NO: 15477 - RNA, 20 nt, Artificial Sequence
  Synthetic
augugacugggucuuauagu

SEQ ID NO: 15478 - RNA, 20 nt, Artificial Sequence
  Synthetic
ugugacugggucuuauagua

SEQ ID NO: 15479 - RNA, 20 nt, Artificial Sequence
  Synthetic
gugacugggucuuauaguac

SEQ ID NO: 15480 - RNA, 20 nt, Artificial Sequence
  Synthetic
ugacugggucuuauaguaca

SEQ ID NO: 15481 - RNA, 20 nt, Artificial Sequence
  Synthetic
gacugggucuuauaguacag

SEQ ID NO: 15482 - RNA, 20 nt, Artificial Sequence
  Synthetic
acugggucuuauaguacagg

SEQ ID NO: 15483 - RNA, 20 nt, Artificial Sequence
  Synthetic
cugggucuuauaguacaggc

SEQ ID NO: 15484 - RNA, 20 nt, Artificial Sequence
  Synthetic
ugggucuuauaguacaggcu

SEQ ID NO: 15485 - RNA, 20 nt, Artificial Sequence
  Synthetic
gggucuuauaguacaggcuu

SEQ ID NO: 15486 - RNA, 20 nt, Artificial Sequence
  Synthetic
ggucuuauaguacaggcuug

SEQ ID NO: 15487 - RNA, 20 nt, Artificial Sequence
  Synthetic
gucuuauaguacaggcuugu

SEQ ID NO: 15488 - RNA, 20 nt, Artificial Sequence
  Synthetic
ucuuauaguacaggcuugua

SEQ ID NO: 15489 - RNA, 20 nt, Artificial Sequence
  Synthetic
cuuauaguacaggcuuguau

SEQ ID NO: 15490 - RNA, 20 nt, Artificial Sequence
  Synthetic
uuauaguacaggcuuguauu

SEQ ID NO: 15491 - RNA, 20 nt, Artificial Sequence
  Synthetic
uauaguacaggcuuguauuc

SEQ ID NO: 15492 - RNA, 20 nt, Artificial Sequence
  Synthetic
auaguacaggcuuguauuca

SEQ ID NO: 15493 - RNA, 20 nt, Artificial Sequence
  Synthetic
uaguacaggcuuguauucau

SEQ ID NO: 15494 - RNA, 20 nt, Artificial Sequence
  Synthetic
aguacaggcuuguauucauc

SEQ ID NO: 15495 - RNA, 20 nt, Artificial Sequence
  Synthetic
guacaggcuuguauucauca

SEQ ID NO: 15496 - RNA, 20 nt, Artificial Sequence
  Synthetic
uacaggcuuguauucaucac

SEQ ID NO: 15497 - RNA, 20 nt, Artificial Sequence
  Synthetic
acaggcuuguauucaucaca

SEQ ID NO: 15498 - RNA, 20 nt, Artificial Sequence
  Synthetic
caggcuuguauucaucacag

SEQ ID NO: 15499 - RNA, 20 nt, Artificial Sequence
  Synthetic
aggcuuguauucaucacaga

SEQ ID NO: 15500 - RNA, 20 nt, Artificial Sequence
  Synthetic
ggcuuguauucaucacagau

SEQ ID NO: 15501 - RNA, 20 nt, Artificial Sequence
  Synthetic
gcuuguauucaucacagaug

SEQ ID NO: 15502 - RNA, 20 nt, Artificial Sequence
  Synthetic
cuuguauucaucacagaugu

SEQ ID NO: 15503 - RNA, 20 nt, Artificial Sequence
  Synthetic
uuguauucaucacagauguu

SEQ ID NO: 15504 - RNA, 20 nt, Artificial Sequence
  Synthetic
uguauucaucacagauguuu

SEQ ID NO: 15505 - RNA, 20 nt, Artificial Sequence
  Synthetic
guauucaucacagauguuug

SEQ ID NO: 15506 - RNA, 20 nt, Artificial Sequence
  Synthetic
uauucaucacagauguuugg

SEQ ID NO: 15507 - RNA, 20 nt, Artificial Sequence
  Synthetic
auucaucacagauguuugga

SEQ ID NO: 15508 - RNA, 20 nt, Artificial Sequence
  Synthetic
uucaucacagauguuuggaa

SEQ ID NO: 15509 - RNA, 20 nt, Artificial Sequence
  Synthetic
ucaucacagauguuuggaac

SEQ ID NO: 15510 - RNA, 20 nt, Artificial Sequence
  Synthetic
caucacagauguuuggaacu

SEQ ID NO: 15511 - RNA, 20 nt, Artificial Sequence
  Synthetic
aucacagauguuuggaacuu

SEQ ID NO: 15512 - RNA, 20 nt, Artificial Sequence
  Synthetic
ucacagauguuuggaacuuc

SEQ ID NO: 15513 - RNA, 20 nt, Artificial Sequence
  Synthetic
cacagauguuuggaacuuca

SEQ ID NO: 15514 - RNA, 20 nt, Artificial Sequence
  Synthetic
acagauguuuggaacuucag

SEQ ID NO: 15515 - RNA, 20 nt, Artificial Sequence
  Synthetic
cagauguuuggaacuucaga

SEQ ID NO: 15516 - RNA, 20 nt, Artificial Sequence
  Synthetic
agauguuuggaacuucagaa

SEQ ID NO: 15517 - RNA, 20 nt, Artificial Sequence
  Synthetic
gauguuuggaacuucagaau

SEQ ID NO: 15518 - RNA, 20 nt, Artificial Sequence
  Synthetic
auguuuggaacuucagaaua

SEQ ID NO: 15519 - RNA, 20 nt, Artificial Sequence
  Synthetic
uguuuggaacuucagaauaa

SEQ ID NO: 15520 - RNA, 20 nt, Artificial Sequence
  Synthetic
guuuggaacuucagaauaau

SEQ ID NO: 15521 - RNA, 20 nt, Artificial Sequence
  Synthetic
uuuggaacuucagaauaaua

SEQ ID NO: 15522 - RNA, 20 nt, Artificial Sequence
  Synthetic
uuggaacuucagaauaauac

SEQ ID NO: 15523 - RNA, 20 nt, Artificial Sequence
  Synthetic
uggaacuucagaauaauaca

SEQ ID NO: 15524 - RNA, 20 nt, Artificial Sequence
  Synthetic
ggaacuucagaauaauacau

SEQ ID NO: 15525 - RNA, 20 nt, Artificial Sequence
  Synthetic
gaacuucagaauaauacaug

SEQ ID NO: 15526 - RNA, 20 nt, Artificial Sequence
  Synthetic
aacuucagaauaauacaugg

SEQ ID NO: 15527 - RNA, 20 nt, Artificial Sequence
  Synthetic
acuucagaauaauacauggu

SEQ ID NO: 15528 - RNA, 20 nt, Artificial Sequence
  Synthetic
cuucagaauaauacauggug

SEQ ID NO: 15529 - RNA, 20 nt, Artificial Sequence
  Synthetic
uucagaauaauacauggugc

SEQ ID NO: 15530 - RNA, 20 nt, Artificial Sequence
  Synthetic
ucagaauaauacauggugca

SEQ ID NO: 15531 - RNA, 20 nt, Artificial Sequence
  Synthetic
cagaauaauacauggugcaa

SEQ ID NO: 15532 - RNA, 20 nt, Artificial Sequence
  Synthetic
agaauaauacauggugcaaa

SEQ ID NO: 15533 - RNA, 20 nt, Artificial Sequence
  Synthetic
gaauaauacauggugcaaau

SEQ ID NO: 15534 - RNA, 20 nt, Artificial Sequence
  Synthetic
aauaauacauggugcaaauu

SEQ ID NO: 15535 - RNA, 20 nt, Artificial Sequence
  Synthetic
auaauacauggugcaaauuu

SEQ ID NO: 15536 - RNA, 20 nt, Artificial Sequence
  Synthetic
uaauacauggugcaaauuug

SEQ ID NO: 15537 - RNA, 20 nt, Artificial Sequence
  Synthetic
aauacauggugcaaauuugc

SEQ ID NO: 15538 - RNA, 20 nt, Artificial Sequence
  Synthetic
auacauggugcaaauuugca

SEQ ID NO: 15539 - RNA, 20 nt, Artificial Sequence
  Synthetic
uacauggugcaaauuugcau

SEQ ID NO: 15540 - RNA, 20 nt, Artificial Sequence
  Synthetic
acauggugcaaauuugcauu

SEQ ID NO: 15541 - RNA, 20 nt, Artificial Sequence
  Synthetic
cauggugcaaauuugcauuu

SEQ ID NO: 15542 - RNA, 20 nt, Artificial Sequence
  Synthetic
auggugcaaauuugcauuua

SEQ ID NO: 15543 - RNA, 20 nt, Artificial Sequence
  Synthetic
uggugcaaauuugcauuuac

SEQ ID NO: 15544 - RNA, 20 nt, Artificial Sequence
  Synthetic
ggugcaaauuugcauuuacc

SEQ ID NO: 15545 - RNA, 20 nt, Artificial Sequence
  Synthetic
gugcaaauuugcauuuaccu

SEQ ID NO: 15546 - RNA, 20 nt, Artificial Sequence
  Synthetic
ugcaaauuugcauuuaccuu

SEQ ID NO: 15547 - RNA, 20 nt, Artificial Sequence
  Synthetic
gcaaauuugcauuuaccuuc

SEQ ID NO: 15548 - RNA, 20 nt, Artificial Sequence
  Synthetic
caaauuugcauuuaccuucc

SEQ ID NO: 15549 - RNA, 20 nt, Artificial Sequence
  Synthetic
aaauuugcauuuaccuucca

SEQ ID NO: 15550 - RNA, 20 nt, Artificial Sequence
  Synthetic
aauuugcauuuaccuuccau

SEQ ID NO: 15551 - RNA, 20 nt, Artificial Sequence
  Synthetic
auuugcauuuaccuuccauu

SEQ ID NO: 15552 - RNA, 20 nt, Artificial Sequence
  Synthetic
uuugcauuuaccuuccauug

SEQ ID NO: 15553 - RNA, 20 nt, Artificial Sequence
  Synthetic
uugcauuuaccuuccauugu

SEQ ID NO: 15554 - RNA, 20 nt, Artificial Sequence
  Synthetic
ugcauuuaccuuccauugua

SEQ ID NO: 15555 - RNA, 20 nt, Artificial Sequence
  Synthetic
gcauuuaccuuccauuguaa

SEQ ID NO: 15556 - RNA, 20 nt, Artificial Sequence
  Synthetic
cauuuaccuuccauuguaaa

SEQ ID NO: 15557 - RNA, 20 nt, Artificial Sequence
  Synthetic
auuuaccuuccauuguaaau

SEQ ID NO: 15558 - RNA, 20 nt, Artificial Sequence
  Synthetic
uuuaccuuccauuguaaauc

SEQ ID NO: 15559 - RNA, 20 nt, Artificial Sequence
  Synthetic
uuaccuuccauuguaaauca

SEQ ID NO: 15560 - RNA, 20 nt, Artificial Sequence
  Synthetic
uaccuuccauuguaaaucag

SEQ ID NO: 15561 - RNA, 20 nt, Artificial Sequence
  Synthetic
accuuccauuguaaaucagu

SEQ ID NO: 15562 - RNA, 20 nt, Artificial Sequence
  Synthetic
ccuuccauuguaaaucaguu

SEQ ID NO: 15563 - RNA, 20 nt, Artificial Sequence
  Synthetic
cuuccauuguaaaucaguuc

SEQ ID NO: 15564 - RNA, 20 nt, Artificial Sequence
  Synthetic
uuccauuguaaaucaguucc

SEQ ID NO: 15565 - RNA, 20 nt, Artificial Sequence
  Synthetic
uccauuguaaaucaguucca

SEQ ID NO: 15566 - RNA, 20 nt, Artificial Sequence
  Synthetic
ccauuguaaaucaguuccaa

SEQ ID NO: 15567 - RNA, 20 nt, Artificial Sequence
  Synthetic
cauuguaaaucaguuccaau

SEQ ID NO: 15568 - RNA, 20 nt, Artificial Sequence
  Synthetic
auuguaaaucaguuccaaua

SEQ ID NO: 15569 - RNA, 20 nt, Artificial Sequence
  Synthetic
uuguaaaucaguuccaauaa

SEQ ID NO: 15570 - RNA, 20 nt, Artificial Sequence
  Synthetic
uguaaaucaguuccaauaaa

SEQ ID NO: 15571 - RNA, 20 nt, Artificial Sequence
  Synthetic
guaaaucaguuccaauaaaa

SEQ ID NO: 15572 - RNA, 20 nt, Artificial Sequence
  Synthetic
uaaaucaguuccaauaaaag

SEQ ID NO: 15573 - RNA, 20 nt, Artificial Sequence
  Synthetic
aaaucaguuccaauaaaaga

SEQ ID NO: 15574 - RNA, 20 nt, Artificial Sequence
  Synthetic
aaucaguuccaauaaaagau

SEQ ID NO: 15575 - RNA, 20 nt, Artificial Sequence
  Synthetic
aucaguuccaauaaaagaua

SEQ ID NO: 15576 - RNA, 20 nt, Artificial Sequence
  Synthetic
ucaguuccaauaaaagauaa

SEQ ID NO: 15577 - RNA, 20 nt, Artificial Sequence
  Synthetic
caguuccaauaaaagauaau

SEQ ID NO: 15578 - RNA, 20 nt, Artificial Sequence
  Synthetic
aguuccaauaaaagauaaua

SEQ ID NO: 15579 - RNA, 20 nt, Artificial Sequence
  Synthetic
guuccaauaaaagauaauau

SEQ ID NO: 15580 - RNA, 20 nt, Artificial Sequence
  Synthetic
uuccaauaaaagauaauaua

SEQ ID NO: 15581 - RNA, 20 nt, Artificial Sequence
  Synthetic
uccaauaaaagauaauauaa

SEQ ID NO: 15582 - RNA, 20 nt, Artificial Sequence
  Synthetic
ccaauaaaagauaauauaaa

SEQ ID NO: 15583 - RNA, 20 nt, Artificial Sequence
  Synthetic
caauaaaagauaauauaaaa

SEQ ID NO: 15584 - RNA, 20 nt, Artificial Sequence
  Synthetic
aauaaaagauaauauaaaag

SEQ ID NO: 15585 - RNA, 20 nt, Artificial Sequence
  Synthetic
auaaaagauaauauaaaagg

SEQ ID NO: 15586 - RNA, 20 nt, Artificial Sequence
  Synthetic
uaaaagauaauauaaaaggc

SEQ ID NO: 15587 - RNA, 20 nt, Artificial Sequence
  Synthetic
aaaagauaauauaaaaggca

SEQ ID NO: 15588 - RNA, 20 nt, Artificial Sequence
  Synthetic
aaagauaauauaaaaggcag

SEQ ID NO: 15589 - RNA, 20 nt, Artificial Sequence
  Synthetic
aagauaauauaaaaggcaga

SEQ ID NO: 15590 - RNA, 20 nt, Artificial Sequence
  Synthetic
agauaauauaaaaggcagag

SEQ ID NO: 15591 - RNA, 20 nt, Artificial Sequence
  Synthetic
gauaauauaaaaggcagagc

SEQ ID NO: 15592 - RNA, 20 nt, Artificial Sequence
  Synthetic
auaauauaaaaggcagagcu

SEQ ID NO: 15593 - RNA, 20 nt, Artificial Sequence
  Synthetic
uaauauaaaaggcagagcuu

SEQ ID NO: 15594 - RNA, 20 nt, Artificial Sequence
  Synthetic
aauauaaaaggcagagcuuc

SEQ ID NO: 15595 - RNA, 20 nt, Artificial Sequence
  Synthetic
auauaaaaggcagagcuucu

SEQ ID NO: 15596 - RNA, 20 nt, Artificial Sequence
  Synthetic
uauaaaaggcagagcuucug

SEQ ID NO: 15597 - RNA, 20 nt, Artificial Sequence
  Synthetic
auaaaaggcagagcuucugc

SEQ ID NO: 15598 - RNA, 20 nt, Artificial Sequence
  Synthetic
uaaaaggcagagcuucugcc

SEQ ID NO: 15599 - RNA, 20 nt, Artificial Sequence
  Synthetic
aaaaggcagagcuucugccu

SEQ ID NO: 15600 - RNA, 20 nt, Artificial Sequence
  Synthetic
aaaggcagagcuucugccuu

SEQ ID NO: 15601 - RNA, 20 nt, Artificial Sequence
  Synthetic
aaggcagagcuucugccuug

SEQ ID NO: 15602 - RNA, 20 nt, Artificial Sequence
  Synthetic
aggcagagcuucugccuugg

SEQ ID NO: 15603 - RNA, 20 nt, Artificial Sequence
  Synthetic
ggcagagcuucugccuugga

SEQ ID NO: 15604 - RNA, 20 nt, Artificial Sequence
  Synthetic
gcagagcuucugccuuggau

SEQ ID NO: 15605 - RNA, 20 nt, Artificial Sequence
  Synthetic
cagagcuucugccuuggauu

SEQ ID NO: 15606 - RNA, 20 nt, Artificial Sequence
  Synthetic
agagcuucugccuuggauuu

SEQ ID NO: 15607 - RNA, 20 nt, Artificial Sequence
  Synthetic
gagcuucugccuuggauuuu

SEQ ID NO: 15608 - RNA, 20 nt, Artificial Sequence
  Synthetic
agcuucugccuuggauuuug

SEQ ID NO: 15609 - RNA, 20 nt, Artificial Sequence
  Synthetic
gcuucugccuuggauuuugu

SEQ ID NO: 15610 - RNA, 20 nt, Artificial Sequence
  Synthetic
cuucugccuuggauuuugug

SEQ ID NO: 15611 - RNA, 20 nt, Artificial Sequence
  Synthetic
uucugccuuggauuuugugu

SEQ ID NO: 15612 - RNA, 20 nt, Artificial Sequence
  Synthetic
ucugccuuggauuuuguguu

SEQ ID NO: 15613 - RNA, 20 nt, Artificial Sequence
  Synthetic
cugccuuggauuuuguguuc

SEQ ID NO: 15614 - RNA, 20 nt, Artificial Sequence
  Synthetic
ugccuuggauuuuguguucu

SEQ ID NO: 15615 - RNA, 20 nt, Artificial Sequence
  Synthetic
gccuuggauuuuguguucuu

SEQ ID NO: 15616 - RNA, 20 nt, Artificial Sequence
  Synthetic
ccuuggauuuuguguucuuu

SEQ ID NO: 15617 - RNA, 20 nt, Artificial Sequence
  Synthetic
cuuggauuuuguguucuuua

SEQ ID NO: 15618 - RNA, 20 nt, Artificial Sequence
  Synthetic
uuggauuuuguguucuuuaa

SEQ ID NO: 15619 - RNA, 20 nt, Artificial Sequence
  Synthetic
uggauuuuguguucuuuaaa

SEQ ID NO: 15620 - RNA, 20 nt, Artificial Sequence
  Synthetic
ggauuuuguguucuuuaaau

SEQ ID NO: 15621 - RNA, 20 nt, Artificial Sequence
  Synthetic
gauuuuguguucuuuaaauu

SEQ ID NO: 15622 - RNA, 20 nt, Artificial Sequence
  Synthetic
auuuuguguucuuuaaauuu

SEQ ID NO: 15623 - RNA, 20 nt, Artificial Sequence
  Synthetic
uuuuguguucuuuaaauuuu

SEQ ID NO: 15624 - RNA, 20 nt, Artificial Sequence
  Synthetic
uuuguguucuuuaaauuuuu

SEQ ID NO: 15625 - RNA, 20 nt, Artificial Sequence
  Synthetic
uuguguucuuuaaauuuuuu

SEQ ID NO: 15626 - RNA, 20 nt, Artificial Sequence
  Synthetic
uguguucuuuaaauuuuuug

SEQ ID NO: 15627 - RNA, 20 nt, Artificial Sequence
  Synthetic
guguucuuuaaauuuuuugg

SEQ ID NO: 15628 - RNA, 20 nt, Artificial Sequence
  Synthetic
uguucuuuaaauuuuuuggu

SEQ ID NO: 15629 - RNA, 20 nt, Artificial Sequence
  Synthetic
guucuuuaaauuuuuuggug

SEQ ID NO: 15630 - RNA, 20 nt, Artificial Sequence
  Synthetic
uucuuuaaauuuuuuggugc

SEQ ID NO: 15631 - RNA, 20 nt, Artificial Sequence
  Synthetic
ucuuuaaauuuuuuggugca

SEQ ID NO: 15632 - RNA, 20 nt, Artificial Sequence
  Synthetic
cuuuaaauuuuuuggugcau

SEQ ID NO: 15633 - RNA, 20 nt, Artificial Sequence
  Synthetic
uuuaaauuuuuuggugcauu

SEQ ID NO: 15634 - RNA, 20 nt, Artificial Sequence
  Synthetic
uuaaauuuuuuggugcauuc

SEQ ID NO: 15635 - RNA, 20 nt, Artificial Sequence
  Synthetic
uaaauuuuuuggugcauucu

SEQ ID NO: 15636 - RNA, 20 nt, Artificial Sequence
  Synthetic
aaauuuuuuggugcauucug

SEQ ID NO: 15637 - RNA, 20 nt, Artificial Sequence
  Synthetic
aauuuuuuggugcauucugu

SEQ ID NO: 15638 - RNA, 20 nt, Artificial Sequence
  Synthetic
auuuuuuggugcauucuguc

SEQ ID NO: 15639 - RNA, 20 nt, Artificial Sequence
  Synthetic
uuuuuuggugcauucugucu

SEQ ID NO: 15640 - RNA, 20 nt, Artificial Sequence
  Synthetic
uuuuuggugcauucugucuu

SEQ ID NO: 15641 - RNA, 20 nt, Artificial Sequence
  Synthetic
uuuuggugcauucugucuuu

SEQ ID NO: 15642 - RNA, 20 nt, Artificial Sequence
  Synthetic
uuuggugcauucugucuuua

SEQ ID NO: 15643 - RNA, 20 nt, Artificial Sequence
  Synthetic
uuggugcauucugucuuuaa

SEQ ID NO: 15644 - RNA, 20 nt, Artificial Sequence
  Synthetic
uggugcauucugucuuuaaa

SEQ ID NO: 15645 - RNA, 20 nt, Artificial Sequence
  Synthetic
ggugcauucugucuuuaaaa

SEQ ID NO: 15646 - RNA, 20 nt, Artificial Sequence
  Synthetic
gugcauucugucuuuaaaau

SEQ ID NO: 15647 - RNA, 20 nt, Artificial Sequence
  Synthetic
ugcauucugucuuuaaaaua

SEQ ID NO: 15648 - RNA, 20 nt, Artificial Sequence
  Synthetic
gcauucugucuuuaaaauau

SEQ ID NO: 15649 - RNA, 20 nt, Artificial Sequence
  Synthetic
cauucugucuuuaaaauaua

SEQ ID NO: 15650 - RNA, 20 nt, Artificial Sequence
  Synthetic
auucugucuuuaaaauauaa

SEQ ID NO: 15651 - RNA, 20 nt, Artificial Sequence
  Synthetic
uucugucuuuaaaauauaag

SEQ ID NO: 15652 - RNA, 20 nt, Artificial Sequence
  Synthetic
ucugucuuuaaaauauaaga

SEQ ID NO: 15653 - RNA, 20 nt, Artificial Sequence
  Synthetic
cugucuuuaaaauauaagaa

SEQ ID NO: 15654 - RNA, 20 nt, Artificial Sequence
  Synthetic
ugucuuuaaaauauaagaag

SEQ ID NO: 15655 - RNA, 20 nt, Artificial Sequence
  Synthetic
gucuuuaaaauauaagaagu

SEQ ID NO: 15656 - RNA, 20 nt, Artificial Sequence
  Synthetic
ucuuuaaaauauaagaagua

SEQ ID NO: 15657 - RNA, 20 nt, Artificial Sequence
  Synthetic
cuuuaaaauauaagaaguac

SEQ ID NO: 15658 - RNA, 20 nt, Artificial Sequence
  Synthetic
uuuaaaauauaagaaguacc

SEQ ID NO: 15659 - RNA, 20 nt, Artificial Sequence
  Synthetic
uuaaaauauaagaaguaccu

SEQ ID NO: 15660 - RNA, 20 nt, Artificial Sequence
  Synthetic
uaaaauauaagaaguaccuc

SEQ ID NO: 15661 - RNA, 20 nt, Artificial Sequence
  Synthetic
aaaauauaagaaguaccuca

SEQ ID NO: 15662 - RNA, 20 nt, Artificial Sequence
  Synthetic
aaauauaagaaguaccucac

SEQ ID NO: 15663 - RNA, 20 nt, Artificial Sequence
  Synthetic
aauauaagaaguaccucacu

SEQ ID NO: 15664 - RNA, 20 nt, Artificial Sequence
  Synthetic
auauaagaaguaccucacua

SEQ ID NO: 15665 - RNA, 20 nt, Artificial Sequence
  Synthetic
uauaagaaguaccucacuau

SEQ ID NO: 15666 - RNA, 20 nt, Artificial Sequence
  Synthetic
auaagaaguaccucacuaua

SEQ ID NO: 15667 - RNA, 20 nt, Artificial Sequence
  Synthetic
uaagaaguaccucacuauau

SEQ ID NO: 15668 - RNA, 20 nt, Artificial Sequence
  Synthetic
aagaaguaccucacuauauu

SEQ ID NO: 15669 - RNA, 20 nt, Artificial Sequence
  Synthetic
agaaguaccucacuauauuc

SEQ ID NO: 15670 - RNA, 20 nt, Artificial Sequence
  Synthetic
gaaguaccucacuauauuca

SEQ ID NO: 15671 - RNA, 20 nt, Artificial Sequence
  Synthetic
aaguaccucacuauauucag

SEQ ID NO: 15672 - RNA, 20 nt, Artificial Sequence
  Synthetic
aguaccucacuauauucagu

SEQ ID NO: 15673 - RNA, 20 nt, Artificial Sequence
  Synthetic
guaccucacuauauucagug

SEQ ID NO: 15674 - RNA, 20 nt, Artificial Sequence
  Synthetic
uaccucacuauauucagugu

SEQ ID NO: 15675 - RNA, 20 nt, Artificial Sequence
  Synthetic
accucacuauauucagugua

SEQ ID NO: 15676 - RNA, 20 nt, Artificial Sequence
  Synthetic
ccucacuauauucaguguaa

SEQ ID NO: 15677 - RNA, 20 nt, Artificial Sequence
  Synthetic
cucacuauauucaguguaac

SEQ ID NO: 15678 - RNA, 20 nt, Artificial Sequence
  Synthetic
ucacuauauucaguguaaca

SEQ ID NO: 15679 - RNA, 20 nt, Artificial Sequence
  Synthetic
cacuauauucaguguaacac

SEQ ID NO: 15680 - RNA, 20 nt, Artificial Sequence
  Synthetic
acuauauucaguguaacacu

SEQ ID NO: 15681 - RNA, 20 nt, Artificial Sequence
  Synthetic
cuauauucaguguaacacuc

SEQ ID NO: 15682 - RNA, 20 nt, Artificial Sequence
  Synthetic
uauauucaguguaacacuca

SEQ ID NO: 15683 - RNA, 20 nt, Artificial Sequence
  Synthetic
auauucaguguaacacucaa

SEQ ID NO: 15684 - RNA, 20 nt, Artificial Sequence
  Synthetic
uauucaguguaacacucaac

SEQ ID NO: 15685 - RNA, 20 nt, Artificial Sequence
  Synthetic
auucaguguaacacucaacc

SEQ ID NO: 15686 - RNA, 20 nt, Artificial Sequence
  Synthetic
uucaguguaacacucaaccg

SEQ ID NO: 15687 - RNA, 20 nt, Artificial Sequence
  Synthetic
ucaguguaacacucaaccgu

SEQ ID NO: 15688 - RNA, 20 nt, Artificial Sequence
  Synthetic
caguguaacacucaaccguc

SEQ ID NO: 15689 - RNA, 20 nt, Artificial Sequence
  Synthetic
aguguaacacucaaccgucc

SEQ ID NO: 15690 - RNA, 20 nt, Artificial Sequence
  Synthetic
guguaacacucaaccguccc

SEQ ID NO: 15691 - RNA, 20 nt, Artificial Sequence
  Synthetic
uguaacacucaaccgucccu

SEQ ID NO: 15692 - RNA, 20 nt, Artificial Sequence
  Synthetic
guaacacucaaccgucccug

SEQ ID NO: 15693 - RNA, 20 nt, Artificial Sequence
  Synthetic
uaacacucaaccgucccugu

SEQ ID NO: 15694 - RNA, 20 nt, Artificial Sequence
  Synthetic
aacacucaaccgucccuguc

SEQ ID NO: 15695 - RNA, 20 nt, Artificial Sequence
  Synthetic
acacucaaccgucccuguca

SEQ ID NO: 15696 - RNA, 20 nt, Artificial Sequence
  Synthetic
cacucaaccgucccugucau

SEQ ID NO: 15697 - RNA, 20 nt, Artificial Sequence
  Synthetic
acucaaccgucccugucaug

SEQ ID NO: 15698 - RNA, 20 nt, Artificial Sequence
  Synthetic
cucaaccgucccugucauga

SEQ ID NO: 15699 - RNA, 20 nt, Artificial Sequence
  Synthetic
ucaaccgucccugucaugag

SEQ ID NO: 15700 - RNA, 20 nt, Artificial Sequence
  Synthetic
caaccgucccugucaugagc

SEQ ID NO: 15701 - RNA, 20 nt, Artificial Sequence
  Synthetic
aaccgucccugucaugagcu

SEQ ID NO: 15702 - RNA, 20 nt, Artificial Sequence
  Synthetic
accgucccugucaugagcug

SEQ ID NO: 15703 - RNA, 20 nt, Artificial Sequence
  Synthetic
ccgucccugucaugagcugg

SEQ ID NO: 15704 - RNA, 20 nt, Artificial Sequence
  Synthetic
cgucccugucaugagcuggg

SEQ ID NO: 15705 - RNA, 20 nt, Artificial Sequence
  Synthetic
gucccugucaugagcugggu

SEQ ID NO: 15706 - RNA, 20 nt, Artificial Sequence
  Synthetic
ucccugucaugagcugggug

SEQ ID NO: 15707 - RNA, 20 nt, Artificial Sequence
  Synthetic
cccugucaugagcuggguga

SEQ ID NO: 15708 - RNA, 20 nt, Artificial Sequence
  Synthetic
ccugucaugagcugggugac

SEQ ID NO: 15709 - RNA, 20 nt, Artificial Sequence
  Synthetic
cugucaugagcugggugacc

SEQ ID NO: 15710 - RNA, 20 nt, Artificial Sequence
  Synthetic
ugucaugagcugggugaccu

SEQ ID NO: 15711 - RNA, 20 nt, Artificial Sequence
  Synthetic
gucaugagcugggugaccuu

SEQ ID NO: 15712 - RNA, 20 nt, Artificial Sequence
  Synthetic
ucaugagcugggugaccuug

SEQ ID NO: 15713 - RNA, 20 nt, Artificial Sequence
  Synthetic
caugagcugggugaccuugg

SEQ ID NO: 15714 - RNA, 20 nt, Artificial Sequence
  Synthetic
augagcugggugaccuuggu

SEQ ID NO: 15715 - RNA, 20 nt, Artificial Sequence
  Synthetic
ugagcugggugaccuugguc

SEQ ID NO: 15716 - RNA, 20 nt, Artificial Sequence
  Synthetic
gagcugggugaccuugguca

SEQ ID NO: 15717 - RNA, 20 nt, Artificial Sequence
  Synthetic
agcugggugaccuuggucau

SEQ ID NO: 15718 - RNA, 20 nt, Artificial Sequence
  Synthetic
gcugggugaccuuggucauu

SEQ ID NO: 15719 - RNA, 20 nt, Artificial Sequence
  Synthetic
cugggugaccuuggucauuc

SEQ ID NO: 15720 - RNA, 20 nt, Artificial Sequence
  Synthetic
ugggugaccuuggucauuca

SEQ ID NO: 15721 - RNA, 20 nt, Artificial Sequence
  Synthetic
gggugaccuuggucauucau

SEQ ID NO: 15722 - RNA, 20 nt, Artificial Sequence
  Synthetic
ggugaccuuggucauucauu

SEQ ID NO: 15723 - RNA, 20 nt, Artificial Sequence
  Synthetic
gugaccuuggucauucauuu

SEQ ID NO: 15724 - RNA, 20 nt, Artificial Sequence
  Synthetic
ugaccuuggucauucauuua

SEQ ID NO: 15725 - RNA, 20 nt, Artificial Sequence
  Synthetic
gaccuuggucauucauuuau

SEQ ID NO: 15726 - RNA, 20 nt, Artificial Sequence
  Synthetic
accuuggucauucauuuauc

SEQ ID NO: 15727 - RNA, 20 nt, Artificial Sequence
  Synthetic
ccuuggucauucauuuaucc

SEQ ID NO: 15728 - RNA, 20 nt, Artificial Sequence
  Synthetic
cuuggucauucauuuauccu

SEQ ID NO: 15729 - RNA, 20 nt, Artificial Sequence
  Synthetic
uuggucauucauuuauccuc

SEQ ID NO: 15730 - RNA, 20 nt, Artificial Sequence
  Synthetic
uggucauucauuuauccucu

SEQ ID NO: 15731 - RNA, 20 nt, Artificial Sequence
  Synthetic
ggucauucauuuauccucug

SEQ ID NO: 15732 - RNA, 20 nt, Artificial Sequence
  Synthetic
gucauucauuuauccucugg

SEQ ID NO: 15733 - RNA, 20 nt, Artificial Sequence
  Synthetic
ucauucauuuauccucuggu

SEQ ID NO: 15734 - RNA, 20 nt, Artificial Sequence
  Synthetic
cauucauuuauccucuggug

SEQ ID NO: 15735 - RNA, 20 nt, Artificial Sequence
  Synthetic
auucauuuauccucuggugg

SEQ ID NO: 15736 - RNA, 20 nt, Artificial Sequence
  Synthetic
uucauuuauccucugguggg

SEQ ID NO: 15737 - RNA, 20 nt, Artificial Sequence
  Synthetic
ucauuuauccucuggugggc

SEQ ID NO: 15738 - RNA, 20 nt, Artificial Sequence
  Synthetic
cauuuauccucuggugggcu

SEQ ID NO: 15739 - RNA, 20 nt, Artificial Sequence
  Synthetic
auuuauccucuggugggcuc

SEQ ID NO: 15740 - RNA, 20 nt, Artificial Sequence
  Synthetic
uuuauccucuggugggcuca

SEQ ID NO: 15741 - RNA, 20 nt, Artificial Sequence
  Synthetic
uuauccucuggugggcucaa

SEQ ID NO: 15742 - RNA, 20 nt, Artificial Sequence
  Synthetic
uauccucuggugggcucaaa

SEQ ID NO: 15743 - RNA, 20 nt, Artificial Sequence
  Synthetic
auccucuggugggcucaaau

SEQ ID NO: 15744 - RNA, 20 nt, Artificial Sequence
  Synthetic
uccucuggugggcucaaauu

SEQ ID NO: 15745 - RNA, 20 nt, Artificial Sequence
  Synthetic
ccucuggugggcucaaauua

SEQ ID NO: 15746 - RNA, 20 nt, Artificial Sequence
  Synthetic
cucuggugggcucaaauuau

SEQ ID NO: 15747 - RNA, 20 nt, Artificial Sequence
  Synthetic
ucuggugggcucaaauuauu

SEQ ID NO: 15748 - RNA, 20 nt, Artificial Sequence
  Synthetic
cuggugggcucaaauuauuc

SEQ ID NO: 15749 - RNA, 20 nt, Artificial Sequence
  Synthetic
uggugggcucaaauuauuca

SEQ ID NO: 15750 - RNA, 20 nt, Artificial Sequence
  Synthetic
ggugggcucaaauuauucau

SEQ ID NO: 15751 - RNA, 20 nt, Artificial Sequence
  Synthetic
gugggcucaaauuauucauc

SEQ ID NO: 15752 - RNA, 20 nt, Artificial Sequence
  Synthetic
ugggcucaaauuauucauca

SEQ ID NO: 15753 - RNA, 20 nt, Artificial Sequence
  Synthetic
gggcucaaauuauucaucag

SEQ ID NO: 15754 - RNA, 20 nt, Artificial Sequence
  Synthetic
ggcucaaauuauucaucagu

SEQ ID NO: 15755 - RNA, 20 nt, Artificial Sequence
  Synthetic
gcucaaauuauucaucagua

SEQ ID NO: 15756 - RNA, 20 nt, Artificial Sequence
  Synthetic
cucaaauuauucaucaguaa

SEQ ID NO: 15757 - RNA, 20 nt, Artificial Sequence
  Synthetic
ucaaauuauucaucaguaaa

SEQ ID NO: 15758 - RNA, 20 nt, Artificial Sequence
  Synthetic
caaauuauucaucaguaaaa

SEQ ID NO: 15759 - RNA, 20 nt, Artificial Sequence
  Synthetic
aaauuauucaucaguaaaau

SEQ ID NO: 15760 - RNA, 20 nt, Artificial Sequence
  Synthetic
aauuauucaucaguaaaaua

SEQ ID NO: 15761 - RNA, 20 nt, Artificial Sequence
  Synthetic
auuauucaucaguaaaauaa

SEQ ID NO: 15762 - RNA, 20 nt, Artificial Sequence
  Synthetic
uuauucaucaguaaaauaac

SEQ ID NO: 15763 - RNA, 20 nt, Artificial Sequence
  Synthetic
uauucaucaguaaaauaacg

SEQ ID NO: 15764 - RNA, 20 nt, Artificial Sequence
  Synthetic
auucaucaguaaaauaacga

SEQ ID NO: 15765 - RNA, 20 nt, Artificial Sequence
  Synthetic
uucaucaguaaaauaacgag

SEQ ID NO: 15766 - RNA, 20 nt, Artificial Sequence
  Synthetic
ucaucaguaaaauaacgagc

SEQ ID NO: 15767 - RNA, 20 nt, Artificial Sequence
  Synthetic
caucaguaaaauaacgagcc

SEQ ID NO: 15768 - RNA, 20 nt, Artificial Sequence
  Synthetic
aucaguaaaauaacgagccu

SEQ ID NO: 15769 - RNA, 20 nt, Artificial Sequence
  Synthetic
ucaguaaaauaacgagccug

SEQ ID NO: 15770 - RNA, 20 nt, Artificial Sequence
  Synthetic
caguaaaauaacgagccugu

SEQ ID NO: 15771 - RNA, 20 nt, Artificial Sequence
  Synthetic
aguaaaauaacgagccugua

SEQ ID NO: 15772 - RNA, 20 nt, Artificial Sequence
  Synthetic
guaaaauaacgagccuguac

SEQ ID NO: 15773 - RNA, 20 nt, Artificial Sequence
  Synthetic
uaaaauaacgagccuguaca

SEQ ID NO: 15774 - RNA, 20 nt, Artificial Sequence
  Synthetic
aaaauaacgagccuguacaa

SEQ ID NO: 15775 - RNA, 20 nt, Artificial Sequence
  Synthetic
aaauaacgagccuguacaaa

SEQ ID NO: 15776 - RNA, 20 nt, Artificial Sequence
  Synthetic
aauaacgagccuguacaaau

SEQ ID NO: 15777 - RNA, 20 nt, Artificial Sequence
  Synthetic
auaacgagccuguacaaaua

SEQ ID NO: 15778 - RNA, 20 nt, Artificial Sequence
  Synthetic
uaacgagccuguacaaauaa

SEQ ID NO: 15779 - RNA, 20 nt, Artificial Sequence
  Synthetic
aacgagccuguacaaauaaa

SEQ ID NO: 15780 - RNA, 20 nt, Artificial Sequence
  Synthetic
acgagccuguacaaauaaaa

SEQ ID NO: 15781 - RNA, 20 nt, Artificial Sequence
  Synthetic
cgagccuguacaaauaaaau

SEQ ID NO: 15782 - RNA, 20 nt, Artificial Sequence
  Synthetic
gagccuguacaaauaaaaug

SEQ ID NO: 15783 - RNA, 20 nt, Artificial Sequence
  Synthetic
agccuguacaaauaaaaugu

SEQ ID NO: 15784 - RNA, 20 nt, Artificial Sequence
  Synthetic
gccuguacaaauaaaaugua

SEQ ID NO: 15785 - RNA, 20 nt, Artificial Sequence
  Synthetic
ccuguacaaauaaaauguaa

SEQ ID NO: 15786 - RNA, 20 nt, Artificial Sequence
  Synthetic
cuguacaaauaaaauguaau

SEQ ID NO: 15787 - RNA, 20 nt, Artificial Sequence
  Synthetic
uguacaaauaaaauguaauu

SEQ ID NO: 15788 - RNA, 20 nt, Artificial Sequence
  Synthetic
guacaaauaaaauguaauuu

SEQ ID NO: 15789 - RNA, 20 nt, Artificial Sequence
  Synthetic
uacaaauaaaauguaauuuu

SEQ ID NO: 15790 - RNA, 20 nt, Artificial Sequence
  Synthetic
acaaauaaaauguaauuuuu

SEQ ID NO: 15791 - RNA, 20 nt, Artificial Sequence
  Synthetic
caaauaaaauguaauuuuuu

SEQ ID NO: 15792 - RNA, 20 nt, Artificial Sequence
  Synthetic
aaauaaaauguaauuuuuuu

SEQ ID NO: 15793 - RNA, 20 nt, Artificial Sequence
  Synthetic
aauaaaauguaauuuuuuuc

SEQ ID NO: 15794 - RNA, 20 nt, Artificial Sequence
  Synthetic
auaaaauguaauuuuuuuca

SEQ ID NO: 15795 - RNA, 20 nt, Artificial Sequence
  Synthetic
uaaaauguaauuuuuuucac

SEQ ID NO: 15796 - RNA, 20 nt, Artificial Sequence
  Synthetic
aaaauguaauuuuuuucaca

SEQ ID NO: 15797 - RNA, 20 nt, Artificial Sequence
  Synthetic
aaauguaauuuuuuucacau

SEQ ID NO: 15798 - RNA, 20 nt, Artificial Sequence
  Synthetic
aauguaauuuuuuucacauc

SEQ ID NO: 15799 - RNA, 20 nt, Artificial Sequence
  Synthetic
auguaauuuuuuucacauca

SEQ ID NO: 15800 - RNA, 20 nt, Artificial Sequence
  Synthetic
uguaauuuuuuucacaucag

SEQ ID NO: 15801 - RNA, 20 nt, Artificial Sequence
  Synthetic
guaauuuuuuucacaucaga

SEQ ID NO: 15802 - RNA, 20 nt, Artificial Sequence
  Synthetic
uaauuuuuuucacaucagau

SEQ ID NO: 15803 - RNA, 20 nt, Artificial Sequence
  Synthetic
aauuuuuuucacaucagaug

SEQ ID NO: 15804 - RNA, 20 nt, Artificial Sequence
  Synthetic
auuuuuuucacaucagaugg

SEQ ID NO: 15805 - RNA, 20 nt, Artificial Sequence
  Synthetic
uuuuuuucacaucagauggg

SEQ ID NO: 15806 - RNA, 20 nt, Artificial Sequence
  Synthetic
uuuuuucacaucagaugggu

SEQ ID NO: 15807 - RNA, 20 nt, Artificial Sequence
  Synthetic
uuuuucacaucagaugggua

SEQ ID NO: 15808 - RNA, 20 nt, Artificial Sequence
  Synthetic
uuuucacaucagauggguaa

SEQ ID NO: 15809 - RNA, 20 nt, Artificial Sequence
  Synthetic
uuucacaucagauggguaac

SEQ ID NO: 15810 - RNA, 20 nt, Artificial Sequence
  Synthetic
uucacaucagauggguaacg

SEQ ID NO: 15811 - RNA, 20 nt, Artificial Sequence
  Synthetic
ucacaucagauggguaacgu

SEQ ID NO: 15812 - RNA, 20 nt, Artificial Sequence
  Synthetic
cacaucagauggguaacgug

SEQ ID NO: 15813 - RNA, 20 nt, Artificial Sequence
  Synthetic
acaucagauggguaacgugc

SEQ ID NO: 15814 - RNA, 20 nt, Artificial Sequence
  Synthetic
caucagauggguaacgugcc

SEQ ID NO: 15815 - RNA, 20 nt, Artificial Sequence
  Synthetic
aucagauggguaacgugcca

SEQ ID NO: 15816 - RNA, 20 nt, Artificial Sequence
  Synthetic
ucagauggguaacgugccaa

SEQ ID NO: 15817 - RNA, 20 nt, Artificial Sequence
  Synthetic
cagauggguaacgugccaaa

SEQ ID NO: 15818 - RNA, 20 nt, Artificial Sequence
  Synthetic
agauggguaacgugccaaau

SEQ ID NO: 15819 - RNA, 20 nt, Artificial Sequence
  Synthetic
gauggguaacgugccaaauc

SEQ ID NO: 15820 - RNA, 20 nt, Artificial Sequence
  Synthetic
auggguaacgugccaaauca

SEQ ID NO: 15821 - RNA, 20 nt, Artificial Sequence
  Synthetic
uggguaacgugccaaaucau

SEQ ID NO: 15822 - RNA, 20 nt, Artificial Sequence
  Synthetic
ggguaacgugccaaaucaua

SEQ ID NO: 15823 - RNA, 20 nt, Artificial Sequence
  Synthetic
gguaacgugccaaaucauaa

SEQ ID NO: 15824 - RNA, 20 nt, Artificial Sequence
  Synthetic
guaacgugccaaaucauaac

SEQ ID NO: 15825 - RNA, 20 nt, Artificial Sequence
  Synthetic
uaacgugccaaaucauaaca

SEQ ID NO: 15826 - RNA, 20 nt, Artificial Sequence
  Synthetic
aacgugccaaaucauaacaa

SEQ ID NO: 15827 - RNA, 20 nt, Artificial Sequence
  Synthetic
acgugccaaaucauaacaag

SEQ ID NO: 15828 - RNA, 20 nt, Artificial Sequence
  Synthetic
cgugccaaaucauaacaagg

SEQ ID NO: 15829 - RNA, 20 nt, Artificial Sequence
  Synthetic
gugccaaaucauaacaaggu

SEQ ID NO: 15830 - RNA, 20 nt, Artificial Sequence
  Synthetic
ugccaaaucauaacaagguu

SEQ ID NO: 15831 - RNA, 20 nt, Artificial Sequence
  Synthetic
gccaaaucauaacaagguuu

SEQ ID NO: 15832 - RNA, 20 nt, Artificial Sequence
  Synthetic
ccaaaucauaacaagguuug

SEQ ID NO: 15833 - RNA, 20 nt, Artificial Sequence
  Synthetic
caaaucauaacaagguuuga

SEQ ID NO: 15834 - RNA, 20 nt, Artificial Sequence
  Synthetic
aaaucauaacaagguuugag

SEQ ID NO: 15835 - RNA, 20 nt, Artificial Sequence
  Synthetic
aaucauaacaagguuugagc

SEQ ID NO: 15836 - RNA, 20 nt, Artificial Sequence
  Synthetic
aucauaacaagguuugagcg

SEQ ID NO: 15837 - RNA, 20 nt, Artificial Sequence
  Synthetic
ucauaacaagguuugagcga

SEQ ID NO: 15838 - RNA, 20 nt, Artificial Sequence
  Synthetic
cauaacaagguuugagcgag

SEQ ID NO: 15839 - RNA, 20 nt, Artificial Sequence
  Synthetic
auaacaagguuugagcgagg

SEQ ID NO: 15840 - RNA, 20 nt, Artificial Sequence
  Synthetic
uaacaagguuugagcgaggc

SEQ ID NO: 15841 - RNA, 20 nt, Artificial Sequence
  Synthetic
aacaagguuugagcgaggca

SEQ ID NO: 15842 - RNA, 20 nt, Artificial Sequence
  Synthetic
acaagguuugagcgaggcac

SEQ ID NO: 15843 - RNA, 20 nt, Artificial Sequence
  Synthetic
caagguuugagcgaggcaca

SEQ ID NO: 15844 - RNA, 20 nt, Artificial Sequence
  Synthetic
aagguuugagcgaggcacau

SEQ ID NO: 15845 - RNA, 20 nt, Artificial Sequence
  Synthetic
agguuugagcgaggcacauc

SEQ ID NO: 15846 - RNA, 20 nt, Artificial Sequence
  Synthetic
gguuugagcgaggcacaucu

SEQ ID NO: 15847 - RNA, 20 nt, Artificial Sequence
  Synthetic
guuugagcgaggcacaucuc

SEQ ID NO: 15848 - RNA, 20 nt, Artificial Sequence
  Synthetic
uuugagcgaggcacaucuca

SEQ ID NO: 15849 - RNA, 20 nt, Artificial Sequence
  Synthetic
uugagcgaggcacaucucac

SEQ ID NO: 15850 - RNA, 20 nt, Artificial Sequence
  Synthetic
ugagcgaggcacaucucaca

SEQ ID NO: 15851 - RNA, 20 nt, Artificial Sequence
  Synthetic
gagcgaggcacaucucacac

SEQ ID NO: 15852 - RNA, 20 nt, Artificial Sequence
  Synthetic
agcgaggcacaucucacaca

SEQ ID NO: 15853 - RNA, 20 nt, Artificial Sequence
  Synthetic
gcgaggcacaucucacacau

SEQ ID NO: 15854 - RNA, 20 nt, Artificial Sequence
  Synthetic
cgaggcacaucucacacaug

SEQ ID NO: 15855 - RNA, 20 nt, Artificial Sequence
  Synthetic
gaggcacaucucacacaugg

SEQ ID NO: 15856 - RNA, 20 nt, Artificial Sequence
  Synthetic
aggcacaucucacacauggg

SEQ ID NO: 15857 - RNA, 20 nt, Artificial Sequence
  Synthetic
ggcacaucucacacaugggc

SEQ ID NO: 15858 - RNA, 20 nt, Artificial Sequence
  Synthetic
gcacaucucacacaugggca

SEQ ID NO: 15859 - RNA, 20 nt, Artificial Sequence
  Synthetic
cacaucucacacaugggcau

SEQ ID NO: 15860 - RNA, 20 nt, Artificial Sequence
  Synthetic
acaucucacacaugggcaug

SEQ ID NO: 15861 - RNA, 20 nt, Artificial Sequence
  Synthetic
caucucacacaugggcauga

SEQ ID NO: 15862 - RNA, 20 nt, Artificial Sequence
  Synthetic
aucucacacaugggcaugaa

SEQ ID NO: 15863 - RNA, 20 nt, Artificial Sequence
  Synthetic
ucucacacaugggcaugaaa

SEQ ID NO: 15864 - RNA, 20 nt, Artificial Sequence
  Synthetic
cucacacaugggcaugaaaa

SEQ ID NO: 15865 - RNA, 20 nt, Artificial Sequence
  Synthetic
ucacacaugggcaugaaaac

SEQ ID NO: 15866 - RNA, 20 nt, Artificial Sequence
  Synthetic
cacacaugggcaugaaaacc

SEQ ID NO: 15867 - RNA, 20 nt, Artificial Sequence
  Synthetic
acacaugggcaugaaaaccc

SEQ ID NO: 15868 - RNA, 20 nt, Artificial Sequence
  Synthetic
cacaugggcaugaaaaccca

SEQ ID NO: 15869 - RNA, 20 nt, Artificial Sequence
  Synthetic
acaugggcaugaaaacccaa

SEQ ID NO: 15870 - RNA, 20 nt, Artificial Sequence
  Synthetic
caugggcaugaaaacccaau

SEQ ID NO: 15871 - RNA, 20 nt, Artificial Sequence
  Synthetic
augggcaugaaaacccaauc

SEQ ID NO: 15872 - RNA, 20 nt, Artificial Sequence
  Synthetic
ugggcaugaaaacccaauca

SEQ ID NO: 15873 - RNA, 20 nt, Artificial Sequence
  Synthetic
gggcaugaaaacccaaucau

SEQ ID NO: 15874 - RNA, 20 nt, Artificial Sequence
  Synthetic
ggcaugaaaacccaaucauc

SEQ ID NO: 15875 - RNA, 20 nt, Artificial Sequence
  Synthetic
gcaugaaaacccaaucaucg

SEQ ID NO: 15876 - RNA, 20 nt, Artificial Sequence
  Synthetic
caugaaaacccaaucaucgc

SEQ ID NO: 15877 - RNA, 20 nt, Artificial Sequence
  Synthetic
augaaaacccaaucaucgcu

SEQ ID NO: 15878 - RNA, 20 nt, Artificial Sequence
  Synthetic
ugaaaacccaaucaucgcuu

SEQ ID NO: 15879 - RNA, 20 nt, Artificial Sequence
  Synthetic
gaaaacccaaucaucgcuua

SEQ ID NO: 15880 - RNA, 20 nt, Artificial Sequence
  Synthetic
aaaacccaaucaucgcuuau

SEQ ID NO: 15881 - RNA, 20 nt, Artificial Sequence
  Synthetic
aaacccaaucaucgcuuaug

SEQ ID NO: 15882 - RNA, 20 nt, Artificial Sequence
  Synthetic
aacccaaucaucgcuuauga

SEQ ID NO: 15883 - RNA, 20 nt, Artificial Sequence
  Synthetic
acccaaucaucgcuuaugaa

SEQ ID NO: 15884 - RNA, 20 nt, Artificial Sequence
  Synthetic
cccaaucaucgcuuaugaaa

SEQ ID NO: 15885 - RNA, 20 nt, Artificial Sequence
  Synthetic
ccaaucaucgcuuaugaaac

SEQ ID NO: 15886 - RNA, 20 nt, Artificial Sequence
  Synthetic
caaucaucgcuuaugaaacu

SEQ ID NO: 15887 - RNA, 20 nt, Artificial Sequence
  Synthetic
aaucaucgcuuaugaaacua

SEQ ID NO: 15888 - RNA, 20 nt, Artificial Sequence
  Synthetic
aucaucgcuuaugaaacuaa

SEQ ID NO: 15889 - RNA, 20 nt, Artificial Sequence
  Synthetic
ucaucgcuuaugaaacuaac

SEQ ID NO: 15890 - RNA, 20 nt, Artificial Sequence
  Synthetic
caucgcuuaugaaacuaaca

SEQ ID NO: 15891 - RNA, 20 nt, Artificial Sequence
  Synthetic
aucgcuuaugaaacuaacau

SEQ ID NO: 15892 - RNA, 20 nt, Artificial Sequence
  Synthetic
ucgcuuaugaaacuaacauu

SEQ ID NO: 15893 - RNA, 20 nt, Artificial Sequence
  Synthetic
cgcuuaugaaacuaacauuu

SEQ ID NO: 15894 - RNA, 20 nt, Artificial Sequence
  Synthetic
gcuuaugaaacuaacauuuc

SEQ ID NO: 15895 - RNA, 20 nt, Artificial Sequence
  Synthetic
cuuaugaaacuaacauuuca

SEQ ID NO: 15896 - RNA, 20 nt, Artificial Sequence
  Synthetic
uuaugaaacuaacauuucaa

SEQ ID NO: 15897 - RNA, 20 nt, Artificial Sequence
  Synthetic
uaugaaacuaacauuucaau

SEQ ID NO: 15898 - RNA, 20 nt, Artificial Sequence
  Synthetic
augaaacuaacauuucaaua

SEQ ID NO: 15899 - RNA, 20 nt, Artificial Sequence
  Synthetic
ugaaacuaacauuucaauag

SEQ ID NO: 15900 - RNA, 20 nt, Artificial Sequence
  Synthetic
gaaacuaacauuucaauaga

SEQ ID NO: 15901 - RNA, 20 nt, Artificial Sequence
  Synthetic
aaacuaacauuucaauagaa

SEQ ID NO: 15902 - RNA, 20 nt, Artificial Sequence
  Synthetic
aacuaacauuucaauagaaa

SEQ ID NO: 15903 - RNA, 20 nt, Artificial Sequence
  Synthetic
acuaacauuucaauagaaau

SEQ ID NO: 15904 - RNA, 20 nt, Artificial Sequence
  Synthetic
cuaacauuucaauagaaaua

SEQ ID NO: 15905 - RNA, 20 nt, Artificial Sequence
  Synthetic
uaacauuucaauagaaauac

SEQ ID NO: 15906 - RNA, 20 nt, Artificial Sequence
  Synthetic
aacauuucaauagaaauaca

SEQ ID NO: 15907 - RNA, 20 nt, Artificial Sequence
  Synthetic
acauuucaauagaaauacau

SEQ ID NO: 15908 - RNA, 20 nt, Artificial Sequence
  Synthetic
cauuucaauagaaauacauu

SEQ ID NO: 15909 - RNA, 20 nt, Artificial Sequence
  Synthetic
auuucaauagaaauacauua

SEQ ID NO: 15910 - RNA, 20 nt, Artificial Sequence
  Synthetic
uuucaauagaaauacauuau

SEQ ID NO: 15911 - RNA, 20 nt, Artificial Sequence
  Synthetic
uucaauagaaauacauuaug

SEQ ID NO: 15912 - RNA, 20 nt, Artificial Sequence
  Synthetic
ucaauagaaauacauuauga

SEQ ID NO: 15913 - RNA, 20 nt, Artificial Sequence
  Synthetic
caauagaaauacauuaugaa

SEQ ID NO: 15914 - RNA, 20 nt, Artificial Sequence
  Synthetic
aauagaaauacauuaugaaa

SEQ ID NO: 15915 - RNA, 20 nt, Artificial Sequence
  Synthetic
auagaaauacauuaugaaag

SEQ ID NO: 15916 - RNA, 20 nt, Artificial Sequence
  Synthetic
uagaaauacauuaugaaagu

SEQ ID NO: 15917 - RNA, 20 nt, Artificial Sequence
  Synthetic
agaaauacauuaugaaaguu

SEQ ID NO: 15918 - RNA, 20 nt, Artificial Sequence
  Synthetic
gaaauacauuaugaaaguuc

SEQ ID NO: 15919 - RNA, 20 nt, Artificial Sequence
  Synthetic
aaauacauuaugaaaguucu

SEQ ID NO: 15920 - RNA, 20 nt, Artificial Sequence
  Synthetic
aauacauuaugaaaguucug

SEQ ID NO: 15921 - RNA, 20 nt, Artificial Sequence
  Synthetic
auacauuaugaaaguucugg

SEQ ID NO: 15922 - RNA, 20 nt, Artificial Sequence
  Synthetic
uacauuaugaaaguucuggu

SEQ ID NO: 15923 - RNA, 20 nt, Artificial Sequence
  Synthetic
acauuaugaaaguucugguu

SEQ ID NO: 15924 - RNA, 20 nt, Artificial Sequence
  Synthetic
cauuaugaaaguucugguuc

SEQ ID NO: 15925 - RNA, 20 nt, Artificial Sequence
  Synthetic
auuaugaaaguucugguucu

SEQ ID NO: 15926 - RNA, 20 nt, Artificial Sequence
  Synthetic
uuaugaaaguucugguucua

SEQ ID NO: 15927 - RNA, 20 nt, Artificial Sequence
  Synthetic
uaugaaaguucugguucuaa

SEQ ID NO: 15928 - RNA, 20 nt, Artificial Sequence
  Synthetic
augaaaguucugguucuaaa

SEQ ID NO: 15929 - RNA, 20 nt, Artificial Sequence
  Synthetic
ugaaaguucugguucuaaau

SEQ ID NO: 15930 - RNA, 20 nt, Artificial Sequence
  Synthetic
gaaaguucugguucuaaauc

SEQ ID NO: 15931 - RNA, 20 nt, Artificial Sequence
  Synthetic
aaaguucugguucuaaaucc

SEQ ID NO: 15932 - RNA, 20 nt, Artificial Sequence
  Synthetic
aaguucugguucuaaaucca

SEQ ID NO: 15933 - RNA, 20 nt, Artificial Sequence
  Synthetic
aguucugguucuaaauccau

SEQ ID NO: 15934 - RNA, 20 nt, Artificial Sequence
  Synthetic
guucugguucuaaauccaua

SEQ ID NO: 15935 - RNA, 20 nt, Artificial Sequence
  Synthetic
uucugguucuaaauccauau

SEQ ID NO: 15936 - RNA, 20 nt, Artificial Sequence
  Synthetic
ucugguucuaaauccauauu

SEQ ID NO: 15937 - RNA, 20 nt, Artificial Sequence
  Synthetic
cugguucuaaauccauauua

SEQ ID NO: 15938 - RNA, 20 nt, Artificial Sequence
  Synthetic
ugguucuaaauccauauuau

SEQ ID NO: 15939 - RNA, 20 nt, Artificial Sequence
  Synthetic
gguucuaaauccauauuauc

SEQ ID NO: 15940 - RNA, 20 nt, Artificial Sequence
  Synthetic
guucuaaauccauauuaucu

SEQ ID NO: 15941 - RNA, 20 nt, Artificial Sequence
  Synthetic
uucuaaauccauauuaucuu

SEQ ID NO: 15942 - RNA, 20 nt, Artificial Sequence
  Synthetic
ucuaaauccauauuaucuug

SEQ ID NO: 15943 - RNA, 20 nt, Artificial Sequence
  Synthetic
cuaaauccauauuaucuuga

SEQ ID NO: 15944 - RNA, 20 nt, Artificial Sequence
  Synthetic
uaaauccauauuaucuugag

SEQ ID NO: 15945 - RNA, 20 nt, Artificial Sequence
  Synthetic
aaauccauauuaucuugagg

SEQ ID NO: 15946 - RNA, 20 nt, Artificial Sequence
  Synthetic
aauccauauuaucuugaggg

SEQ ID NO: 15947 - RNA, 20 nt, Artificial Sequence
  Synthetic
auccauauuaucuugagggc

SEQ ID NO: 15948 - RNA, 20 nt, Artificial Sequence
  Synthetic
uccauauuaucuugagggca

SEQ ID NO: 15949 - RNA, 20 nt, Artificial Sequence
  Synthetic
ccauauuaucuugagggcau

SEQ ID NO: 15950 - RNA, 20 nt, Artificial Sequence
  Synthetic
cauauuaucuugagggcaua

SEQ ID NO: 15951 - RNA, 20 nt, Artificial Sequence
  Synthetic
auauuaucuugagggcauau

SEQ ID NO: 15952 - RNA, 20 nt, Artificial Sequence
  Synthetic
uauuaucuugagggcauauc

SEQ ID NO: 15953 - RNA, 20 nt, Artificial Sequence
  Synthetic
auuaucuugagggcauaucc

SEQ ID NO: 15954 - RNA, 20 nt, Artificial Sequence
  Synthetic
uuaucuugagggcauaucca

SEQ ID NO: 15955 - RNA, 20 nt, Artificial Sequence
  Synthetic
uaucuugagggcauauccac

SEQ ID NO: 15956 - RNA, 20 nt, Artificial Sequence
  Synthetic
aucuugagggcauauccacu

SEQ ID NO: 15957 - RNA, 20 nt, Artificial Sequence
  Synthetic
ucuugagggcauauccacug

SEQ ID NO: 15958 - RNA, 20 nt, Artificial Sequence
  Synthetic
cuugagggcauauccacuga

SEQ ID NO: 15959 - RNA, 20 nt, Artificial Sequence
  Synthetic
uugagggcauauccacugau

SEQ ID NO: 15960 - RNA, 20 nt, Artificial Sequence
  Synthetic
ugagggcauauccacugaug

SEQ ID NO: 15961 - RNA, 20 nt, Artificial Sequence
  Synthetic
gagggcauauccacugaugc

SEQ ID NO: 15962 - RNA, 20 nt, Artificial Sequence
  Synthetic
agggcauauccacugaugca

SEQ ID NO: 15963 - RNA, 20 nt, Artificial Sequence
  Synthetic
gggcauauccacugaugcaa

SEQ ID NO: 15964 - RNA, 20 nt, Artificial Sequence
  Synthetic
ggcauauccacugaugcaau

SEQ ID NO: 15965 - RNA, 20 nt, Artificial Sequence
  Synthetic
gcauauccacugaugcaaug

SEQ ID NO: 15966 - RNA, 20 nt, Artificial Sequence
  Synthetic
cauauccacugaugcaaugg

SEQ ID NO: 15967 - RNA, 20 nt, Artificial Sequence
  Synthetic
auauccacugaugcaaugga

SEQ ID NO: 15968 - RNA, 20 nt, Artificial Sequence
  Synthetic
uauccacugaugcaauggau

SEQ ID NO: 15969 - RNA, 20 nt, Artificial Sequence
  Synthetic
auccacugaugcaauggaua

SEQ ID NO: 15970 - RNA, 20 nt, Artificial Sequence
  Synthetic
uccacugaugcaauggauau

SEQ ID NO: 15971 - RNA, 20 nt, Artificial Sequence
  Synthetic
ccacugaugcaauggauaug

SEQ ID NO: 15972 - RNA, 20 nt, Artificial Sequence
  Synthetic
cacugaugcaauggauauga

SEQ ID NO: 15973 - RNA, 20 nt, Artificial Sequence
  Synthetic
acugaugcaauggauaugau

SEQ ID NO: 15974 - RNA, 20 nt, Artificial Sequence
  Synthetic
cugaugcaauggauaugauc

SEQ ID NO: 15975 - RNA, 20 nt, Artificial Sequence
  Synthetic
ugaugcaauggauaugauca

SEQ ID NO: 15976 - RNA, 20 nt, Artificial Sequence
  Synthetic
gaugcaauggauaugaucau

SEQ ID NO: 15977 - RNA, 20 nt, Artificial Sequence
  Synthetic
augcaauggauaugaucauu

SEQ ID NO: 15978 - RNA, 20 nt, Artificial Sequence
  Synthetic
ugcaauggauaugaucauua

SEQ ID NO: 15979 - RNA, 20 nt, Artificial Sequence
  Synthetic
gcaauggauaugaucauuau

SEQ ID NO: 15980 - RNA, 20 nt, Artificial Sequence
  Synthetic
caauggauaugaucauuauu

SEQ ID NO: 15981 - RNA, 20 nt, Artificial Sequence
  Synthetic
aauggauaugaucauuauuu

SEQ ID NO: 15982 - RNA, 20 nt, Artificial Sequence
  Synthetic
auggauaugaucauuauuug

SEQ ID NO: 15983 - RNA, 20 nt, Artificial Sequence
  Synthetic
uggauaugaucauuauuuga

SEQ ID NO: 15984 - RNA, 20 nt, Artificial Sequence
  Synthetic
ggauaugaucauuauuugau

SEQ ID NO: 15985 - RNA, 20 nt, Artificial Sequence
  Synthetic
gauaugaucauuauuugauu

SEQ ID NO: 15986 - RNA, 20 nt, Artificial Sequence
  Synthetic
auaugaucauuauuugauuu

SEQ ID NO: 15987 - RNA, 20 nt, Artificial Sequence
  Synthetic
uaugaucauuauuugauuug

SEQ ID NO: 15988 - RNA, 20 nt, Artificial Sequence
  Synthetic
augaucauuauuugauuuga

SEQ ID NO: 15989 - RNA, 20 nt, Artificial Sequence
  Synthetic
ugaucauuauuugauuugau

SEQ ID NO: 15990 - RNA, 20 nt, Artificial Sequence
  Synthetic
gaucauuauuugauuugaua

SEQ ID NO: 15991 - RNA, 20 nt, Artificial Sequence
  Synthetic
aucauuauuugauuugauau

SEQ ID NO: 15992 - RNA, 20 nt, Artificial Sequence
  Synthetic
ucauuauuugauuugauauc

SEQ ID NO: 15993 - RNA, 20 nt, Artificial Sequence
  Synthetic
cauuauuugauuugauauca

SEQ ID NO: 15994 - RNA, 20 nt, Artificial Sequence
  Synthetic
auuauuugauuugauaucaa

SEQ ID NO: 15995 - RNA, 20 nt, Artificial Sequence
  Synthetic
uuauuugauuugauaucaaa

SEQ ID NO: 15996 - RNA, 20 nt, Artificial Sequence
  Synthetic
uauuugauuugauaucaaac

SEQ ID NO: 15997 - RNA, 20 nt, Artificial Sequence
  Synthetic
auuugauuugauaucaaacu

SEQ ID NO: 15998 - RNA, 20 nt, Artificial Sequence
  Synthetic
uuugauuugauaucaaacua

SEQ ID NO: 15999 - RNA, 20 nt, Artificial Sequence
  Synthetic
uugauuugauaucaaacuaa

SEQ ID NO: 16000 - RNA, 20 nt, Artificial Sequence
  Synthetic
ugauuugauaucaaacuaaa

SEQ ID NO: 16001 - RNA, 20 nt, Artificial Sequence
  Synthetic
gauuugauaucaaacuaaaa

SEQ ID NO: 16002 - RNA, 20 nt, Artificial Sequence
  Synthetic
auuugauaucaaacuaaaac

SEQ ID NO: 16003 - RNA, 20 nt, Artificial Sequence
  Synthetic
uuugauaucaaacuaaaacg

SEQ ID NO: 16004 - RNA, 20 nt, Artificial Sequence
  Synthetic
uugauaucaaacuaaaacga

SEQ ID NO: 16005 - RNA, 20 nt, Artificial Sequence
  Synthetic
ugauaucaaacuaaaacgag

SEQ ID NO: 16006 - RNA, 20 nt, Artificial Sequence
  Synthetic
gauaucaaacuaaaacgagu

SEQ ID NO: 16007 - RNA, 20 nt, Artificial Sequence
  Synthetic
auaucaaacuaaaacgagug

SEQ ID NO: 16008 - RNA, 20 nt, Artificial Sequence
  Synthetic
uaucaaacuaaaacgaguga

SEQ ID NO: 16009 - RNA, 20 nt, Artificial Sequence
  Synthetic
aucaaacuaaaacgagugag

SEQ ID NO: 16010 - RNA, 20 nt, Artificial Sequence
  Synthetic
ucaaacuaaaacgagugaga

SEQ ID NO: 16011 - RNA, 20 nt, Artificial Sequence
  Synthetic
caaacuaaaacgagugagaa

SEQ ID NO: 16012 - RNA, 20 nt, Artificial Sequence
  Synthetic
aaacuaaaacgagugagaaa

SEQ ID NO: 16013 - RNA, 20 nt, Artificial Sequence
  Synthetic
aacuaaaacgagugagaaaa

SEQ ID NO: 16014 - RNA, 20 nt, Artificial Sequence
  Synthetic
acuaaaacgagugagaaaaa

SEQ ID NO: 16015 - RNA, 20 nt, Artificial Sequence
  Synthetic
cuaaaacgagugagaaaaaa

SEQ ID NO: 16016 - RNA, 20 nt, Artificial Sequence
  Synthetic
uaaaacgagugagaaaaaaa

SEQ ID NO: 16017 - RNA, 20 nt, Artificial Sequence
  Synthetic
aaaacgagugagaaaaaaaa

SEQ ID NO: 16018 - RNA, 20 nt, Artificial Sequence
  Synthetic
aaacgagugagaaaaaaaaa

SEQ ID NO: 16019 - RNA, 20 nt, Artificial Sequence
  Synthetic
aacgagugagaaaaaaaaaa

SEQ ID NO: 16020 - RNA, 20 nt, Artificial Sequence
  Synthetic
acgagugagaaaaaaaaaaa

SEQ ID NO: 16021 - RNA, 20 nt, Artificial Sequence
  Synthetic
cgagugagaaaaaaaaaaag

SEQ ID NO: 16022 - RNA, 20 nt, Artificial Sequence
  Synthetic
gagugagaaaaaaaaaaaga

SEQ ID NO: 16023 - RNA, 20 nt, Artificial Sequence
  Synthetic
agugagaaaaaaaaaaagaa

SEQ ID NO: 16024 - RNA, 20 nt, Artificial Sequence
  Synthetic
gugagaaaaaaaaaaagaaa

SEQ ID NO: 16025 - RNA, 20 nt, Artificial Sequence
  Synthetic
ugagaaaaaaaaaaagaaac

SEQ ID NO: 16026 - RNA, 20 nt, Artificial Sequence
  Synthetic
gagaaaaaaaaaaagaaacc

SEQ ID NO: 16027 - RNA, 20 nt, Artificial Sequence
  Synthetic
agaaaaaaaaaaagaaaccc

SEQ ID NO: 16028 - RNA, 20 nt, Artificial Sequence
  Synthetic
gaaaaaaaaaaagaaacccc

SEQ ID NO: 16029 - RNA, 20 nt, Artificial Sequence
  Synthetic
aaaaaaaaaaagaaacccca

SEQ ID NO: 16030 - RNA, 20 nt, Artificial Sequence
  Synthetic
aaaaaaaaaagaaaccccag

SEQ ID NO: 16031 - RNA, 20 nt, Artificial Sequence
  Synthetic
aaaaaaaaagaaaccccaga

SEQ ID NO: 16032 - RNA, 20 nt, Artificial Sequence
  Synthetic
aaaaaaaagaaaccccagaa

SEQ ID NO: 16033 - RNA, 20 nt, Artificial Sequence
  Synthetic
aaaaaaagaaaccccagaau

SEQ ID NO: 16034 - RNA, 20 nt, Artificial Sequence
  Synthetic
aaaaaagaaaccccagaaua

SEQ ID NO: 16035 - RNA, 20 nt, Artificial Sequence
  Synthetic
aaaaagaaaccccagaauau

SEQ ID NO: 16036 - RNA, 20 nt, Artificial Sequence
  Synthetic
aaaagaaaccccagaauaug

SEQ ID NO: 16037 - RNA, 20 nt, Artificial Sequence
  Synthetic
aaagaaaccccagaauaugu

SEQ ID NO: 16038 - RNA, 20 nt, Artificial Sequence
  Synthetic
aagaaaccccagaauauguu

SEQ ID NO: 16039 - RNA, 20 nt, Artificial Sequence
  Synthetic
agaaaccccagaauauguua

SEQ ID NO: 16040 - RNA, 20 nt, Artificial Sequence
  Synthetic
gaaaccccagaauauguuac

SEQ ID NO: 16041 - RNA, 20 nt, Artificial Sequence
  Synthetic
aaaccccagaauauguuaca

SEQ ID NO: 16042 - RNA, 20 nt, Artificial Sequence
  Synthetic
aaccccagaauauguuacag

SEQ ID NO: 16043 - RNA, 20 nt, Artificial Sequence
  Synthetic
accccagaauauguuacagu

SEQ ID NO: 16044 - RNA, 20 nt, Artificial Sequence
  Synthetic
ccccagaauauguuacaguu

SEQ ID NO: 16045 - RNA, 20 nt, Artificial Sequence
  Synthetic
cccagaauauguuacaguug

SEQ ID NO: 16046 - RNA, 20 nt, Artificial Sequence
  Synthetic
ccagaauauguuacaguugu

SEQ ID NO: 16047 - RNA, 20 nt, Artificial Sequence
  Synthetic
cagaauauguuacaguuguu

SEQ ID NO: 16048 - RNA, 20 nt, Artificial Sequence
  Synthetic
agaauauguuacaguuguuu

SEQ ID NO: 16049 - RNA, 20 nt, Artificial Sequence
  Synthetic
gaauauguuacaguuguuuu

SEQ ID NO: 16050 - RNA, 20 nt, Artificial Sequence
  Synthetic
aauauguuacaguuguuuuu

SEQ ID NO: 16051 - RNA, 20 nt, Artificial Sequence
  Synthetic
auauguuacaguuguuuuua

SEQ ID NO: 16052 - RNA, 20 nt, Artificial Sequence
  Synthetic
uauguuacaguuguuuuuau

SEQ ID NO: 16053 - RNA, 20 nt, Artificial Sequence
  Synthetic
auguuacaguuguuuuuauu

SEQ ID NO: 16054 - RNA, 20 nt, Artificial Sequence
  Synthetic
uguuacaguuguuuuuauuc

SEQ ID NO: 16055 - RNA, 20 nt, Artificial Sequence
  Synthetic
guuacaguuguuuuuauucc

SEQ ID NO: 16056 - RNA, 20 nt, Artificial Sequence
  Synthetic
uuacaguuguuuuuauucca

SEQ ID NO: 16057 - RNA, 20 nt, Artificial Sequence
  Synthetic
uacaguuguuuuuauuccaa

SEQ ID NO: 16058 - RNA, 20 nt, Artificial Sequence
  Synthetic
acaguuguuuuuauuccaac

SEQ ID NO: 16059 - RNA, 20 nt, Artificial Sequence
  Synthetic
caguuguuuuuauuccaacu

SEQ ID NO: 16060 - RNA, 20 nt, Artificial Sequence
  Synthetic
aguuguuuuuauuccaacug

SEQ ID NO: 16061 - RNA, 20 nt, Artificial Sequence
  Synthetic
guuguuuuuauuccaacuga

SEQ ID NO: 16062 - RNA, 20 nt, Artificial Sequence
  Synthetic
uuguuuuuauuccaacugaa

SEQ ID NO: 16063 - RNA, 20 nt, Artificial Sequence
  Synthetic
uguuuuuauuccaacugaaa

SEQ ID NO: 16064 - RNA, 20 nt, Artificial Sequence
  Synthetic
guuuuuauuccaacugaaaa

SEQ ID NO: 16065 - RNA, 20 nt, Artificial Sequence
  Synthetic
uuuuuauuccaacugaaaau

SEQ ID NO: 16066 - RNA, 20 nt, Artificial Sequence
  Synthetic
uuuuauuccaacugaaaauu

SEQ ID NO: 16067 - RNA, 20 nt, Artificial Sequence
  Synthetic
uuuauuccaacugaaaauug

SEQ ID NO: 16068 - RNA, 20 nt, Artificial Sequence
  Synthetic
uuauuccaacugaaaauuga

SEQ ID NO: 16069 - RNA, 20 nt, Artificial Sequence
  Synthetic
uauuccaacugaaaauugag

SEQ ID NO: 16070 - RNA, 20 nt, Artificial Sequence
  Synthetic
auuccaacugaaaauugagu

SEQ ID NO: 16071 - RNA, 20 nt, Artificial Sequence
  Synthetic
uuccaacugaaaauugagua

SEQ ID NO: 16072 - RNA, 20 nt, Artificial Sequence
  Synthetic
uccaacugaaaauugaguaa

SEQ ID NO: 16073 - RNA, 20 nt, Artificial Sequence
  Synthetic
ccaacugaaaauugaguaag

SEQ ID NO: 16074 - RNA, 20 nt, Artificial Sequence
  Synthetic
caacugaaaauugaguaagg

SEQ ID NO: 16075 - RNA, 20 nt, Artificial Sequence
  Synthetic
aacugaaaauugaguaaggg

SEQ ID NO: 16076 - RNA, 20 nt, Artificial Sequence
  Synthetic
acugaaaauugaguaagggu

SEQ ID NO: 16077 - RNA, 20 nt, Artificial Sequence
  Synthetic
cugaaaauugaguaagggua

SEQ ID NO: 16078 - RNA, 20 nt, Artificial Sequence
  Synthetic
ugaaaauugaguaaggguaa

SEQ ID NO: 16079 - RNA, 20 nt, Artificial Sequence
  Synthetic
gaaaauugaguaaggguaac

SEQ ID NO: 16080 - RNA, 20 nt, Artificial Sequence
  Synthetic
aaaauugaguaaggguaacu

SEQ ID NO: 16081 - RNA, 20 nt, Artificial Sequence
  Synthetic
aaauugaguaaggguaacuc

SEQ ID NO: 16082 - RNA, 20 nt, Artificial Sequence
  Synthetic
aauugaguaaggguaacucu

SEQ ID NO: 16083 - RNA, 20 nt, Artificial Sequence
  Synthetic
auugaguaaggguaacucuu

SEQ ID NO: 16084 - RNA, 20 nt, Artificial Sequence
  Synthetic
uugaguaaggguaacucuuc

SEQ ID NO: 16085 - RNA, 20 nt, Artificial Sequence
  Synthetic
ugaguaaggguaacucuuca

SEQ ID NO: 16086 - RNA, 20 nt, Artificial Sequence
  Synthetic
gaguaaggguaacucuucac

SEQ ID NO: 16087 - RNA, 20 nt, Artificial Sequence
  Synthetic
aguaaggguaacucuucacu

SEQ ID NO: 16088 - RNA, 20 nt, Artificial Sequence
  Synthetic
guaaggguaacucuucacuu

SEQ ID NO: 16089 - RNA, 20 nt, Artificial Sequence
  Synthetic
uaaggguaacucuucacuuu

SEQ ID NO: 16090 - RNA, 20 nt, Artificial Sequence
  Synthetic
aaggguaacucuucacuuua

SEQ ID NO: 16091 - RNA, 20 nt, Artificial Sequence
  Synthetic
aggguaacucuucacuuuaa

SEQ ID NO: 16092 - RNA, 20 nt, Artificial Sequence
  Synthetic
ggguaacucuucacuuuaac

SEQ ID NO: 16093 - RNA, 20 nt, Artificial Sequence
  Synthetic
gguaacucuucacuuuaacg

SEQ ID NO: 16094 - RNA, 20 nt, Artificial Sequence
  Synthetic
guaacucuucacuuuaacgu

SEQ ID NO: 16095 - RNA, 20 nt, Artificial Sequence
  Synthetic
uaacucuucacuuuaacgua

SEQ ID NO: 16096 - RNA, 20 nt, Artificial Sequence
  Synthetic
aacucuucacuuuaacguac

SEQ ID NO: 16097 - RNA, 20 nt, Artificial Sequence
  Synthetic
acucuucacuuuaacguacc

SEQ ID NO: 16098 - RNA, 20 nt, Artificial Sequence
  Synthetic
cucuucacuuuaacguaccu

SEQ ID NO: 16099 - RNA, 20 nt, Artificial Sequence
  Synthetic
ucuucacuuuaacguaccua

SEQ ID NO: 16100 - RNA, 20 nt, Artificial Sequence
  Synthetic
cuucacuuuaacguaccuag

SEQ ID NO: 16101 - RNA, 20 nt, Artificial Sequence
  Synthetic
uucacuuuaacguaccuaga

SEQ ID NO: 16102 - RNA, 20 nt, Artificial Sequence
  Synthetic
ucacuuuaacguaccuagaa

SEQ ID NO: 16103 - RNA, 20 nt, Artificial Sequence
  Synthetic
cacuuuaacguaccuagaaa

SEQ ID NO: 16104 - RNA, 20 nt, Artificial Sequence
  Synthetic
acuuuaacguaccuagaaau

SEQ ID NO: 16105 - RNA, 20 nt, Artificial Sequence
  Synthetic
cuuuaacguaccuagaaaug

SEQ ID NO: 16106 - RNA, 20 nt, Artificial Sequence
  Synthetic
uuuaacguaccuagaaauga

SEQ ID NO: 16107 - RNA, 20 nt, Artificial Sequence
  Synthetic
uuaacguaccuagaaaugau

SEQ ID NO: 16108 - RNA, 20 nt, Artificial Sequence
  Synthetic
uaacguaccuagaaaugaua

SEQ ID NO: 16109 - RNA, 20 nt, Artificial Sequence
  Synthetic
aacguaccuagaaaugauau

SEQ ID NO: 16110 - RNA, 20 nt, Artificial Sequence
  Synthetic
acguaccuagaaaugauauc

SEQ ID NO: 16111 - RNA, 20 nt, Artificial Sequence
  Synthetic
cguaccuagaaaugauaucu

SEQ ID NO: 16112 - RNA, 20 nt, Artificial Sequence
  Synthetic
guaccuagaaaugauaucuc

SEQ ID NO: 16113 - RNA, 20 nt, Artificial Sequence
  Synthetic
uaccuagaaaugauaucucc

SEQ ID NO: 16114 - RNA, 20 nt, Artificial Sequence
  Synthetic
accuagaaaugauaucuccu

SEQ ID NO: 16115 - RNA, 20 nt, Artificial Sequence
  Synthetic
ccuagaaaugauaucuccuu

SEQ ID NO: 16116 - RNA, 20 nt, Artificial Sequence
  Synthetic
cuagaaaugauaucuccuug

SEQ ID NO: 16117 - RNA, 20 nt, Artificial Sequence
  Synthetic
uagaaaugauaucuccuugc

SEQ ID NO: 16118 - RNA, 20 nt, Artificial Sequence
  Synthetic
agaaaugauaucuccuugca

SEQ ID NO: 16119 - RNA, 20 nt, Artificial Sequence
  Synthetic
gaaaugauaucuccuugcau

SEQ ID NO: 16120 - RNA, 20 nt, Artificial Sequence
  Synthetic
aaaugauaucuccuugcaua

SEQ ID NO: 16121 - RNA, 20 nt, Artificial Sequence
  Synthetic
aaugauaucuccuugcauaa

SEQ ID NO: 16122 - RNA, 20 nt, Artificial Sequence
  Synthetic
augauaucuccuugcauaau

SEQ ID NO: 16123 - RNA, 20 nt, Artificial Sequence
  Synthetic
ugauaucuccuugcauaauu

SEQ ID NO: 16124 - RNA, 20 nt, Artificial Sequence
  Synthetic
gauaucuccuugcauaauua

SEQ ID NO: 16125 - RNA, 20 nt, Artificial Sequence
  Synthetic
auaucuccuugcauaauuag

SEQ ID NO: 16126 - RNA, 20 nt, Artificial Sequence
  Synthetic
uaucuccuugcauaauuagu

SEQ ID NO: 16127 - RNA, 20 nt, Artificial Sequence
  Synthetic
aucuccuugcauaauuaguc

SEQ ID NO: 16128 - RNA, 20 nt, Artificial Sequence
  Synthetic
ucuccuugcauaauuaguca

SEQ ID NO: 16129 - RNA, 20 nt, Artificial Sequence
  Synthetic
cuccuugcauaauuagucau

SEQ ID NO: 16130 - RNA, 20 nt, Artificial Sequence
  Synthetic
uccuugcauaauuagucauu

SEQ ID NO: 16131 - RNA, 20 nt, Artificial Sequence
  Synthetic
ccuugcauaauuagucauuu

SEQ ID NO: 16132 - RNA, 20 nt, Artificial Sequence
  Synthetic
cuugcauaauuagucauuua

SEQ ID NO: 16133 - RNA, 20 nt, Artificial Sequence
  Synthetic
uugcauaauuagucauuuaa

SEQ ID NO: 16134 - RNA, 20 nt, Artificial Sequence
  Synthetic
ugcauaauuagucauuuaac

SEQ ID NO: 16135 - RNA, 20 nt, Artificial Sequence
  Synthetic
gcauaauuagucauuuaaca

SEQ ID NO: 16136 - RNA, 20 nt, Artificial Sequence
  Synthetic
cauaauuagucauuuaacag

SEQ ID NO: 16137 - RNA, 20 nt, Artificial Sequence
  Synthetic
auaauuagucauuuaacaga

SEQ ID NO: 16138 - RNA, 20 nt, Artificial Sequence
  Synthetic
uaauuagucauuuaacagag

SEQ ID NO: 16139 - RNA, 20 nt, Artificial Sequence
  Synthetic
aauuagucauuuaacagagc

SEQ ID NO: 16140 - RNA, 20 nt, Artificial Sequence
  Synthetic
auuagucauuuaacagagcc

SEQ ID NO: 16141 - RNA, 20 nt, Artificial Sequence
  Synthetic
uuagucauuuaacagagcca

SEQ ID NO: 16142 - RNA, 20 nt, Artificial Sequence
  Synthetic
uagucauuuaacagagccag

SEQ ID NO: 16143 - RNA, 20 nt, Artificial Sequence
  Synthetic
agucauuuaacagagccagc

SEQ ID NO: 16144 - RNA, 20 nt, Artificial Sequence
  Synthetic
gucauuuaacagagccagca

SEQ ID NO: 16145 - RNA, 20 nt, Artificial Sequence
  Synthetic
ucauuuaacagagccagcaa

SEQ ID NO: 16146 - RNA, 20 nt, Artificial Sequence
  Synthetic
cauuuaacagagccagcaac

SEQ ID NO: 16147 - RNA, 20 nt, Artificial Sequence
  Synthetic
auuuaacagagccagcaacc

SEQ ID NO: 16148 - RNA, 20 nt, Artificial Sequence
  Synthetic
uuuaacagagccagcaacca

SEQ ID NO: 16149 - RNA, 20 nt, Artificial Sequence
  Synthetic
uuaacagagccagcaaccau

SEQ ID NO: 16150 - RNA, 20 nt, Artificial Sequence
  Synthetic
uaacagagccagcaaccauc

SEQ ID NO: 16151 - RNA, 20 nt, Artificial Sequence
  Synthetic
aacagagccagcaaccaucc

SEQ ID NO: 16152 - RNA, 20 nt, Artificial Sequence
  Synthetic
acagagccagcaaccaucca

SEQ ID NO: 16153 - RNA, 20 nt, Artificial Sequence
  Synthetic
cagagccagcaaccauccag

SEQ ID NO: 16154 - RNA, 20 nt, Artificial Sequence
  Synthetic
agagccagcaaccauccagg

SEQ ID NO: 16155 - RNA, 20 nt, Artificial Sequence
  Synthetic
gagccagcaaccauccagga

SEQ ID NO: 16156 - RNA, 20 nt, Artificial Sequence
  Synthetic
agccagcaaccauccaggag

SEQ ID NO: 16157 - RNA, 20 nt, Artificial Sequence
  Synthetic
gccagcaaccauccaggagc

SEQ ID NO: 16158 - RNA, 20 nt, Artificial Sequence
  Synthetic
ccagcaaccauccaggagcu

SEQ ID NO: 16159 - RNA, 20 nt, Artificial Sequence
  Synthetic
cagcaaccauccaggagcuu

SEQ ID NO: 16160 - RNA, 20 nt, Artificial Sequence
  Synthetic
agcaaccauccaggagcuug

SEQ ID NO: 16161 - RNA, 20 nt, Artificial Sequence
  Synthetic
gcaaccauccaggagcuugg

SEQ ID NO: 16162 - RNA, 20 nt, Artificial Sequence
  Synthetic
caaccauccaggagcuuggc

SEQ ID NO: 16163 - RNA, 20 nt, Artificial Sequence
  Synthetic
aaccauccaggagcuuggcu

SEQ ID NO: 16164 - RNA, 20 nt, Artificial Sequence
  Synthetic
accauccaggagcuuggcuu

SEQ ID NO: 16165 - RNA, 20 nt, Artificial Sequence
  Synthetic
ccauccaggagcuuggcuug

SEQ ID NO: 16166 - RNA, 20 nt, Artificial Sequence
  Synthetic
cauccaggagcuuggcuugg

SEQ ID NO: 16167 - RNA, 20 nt, Artificial Sequence
  Synthetic
auccaggagcuuggcuuggu

SEQ ID NO: 16168 - RNA, 20 nt, Artificial Sequence
  Synthetic
uccaggagcuuggcuuggug

SEQ ID NO: 16169 - RNA, 20 nt, Artificial Sequence
  Synthetic
ccaggagcuuggcuuggugu

SEQ ID NO: 16170 - RNA, 20 nt, Artificial Sequence
  Synthetic
caggagcuuggcuugguguc

SEQ ID NO: 16171 - RNA, 20 nt, Artificial Sequence
  Synthetic
aggagcuuggcuugguguca

SEQ ID NO: 16172 - RNA, 20 nt, Artificial Sequence
  Synthetic
ggagcuuggcuuggugucau

SEQ ID NO: 16173 - RNA, 20 nt, Artificial Sequence
  Synthetic
gagcuuggcuuggugucaua

SEQ ID NO: 16174 - RNA, 20 nt, Artificial Sequence
  Synthetic
agcuuggcuuggugucauaa

SEQ ID NO: 16175 - RNA, 20 nt, Artificial Sequence
  Synthetic
gcuuggcuuggugucauaag

SEQ ID NO: 16176 - RNA, 20 nt, Artificial Sequence
  Synthetic
cuuggcuuggugucauaaga

SEQ ID NO: 16177 - RNA, 20 nt, Artificial Sequence
  Synthetic
uuggcuuggugucauaagac

SEQ ID NO: 16178 - RNA, 20 nt, Artificial Sequence
  Synthetic
uggcuuggugucauaagaca

SEQ ID NO: 16179 - RNA, 20 nt, Artificial Sequence
  Synthetic
ggcuuggugucauaagacau

SEQ ID NO: 16180 - RNA, 20 nt, Artificial Sequence
  Synthetic
gcuuggugucauaagacaug

SEQ ID NO: 16181 - RNA, 20 nt, Artificial Sequence
  Synthetic
cuuggugucauaagacaugu

SEQ ID NO: 16182 - RNA, 20 nt, Artificial Sequence
  Synthetic
uuggugucauaagacaugug

SEQ ID NO: 16183 - RNA, 20 nt, Artificial Sequence
  Synthetic
uggugucauaagacaugugu

SEQ ID NO: 16184 - RNA, 20 nt, Artificial Sequence
  Synthetic
ggugucauaagacaugugua

SEQ ID NO: 16185 - RNA, 20 nt, Artificial Sequence
  Synthetic
gugucauaagacauguguaa

SEQ ID NO: 16186 - RNA, 20 nt, Artificial Sequence
  Synthetic
ugucauaagacauguguaag

SEQ ID NO: 16187 - RNA, 20 nt, Artificial Sequence
  Synthetic
gucauaagacauguguaagu

SEQ ID NO: 16188 - RNA, 20 nt, Artificial Sequence
  Synthetic
ucauaagacauguguaagua

SEQ ID NO: 16189 - RNA, 20 nt, Artificial Sequence
  Synthetic
cauaagacauguguaaguag

SEQ ID NO: 16190 - RNA, 20 nt, Artificial Sequence
  Synthetic
auaagacauguguaaguagc

SEQ ID NO: 16191 - RNA, 20 nt, Artificial Sequence
  Synthetic
uaagacauguguaaguagca

SEQ ID NO: 16192 - RNA, 20 nt, Artificial Sequence
  Synthetic
aagacauguguaaguagcaa

SEQ ID NO: 16193 - RNA, 20 nt, Artificial Sequence
  Synthetic
agacauguguaaguagcaaa

SEQ ID NO: 16194 - RNA, 20 nt, Artificial Sequence
  Synthetic
gacauguguaaguagcaaag

SEQ ID NO: 16195 - RNA, 20 nt, Artificial Sequence
  Synthetic
acauguguaaguagcaaagc

SEQ ID NO: 16196 - RNA, 20 nt, Artificial Sequence
  Synthetic
cauguguaaguagcaaagca

SEQ ID NO: 16197 - RNA, 20 nt, Artificial Sequence
  Synthetic
auguguaaguagcaaagcac

SEQ ID NO: 16198 - RNA, 20 nt, Artificial Sequence
  Synthetic
uguguaaguagcaaagcacu

SEQ ID NO: 16199 - RNA, 20 nt, Artificial Sequence
  Synthetic
guguaaguagcaaagcacug

SEQ ID NO: 16200 - RNA, 20 nt, Artificial Sequence
  Synthetic
uguaaguagcaaagcacugu

SEQ ID NO: 16201 - RNA, 20 nt, Artificial Sequence
  Synthetic
guaaguagcaaagcacuguc

SEQ ID NO: 16202 - RNA, 20 nt, Artificial Sequence
  Synthetic
uaaguagcaaagcacugucu

SEQ ID NO: 16203 - RNA, 20 nt, Artificial Sequence
  Synthetic
aaguagcaaagcacugucug

SEQ ID NO: 16204 - RNA, 20 nt, Artificial Sequence
  Synthetic
aguagcaaagcacugucugg

SEQ ID NO: 16205 - RNA, 20 nt, Artificial Sequence
  Synthetic
guagcaaagcacugucuggu

SEQ ID NO: 16206 - RNA, 20 nt, Artificial Sequence
  Synthetic
uagcaaagcacugucugguu

SEQ ID NO: 16207 - RNA, 20 nt, Artificial Sequence
  Synthetic
agcaaagcacugucugguuu

SEQ ID NO: 16208 - RNA, 20 nt, Artificial Sequence
  Synthetic
gcaaagcacugucugguuuu

SEQ ID NO: 16209 - RNA, 20 nt, Artificial Sequence
  Synthetic
caaagcacugucugguuuug

SEQ ID NO: 16210 - RNA, 20 nt, Artificial Sequence
  Synthetic
aaagcacugucugguuuuga

SEQ ID NO: 16211 - RNA, 20 nt, Artificial Sequence
  Synthetic
aagcacugucugguuuugaa

SEQ ID NO: 16212 - RNA, 20 nt, Artificial Sequence
  Synthetic
agcacugucugguuuugaaa

SEQ ID NO: 16213 - RNA, 20 nt, Artificial Sequence
  Synthetic
gcacugucugguuuugaaau

SEQ ID NO: 16214 - RNA, 20 nt, Artificial Sequence
  Synthetic
cacugucugguuuugaaauc

SEQ ID NO: 16215 - RNA, 20 nt, Artificial Sequence
  Synthetic
acugucugguuuugaaaucu

SEQ ID NO: 16216 - RNA, 20 nt, Artificial Sequence
  Synthetic
cugucugguuuugaaaucuc

SEQ ID NO: 16217 - RNA, 20 nt, Artificial Sequence
  Synthetic
ugucugguuuugaaaucuca

SEQ ID NO: 16218 - RNA, 20 nt, Artificial Sequence
  Synthetic
gucugguuuugaaaucucaa

SEQ ID NO: 16219 - RNA, 20 nt, Artificial Sequence
  Synthetic
ucugguuuugaaaucucaaa

SEQ ID NO: 16220 - RNA, 20 nt, Artificial Sequence
  Synthetic
cugguuuugaaaucucaaaa

SEQ ID NO: 16221 - RNA, 20 nt, Artificial Sequence
  Synthetic
ugguuuugaaaucucaaaac

SEQ ID NO: 16222 - RNA, 20 nt, Artificial Sequence
  Synthetic
gguuuugaaaucucaaaacc

SEQ ID NO: 16223 - RNA, 20 nt, Artificial Sequence
  Synthetic
guuuugaaaucucaaaacca

SEQ ID NO: 16224 - RNA, 20 nt, Artificial Sequence
  Synthetic
uuuugaaaucucaaaaccau

SEQ ID NO: 16225 - RNA, 20 nt, Artificial Sequence
  Synthetic
uuugaaaucucaaaaccaug

SEQ ID NO: 16226 - RNA, 20 nt, Artificial Sequence
  Synthetic
uugaaaucucaaaaccauga

SEQ ID NO: 16227 - RNA, 20 nt, Artificial Sequence
  Synthetic
ugaaaucucaaaaccaugag

SEQ ID NO: 16228 - RNA, 20 nt, Artificial Sequence
  Synthetic
gaaaucucaaaaccaugagu

SEQ ID NO: 16229 - RNA, 20 nt, Artificial Sequence
  Synthetic
aaaucucaaaaccaugagua

SEQ ID NO: 16230 - RNA, 20 nt, Artificial Sequence
  Synthetic
aaucucaaaaccaugaguau

SEQ ID NO: 16231 - RNA, 20 nt, Artificial Sequence
  Synthetic
aucucaaaaccaugaguauu

SEQ ID NO: 16232 - RNA, 20 nt, Artificial Sequence
  Synthetic
ucucaaaaccaugaguauug

SEQ ID NO: 16233 - RNA, 20 nt, Artificial Sequence
  Synthetic
cucaaaaccaugaguauuga

SEQ ID NO: 16234 - RNA, 20 nt, Artificial Sequence
  Synthetic
ucaaaaccaugaguauugaa

SEQ ID NO: 16235 - RNA, 20 nt, Artificial Sequence
  Synthetic
caaaaccaugaguauugaaa

SEQ ID NO: 16236 - RNA, 20 nt, Artificial Sequence
  Synthetic
aaaaccaugaguauugaaau

SEQ ID NO: 16237 - RNA, 20 nt, Artificial Sequence
  Synthetic
aaaccaugaguauugaaaug

SEQ ID NO: 16238 - RNA, 20 nt, Artificial Sequence
  Synthetic
aaccaugaguauugaaaugu

SEQ ID NO: 16239 - RNA, 20 nt, Artificial Sequence
  Synthetic
accaugaguauugaaauguu

SEQ ID NO: 16240 - RNA, 20 nt, Artificial Sequence
  Synthetic
ccaugaguauugaaauguug

SEQ ID NO: 16241 - RNA, 20 nt, Artificial Sequence
  Synthetic
caugaguauugaaauguugu

SEQ ID NO: 16242 - RNA, 20 nt, Artificial Sequence
  Synthetic
augaguauugaaauguugua

SEQ ID NO: 16243 - RNA, 20 nt, Artificial Sequence
  Synthetic
ugaguauugaaauguuguau

SEQ ID NO: 16244 - RNA, 20 nt, Artificial Sequence
  Synthetic
gaguauugaaauguuguauu

SEQ ID NO: 16245 - RNA, 20 nt, Artificial Sequence
  Synthetic
aguauugaaauguuguauuu

SEQ ID NO: 16246 - RNA, 20 nt, Artificial Sequence
  Synthetic
guauugaaauguuguauuug

SEQ ID NO: 16247 - RNA, 20 nt, Artificial Sequence
  Synthetic
uauugaaauguuguauuuga

SEQ ID NO: 16248 - RNA, 20 nt, Artificial Sequence
  Synthetic
auugaaauguuguauuugag

SEQ ID NO: 16249 - RNA, 20 nt, Artificial Sequence
  Synthetic
uugaaauguuguauuugagu

SEQ ID NO: 16250 - RNA, 20 nt, Artificial Sequence
  Synthetic
ugaaauguuguauuugagug

SEQ ID NO: 16251 - RNA, 20 nt, Artificial Sequence
  Synthetic
gaaauguuguauuugagugu

SEQ ID NO: 16252 - RNA, 20 nt, Artificial Sequence
  Synthetic
aaauguuguauuugaguguu

SEQ ID NO: 16253 - RNA, 20 nt, Artificial Sequence
  Synthetic
aauguuguauuugaguguuu

SEQ ID NO: 16254 - RNA, 20 nt, Artificial Sequence
  Synthetic
auguuguauuugaguguuua

SEQ ID NO: 16255 - RNA, 20 nt, Artificial Sequence
  Synthetic
uguuguauuugaguguuuaa

SEQ ID NO: 16256 - RNA, 20 nt, Artificial Sequence
  Synthetic
guuguauuugaguguuuaau

SEQ ID NO: 16257 - RNA, 20 nt, Artificial Sequence
  Synthetic
uuguauuugaguguuuaaug

SEQ ID NO: 16258 - RNA, 20 nt, Artificial Sequence
  Synthetic
uguauuugaguguuuaauga

SEQ ID NO: 16259 - RNA, 20 nt, Artificial Sequence
  Synthetic
guauuugaguguuuaaugag

SEQ ID NO: 16260 - RNA, 20 nt, Artificial Sequence
  Synthetic
uauuugaguguuuaaugaga

SEQ ID NO: 16261 - RNA, 20 nt, Artificial Sequence
  Synthetic
auuugaguguuuaaugagaa

SEQ ID NO: 16262 - RNA, 20 nt, Artificial Sequence
  Synthetic
uuugaguguuuaaugagaag

SEQ ID NO: 16263 - RNA, 20 nt, Artificial Sequence
  Synthetic
uugaguguuuaaugagaagu

SEQ ID NO: 16264 - RNA, 20 nt, Artificial Sequence
  Synthetic
ugaguguuuaaugagaagug

SEQ ID NO: 16265 - RNA, 20 nt, Artificial Sequence
  Synthetic
gaguguuuaaugagaagugg

SEQ ID NO: 16266 - RNA, 20 nt, Artificial Sequence
  Synthetic
aguguuuaaugagaaguggu

SEQ ID NO: 16267 - RNA, 20 nt, Artificial Sequence
  Synthetic
guguuuaaugagaagugguu

SEQ ID NO: 16268 - RNA, 20 nt, Artificial Sequence
  Synthetic
uguuuaaugagaagugguua

SEQ ID NO: 16269 - RNA, 20 nt, Artificial Sequence
  Synthetic
guuuaaugagaagugguuaa

SEQ ID NO: 16270 - RNA, 20 nt, Artificial Sequence
  Synthetic
uuuaaugagaagugguuaau

SEQ ID NO: 16271 - RNA, 20 nt, Artificial Sequence
  Synthetic
uuaaugagaagugguuaauc

SEQ ID NO: 16272 - RNA, 20 nt, Artificial Sequence
  Synthetic
uaaugagaagugguuaauca

SEQ ID NO: 16273 - RNA, 20 nt, Artificial Sequence
  Synthetic
aaugagaagugguuaaucau

SEQ ID NO: 16274 - RNA, 20 nt, Artificial Sequence
  Synthetic
augagaagugguuaaucauu

SEQ ID NO: 16275 - RNA, 20 nt, Artificial Sequence
  Synthetic
ugagaagugguuaaucauuu

SEQ ID NO: 16276 - RNA, 20 nt, Artificial Sequence
  Synthetic
gagaagugguuaaucauuua

SEQ ID NO: 16277 - RNA, 20 nt, Artificial Sequence
  Synthetic
agaagugguuaaucauuuac

SEQ ID NO: 16278 - RNA, 20 nt, Artificial Sequence
  Synthetic
gaagugguuaaucauuuacu

SEQ ID NO: 16279 - RNA, 20 nt, Artificial Sequence
  Synthetic
aagugguuaaucauuuacuu

SEQ ID NO: 16280 - RNA, 20 nt, Artificial Sequence
  Synthetic
agugguuaaucauuuacuuc

SEQ ID NO: 16281 - RNA, 20 nt, Artificial Sequence
  Synthetic
gugguuaaucauuuacuucc

SEQ ID NO: 16282 - RNA, 20 nt, Artificial Sequence
  Synthetic
ugguuaaucauuuacuuccu

SEQ ID NO: 16283 - RNA, 20 nt, Artificial Sequence
  Synthetic
gguuaaucauuuacuuccuu

SEQ ID NO: 16284 - RNA, 20 nt, Artificial Sequence
  Synthetic
guuaaucauuuacuuccuuu

SEQ ID NO: 16285 - RNA, 20 nt, Artificial Sequence
  Synthetic
uuaaucauuuacuuccuuuu

SEQ ID NO: 16286 - RNA, 20 nt, Artificial Sequence
  Synthetic
uaaucauuuacuuccuuuuu

SEQ ID NO: 16287 - RNA, 20 nt, Artificial Sequence
  Synthetic
aaucauuuacuuccuuuuuu

SEQ ID NO: 16288 - RNA, 20 nt, Artificial Sequence
  Synthetic
aucauuuacuuccuuuuuuc

SEQ ID NO: 16289 - RNA, 20 nt, Artificial Sequence
  Synthetic
ucauuuacuuccuuuuuuca

SEQ ID NO: 16290 - RNA, 20 nt, Artificial Sequence
  Synthetic
cauuuacuuccuuuuuucag

SEQ ID NO: 16291 - RNA, 20 nt, Artificial Sequence
  Synthetic
auuuacuuccuuuuuucagg

SEQ ID NO: 16292 - RNA, 20 nt, Artificial Sequence
  Synthetic
uuuacuuccuuuuuucagga

SEQ ID NO: 16293 - RNA, 20 nt, Artificial Sequence
  Synthetic
uuacuuccuuuuuucaggaa

SEQ ID NO: 16294 - RNA, 20 nt, Artificial Sequence
  Synthetic
uacuuccuuuuuucaggaaa

SEQ ID NO: 16295 - RNA, 20 nt, Artificial Sequence
  Synthetic
acuuccuuuuuucaggaaag

SEQ ID NO: 16296 - RNA, 20 nt, Artificial Sequence
  Synthetic
cuuccuuuuuucaggaaagg

SEQ ID NO: 16297 - RNA, 20 nt, Artificial Sequence
  Synthetic
uuccuuuuuucaggaaaggg

SEQ ID NO: 16298 - RNA, 20 nt, Artificial Sequence
  Synthetic
uccuuuuuucaggaaagggg

SEQ ID NO: 16299 - RNA, 20 nt, Artificial Sequence
  Synthetic
ccuuuuuucaggaaagggga

SEQ ID NO: 16300 - RNA, 20 nt, Artificial Sequence
  Synthetic
cuuuuuucaggaaaggggaa

SEQ ID NO: 16301 - RNA, 20 nt, Artificial Sequence
  Synthetic
uuuuuucaggaaaggggaac

SEQ ID NO: 16302 - RNA, 20 nt, Artificial Sequence
  Synthetic
uuuuucaggaaaggggaacu

SEQ ID NO: 16303 - RNA, 20 nt, Artificial Sequence
  Synthetic
uuuucaggaaaggggaacuc

SEQ ID NO: 16304 - RNA, 20 nt, Artificial Sequence
  Synthetic
uuucaggaaaggggaacucu

SEQ ID NO: 16305 - RNA, 20 nt, Artificial Sequence
  Synthetic
uucaggaaaggggaacucuc

SEQ ID NO: 16306 - RNA, 20 nt, Artificial Sequence
  Synthetic
ucaggaaaggggaacucucu

SEQ ID NO: 16307 - RNA, 20 nt, Artificial Sequence
  Synthetic
caggaaaggggaacucucug

SEQ ID NO: 16308 - RNA, 20 nt, Artificial Sequence
  Synthetic
aggaaaggggaacucucugu

SEQ ID NO: 16309 - RNA, 20 nt, Artificial Sequence
  Synthetic
ggaaaggggaacucucuguc

SEQ ID NO: 16310 - RNA, 20 nt, Artificial Sequence
  Synthetic
gaaaggggaacucucugucu

SEQ ID NO: 16311 - RNA, 20 nt, Artificial Sequence
  Synthetic
aaaggggaacucucugucuu

SEQ ID NO: 16312 - RNA, 20 nt, Artificial Sequence
  Synthetic
aaggggaacucucugucuuc

SEQ ID NO: 16313 - RNA, 20 nt, Artificial Sequence
  Synthetic
aggggaacucucugucuucu

SEQ ID NO: 16314 - RNA, 20 nt, Artificial Sequence
  Synthetic
ggggaacucucugucuucua

SEQ ID NO: 16315 - RNA, 20 nt, Artificial Sequence
  Synthetic
gggaacucucugucuucuag

SEQ ID NO: 16316 - RNA, 20 nt, Artificial Sequence
  Synthetic
ggaacucucugucuucuaga

SEQ ID NO: 16317 - RNA, 20 nt, Artificial Sequence
  Synthetic
gaacucucugucuucuagac

SEQ ID NO: 16318 - RNA, 20 nt, Artificial Sequence
  Synthetic
aacucucugucuucuagaca

SEQ ID NO: 16319 - RNA, 20 nt, Artificial Sequence
  Synthetic
acucucugucuucuagacaa

SEQ ID NO: 16320 - RNA, 20 nt, Artificial Sequence
  Synthetic
cucucugucuucuagacaag

SEQ ID NO: 16321 - RNA, 20 nt, Artificial Sequence
  Synthetic
ucucugucuucuagacaagg

SEQ ID NO: 16322 - RNA, 20 nt, Artificial Sequence
  Synthetic
cucugucuucuagacaaggu

SEQ ID NO: 16323 - RNA, 20 nt, Artificial Sequence
  Synthetic
ucugucuucuagacaagguc

SEQ ID NO: 16324 - RNA, 20 nt, Artificial Sequence
  Synthetic
cugucuucuagacaagguca

SEQ ID NO: 16325 - RNA, 20 nt, Artificial Sequence
  Synthetic
ugucuucuagacaaggucac

SEQ ID NO: 16326 - RNA, 20 nt, Artificial Sequence
  Synthetic
gucuucuagacaaggucacc

SEQ ID NO: 16327 - RNA, 20 nt, Artificial Sequence
  Synthetic
ucuucuagacaaggucacca

SEQ ID NO: 16328 - RNA, 20 nt, Artificial Sequence
  Synthetic
cuucuagacaaggucaccaa

SEQ ID NO: 16329 - RNA, 20 nt, Artificial Sequence
  Synthetic
uucuagacaaggucaccaac

SEQ ID NO: 16330 - RNA, 20 nt, Artificial Sequence
  Synthetic
ucuagacaaggucaccaaca

SEQ ID NO: 16331 - RNA, 20 nt, Artificial Sequence
  Synthetic
cuagacaaggucaccaacau

SEQ ID NO: 16332 - RNA, 20 nt, Artificial Sequence
  Synthetic
uagacaaggucaccaacauc

SEQ ID NO: 16333 - RNA, 20 nt, Artificial Sequence
  Synthetic
agacaaggucaccaacaucu

SEQ ID NO: 16334 - RNA, 20 nt, Artificial Sequence
  Synthetic
gacaaggucaccaacaucua

SEQ ID NO: 16335 - RNA, 20 nt, Artificial Sequence
  Synthetic
acaaggucaccaacaucuaa

SEQ ID NO: 16336 - RNA, 20 nt, Artificial Sequence
  Synthetic
caaggucaccaacaucuaac

SEQ ID NO: 16337 - RNA, 20 nt, Artificial Sequence
  Synthetic
aaggucaccaacaucuaacc

SEQ ID NO: 16338 - RNA, 20 nt, Artificial Sequence
  Synthetic
aggucaccaacaucuaaccu

SEQ ID NO: 16339 - RNA, 20 nt, Artificial Sequence
  Synthetic
ggucaccaacaucuaaccuu

SEQ ID NO: 16340 - RNA, 20 nt, Artificial Sequence
  Synthetic
gucaccaacaucuaaccuug

SEQ ID NO: 16341 - RNA, 20 nt, Artificial Sequence
  Synthetic
ucaccaacaucuaaccuugg

SEQ ID NO: 16342 - RNA, 20 nt, Artificial Sequence
  Synthetic
caccaacaucuaaccuuggg

SEQ ID NO: 16343 - RNA, 20 nt, Artificial Sequence
  Synthetic
accaacaucuaaccuugggc

SEQ ID NO: 16344 - RNA, 20 nt, Artificial Sequence
  Synthetic
ccaacaucuaaccuugggcu

SEQ ID NO: 16345 - RNA, 20 nt, Artificial Sequence
  Synthetic
caacaucuaaccuugggcug

SEQ ID NO: 16346 - RNA, 20 nt, Artificial Sequence
  Synthetic
aacaucuaaccuugggcugu

SEQ ID NO: 16347 - RNA, 20 nt, Artificial Sequence
  Synthetic
acaucuaaccuugggcugug

SEQ ID NO: 16348 - RNA, 20 nt, Artificial Sequence
  Synthetic
caucuaaccuugggcugugu

SEQ ID NO: 16349 - RNA, 20 nt, Artificial Sequence
  Synthetic
aucuaaccuugggcuguguc

SEQ ID NO: 16350 - RNA, 20 nt, Artificial Sequence
  Synthetic
ucuaaccuugggcugugucu

SEQ ID NO: 16351 - RNA, 20 nt, Artificial Sequence
  Synthetic
cuaaccuugggcugugucuu

SEQ ID NO: 16352 - RNA, 20 nt, Artificial Sequence
  Synthetic
uaaccuugggcugugucuuc

SEQ ID NO: 16353 - RNA, 20 nt, Artificial Sequence
  Synthetic
aaccuugggcugugucuucc

SEQ ID NO: 16354 - RNA, 20 nt, Artificial Sequence
  Synthetic
accuugggcugugucuuccc

SEQ ID NO: 16355 - RNA, 20 nt, Artificial Sequence
  Synthetic
ccuugggcugugucuuccca

SEQ ID NO: 16356 - RNA, 20 nt, Artificial Sequence
  Synthetic
cuugggcugugucuucccau

SEQ ID NO: 16357 - RNA, 20 nt, Artificial Sequence
  Synthetic
uugggcugugucuucccaua

SEQ ID NO: 16358 - RNA, 20 nt, Artificial Sequence
  Synthetic
ugggcugugucuucccauac

SEQ ID NO: 16359 - RNA, 20 nt, Artificial Sequence
  Synthetic
gggcugugucuucccauaca

SEQ ID NO: 16360 - RNA, 20 nt, Artificial Sequence
  Synthetic
ggcugugucuucccauacaa

SEQ ID NO: 16361 - RNA, 20 nt, Artificial Sequence
  Synthetic
gcugugucuucccauacaac

SEQ ID NO: 16362 - RNA, 20 nt, Artificial Sequence
  Synthetic
cugugucuucccauacaacc

SEQ ID NO: 16363 - RNA, 20 nt, Artificial Sequence
  Synthetic
ugugucuucccauacaaccc

SEQ ID NO: 16364 - RNA, 20 nt, Artificial Sequence
  Synthetic
gugucuucccauacaacccu

SEQ ID NO: 16365 - RNA, 20 nt, Artificial Sequence
  Synthetic
ugucuucccauacaacccua

SEQ ID NO: 16366 - RNA, 20 nt, Artificial Sequence
  Synthetic
gucuucccauacaacccuau

SEQ ID NO: 16367 - RNA, 20 nt, Artificial Sequence
  Synthetic
ucuucccauacaacccuauu

SEQ ID NO: 16368 - RNA, 20 nt, Artificial Sequence
  Synthetic
cuucccauacaacccuauuu

SEQ ID NO: 16369 - RNA, 20 nt, Artificial Sequence
  Synthetic
uucccauacaacccuauuua

SEQ ID NO: 16370 - RNA, 20 nt, Artificial Sequence
  Synthetic
ucccauacaacccuauuuac

SEQ ID NO: 16371 - RNA, 20 nt, Artificial Sequence
  Synthetic
cccauacaacccuauuuacg

SEQ ID NO: 16372 - RNA, 20 nt, Artificial Sequence
  Synthetic
ccauacaacccuauuuacgu

SEQ ID NO: 16373 - RNA, 20 nt, Artificial Sequence
  Synthetic
cauacaacccuauuuacguc

SEQ ID NO: 16374 - RNA, 20 nt, Artificial Sequence
  Synthetic
auacaacccuauuuacguca

SEQ ID NO: 16375 - RNA, 20 nt, Artificial Sequence
  Synthetic
uacaacccuauuuacgucaa

SEQ ID NO: 16376 - RNA, 20 nt, Artificial Sequence
  Synthetic
acaacccuauuuacgucaac

SEQ ID NO: 16377 - RNA, 20 nt, Artificial Sequence
  Synthetic
caacccuauuuacgucaacc

SEQ ID NO: 16378 - RNA, 20 nt, Artificial Sequence
  Synthetic
aacccuauuuacgucaaccu

SEQ ID NO: 16379 - RNA, 20 nt, Artificial Sequence
  Synthetic
acccuauuuacgucaaccuu

SEQ ID NO: 16380 - RNA, 20 nt, Artificial Sequence
  Synthetic
cccuauuuacgucaaccuuc

SEQ ID NO: 16381 - RNA, 20 nt, Artificial Sequence
  Synthetic
ccuauuuacgucaaccuucc

SEQ ID NO: 16382 - RNA, 20 nt, Artificial Sequence
  Synthetic
cuauuuacgucaaccuucca

SEQ ID NO: 16383 - RNA, 20 nt, Artificial Sequence
  Synthetic
uauuuacgucaaccuuccaa

SEQ ID NO: 16384 - RNA, 20 nt, Artificial Sequence
  Synthetic
auuuacgucaaccuuccaau

SEQ ID NO: 16385 - RNA, 20 nt, Artificial Sequence
  Synthetic
uuuacgucaaccuuccaaug

SEQ ID NO: 16386 - RNA, 20 nt, Artificial Sequence
  Synthetic
uuacgucaaccuuccaauga

SEQ ID NO: 16387 - RNA, 20 nt, Artificial Sequence
  Synthetic
uacgucaaccuuccaaugac

SEQ ID NO: 16388 - RNA, 20 nt, Artificial Sequence
  Synthetic
acgucaaccuuccaaugacu

SEQ ID NO: 16389 - RNA, 20 nt, Artificial Sequence
  Synthetic
cgucaaccuuccaaugacug

SEQ ID NO: 16390 - RNA, 20 nt, Artificial Sequence
  Synthetic
gucaaccuuccaaugacugc

SEQ ID NO: 16391 - RNA, 20 nt, Artificial Sequence
  Synthetic
ucaaccuuccaaugacugcu

SEQ ID NO: 16392 - RNA, 20 nt, Artificial Sequence
  Synthetic
caaccuuccaaugacugcuc

SEQ ID NO: 16393 - RNA, 20 nt, Artificial Sequence
  Synthetic
aaccuuccaaugacugcucc

SEQ ID NO: 16394 - RNA, 20 nt, Artificial Sequence
  Synthetic
accuuccaaugacugcuccu

SEQ ID NO: 16395 - RNA, 20 nt, Artificial Sequence
  Synthetic
ccuuccaaugacugcuccug

SEQ ID NO: 16396 - RNA, 20 nt, Artificial Sequence
  Synthetic
cuuccaaugacugcuccugg

SEQ ID NO: 16397 - RNA, 20 nt, Artificial Sequence
  Synthetic
uuccaaugacugcuccuggg

SEQ ID NO: 16398 - RNA, 20 nt, Artificial Sequence
  Synthetic
uccaaugacugcuccugggg

SEQ ID NO: 16399 - RNA, 20 nt, Artificial Sequence
  Synthetic
ccaaugacugcuccugggga

SEQ ID NO: 16400 - RNA, 20 nt, Artificial Sequence
  Synthetic
caaugacugcuccuggggac

SEQ ID NO: 16401 - RNA, 20 nt, Artificial Sequence
  Synthetic
aaugacugcuccuggggaca

SEQ ID NO: 16402 - RNA, 20 nt, Artificial Sequence
  Synthetic
augacugcuccuggggacag

SEQ ID NO: 16403 - RNA, 20 nt, Artificial Sequence
  Synthetic
ugacugcuccuggggacaga

SEQ ID NO: 16404 - RNA, 20 nt, Artificial Sequence
  Synthetic
gacugcuccuggggacagag

SEQ ID NO: 16405 - RNA, 20 nt, Artificial Sequence
  Synthetic
acugcuccuggggacagagu

SEQ ID NO: 16406 - RNA, 20 nt, Artificial Sequence
  Synthetic
cugcuccuggggacagagug

SEQ ID NO: 16407 - RNA, 20 nt, Artificial Sequence
  Synthetic
ugcuccuggggacagagugg

SEQ ID NO: 16408 - RNA, 20 nt, Artificial Sequence
  Synthetic
gcuccuggggacagaguggu

SEQ ID NO: 16409 - RNA, 20 nt, Artificial Sequence
  Synthetic
cuccuggggacagaguggug

SEQ ID NO: 16410 - RNA, 20 nt, Artificial Sequence
  Synthetic
uccuggggacagagugguga

SEQ ID NO: 16411 - RNA, 20 nt, Artificial Sequence
  Synthetic
ccuggggacagaguggugaa

SEQ ID NO: 16412 - RNA, 20 nt, Artificial Sequence
  Synthetic
cuggggacagaguggugaaa

SEQ ID NO: 16413 - RNA, 20 nt, Artificial Sequence
  Synthetic
uggggacagaguggugaaau

SEQ ID NO: 16414 - RNA, 20 nt, Artificial Sequence
  Synthetic
ggggacagaguggugaaaug

SEQ ID NO: 16415 - RNA, 20 nt, Artificial Sequence
  Synthetic
gggacagaguggugaaaugg

SEQ ID NO: 16416 - RNA, 20 nt, Artificial Sequence
  Synthetic
ggacagaguggugaaauggu

SEQ ID NO: 16417 - RNA, 20 nt, Artificial Sequence
  Synthetic
gacagaguggugaaauggua

SEQ ID NO: 16418 - RNA, 20 nt, Artificial Sequence
  Synthetic
acagaguggugaaaugguac

SEQ ID NO: 16419 - RNA, 20 nt, Artificial Sequence
  Synthetic
cagaguggugaaaugguacc

SEQ ID NO: 16420 - RNA, 20 nt, Artificial Sequence
  Synthetic
agaguggugaaaugguacca

SEQ ID NO: 16421 - RNA, 20 nt, Artificial Sequence
  Synthetic
gaguggugaaaugguaccau

SEQ ID NO: 16422 - RNA, 20 nt, Artificial Sequence
  Synthetic
aguggugaaaugguaccaug

SEQ ID NO: 16423 - RNA, 20 nt, Artificial Sequence
  Synthetic
guggugaaaugguaccaugg

SEQ ID NO: 16424 - RNA, 20 nt, Artificial Sequence
  Synthetic
uggugaaaugguaccauggg

SEQ ID NO: 16425 - RNA, 20 nt, Artificial Sequence
  Synthetic
ggugaaaugguaccaugggc

SEQ ID NO: 16426 - RNA, 20 nt, Artificial Sequence
  Synthetic
gugaaaugguaccaugggca

SEQ ID NO: 16427 - RNA, 20 nt, Artificial Sequence
  Synthetic
ugaaaugguaccaugggcau

SEQ ID NO: 16428 - RNA, 20 nt, Artificial Sequence
  Synthetic
gaaaugguaccaugggcauu

SEQ ID NO: 16429 - RNA, 20 nt, Artificial Sequence
  Synthetic
aaaugguaccaugggcauuc

SEQ ID NO: 16430 - RNA, 20 nt, Artificial Sequence
  Synthetic
aaugguaccaugggcauucu

SEQ ID NO: 16431 - RNA, 20 nt, Artificial Sequence
  Synthetic
augguaccaugggcauucug

SEQ ID NO: 16432 - RNA, 20 nt, Artificial Sequence
  Synthetic
ugguaccaugggcauucuga

SEQ ID NO: 16433 - RNA, 20 nt, Artificial Sequence
  Synthetic
gguaccaugggcauucugac

SEQ ID NO: 16434 - RNA, 20 nt, Artificial Sequence
  Synthetic
guaccaugggcauucugaca

SEQ ID NO: 16435 - RNA, 20 nt, Artificial Sequence
  Synthetic
uaccaugggcauucugacaa

SEQ ID NO: 16436 - RNA, 20 nt, Artificial Sequence
  Synthetic
accaugggcauucugacaac

SEQ ID NO: 16437 - RNA, 20 nt, Artificial Sequence
  Synthetic
ccaugggcauucugacaacc

SEQ ID NO: 16438 - RNA, 20 nt, Artificial Sequence
  Synthetic
caugggcauucugacaacca

SEQ ID NO: 16439 - RNA, 20 nt, Artificial Sequence
  Synthetic
augggcauucugacaaccaa

SEQ ID NO: 16440 - RNA, 20 nt, Artificial Sequence
  Synthetic
ugggcauucugacaaccaac

SEQ ID NO: 16441 - RNA, 20 nt, Artificial Sequence
  Synthetic
gggcauucugacaaccaacu

SEQ ID NO: 16442 - RNA, 20 nt, Artificial Sequence
  Synthetic
ggcauucugacaaccaacuc

SEQ ID NO: 16443 - RNA, 20 nt, Artificial Sequence
  Synthetic
gcauucugacaaccaacuca

SEQ ID NO: 16444 - RNA, 20 nt, Artificial Sequence
  Synthetic
cauucugacaaccaacucag

SEQ ID NO: 16445 - RNA, 20 nt, Artificial Sequence
  Synthetic
auucugacaaccaacucaga

SEQ ID NO: 16446 - RNA, 20 nt, Artificial Sequence
  Synthetic
uucugacaaccaacucagag

SEQ ID NO: 16447 - RNA, 20 nt, Artificial Sequence
  Synthetic
ucugacaaccaacucagaga

SEQ ID NO: 16448 - RNA, 20 nt, Artificial Sequence
  Synthetic
cugacaaccaacucagagaa

SEQ ID NO: 16449 - RNA, 20 nt, Artificial Sequence
  Synthetic
ugacaaccaacucagagaag

SEQ ID NO: 16450 - RNA, 20 nt, Artificial Sequence
  Synthetic
gacaaccaacucagagaaga

SEQ ID NO: 16451 - RNA, 20 nt, Artificial Sequence
  Synthetic
acaaccaacucagagaagag

SEQ ID NO: 16452 - RNA, 20 nt, Artificial Sequence
  Synthetic
caaccaacucagagaagaga

SEQ ID NO: 16453 - RNA, 20 nt, Artificial Sequence
  Synthetic
aaccaacucagagaagagau

SEQ ID NO: 16454 - RNA, 20 nt, Artificial Sequence
  Synthetic
accaacucagagaagagaug

SEQ ID NO: 16455 - RNA, 20 nt, Artificial Sequence
  Synthetic
ccaacucagagaagagaugc

SEQ ID NO: 16456 - RNA, 20 nt, Artificial Sequence
  Synthetic
caacucagagaagagaugcu

SEQ ID NO: 16457 - RNA, 20 nt, Artificial Sequence
  Synthetic
aacucagagaagagaugcua

SEQ ID NO: 16458 - RNA, 20 nt, Artificial Sequence
  Synthetic
acucagagaagagaugcuac

SEQ ID NO: 16459 - RNA, 20 nt, Artificial Sequence
  Synthetic
cucagagaagagaugcuaca

SEQ ID NO: 16460 - RNA, 20 nt, Artificial Sequence
  Synthetic
ucagagaagagaugcuacau

SEQ ID NO: 16461 - RNA, 20 nt, Artificial Sequence
  Synthetic
cagagaagagaugcuacauc

SEQ ID NO: 16462 - RNA, 20 nt, Artificial Sequence
  Synthetic
agagaagagaugcuacaucc

SEQ ID NO: 16463 - RNA, 20 nt, Artificial Sequence
  Synthetic
gagaagagaugcuacauccu

SEQ ID NO: 16464 - RNA, 20 nt, Artificial Sequence
  Synthetic
agaagagaugcuacauccuu

SEQ ID NO: 16465 - RNA, 20 nt, Artificial Sequence
  Synthetic
gaagagaugcuacauccuuu

SEQ ID NO: 16466 - RNA, 20 nt, Artificial Sequence
  Synthetic
aagagaugcuacauccuuug

SEQ ID NO: 16467 - RNA, 20 nt, Artificial Sequence
  Synthetic
agagaugcuacauccuuugc

SEQ ID NO: 16468 - RNA, 20 nt, Artificial Sequence
  Synthetic
gagaugcuacauccuuugcc

SEQ ID NO: 16469 - RNA, 20 nt, Artificial Sequence
  Synthetic
agaugcuacauccuuugccc

SEQ ID NO: 16470 - RNA, 20 nt, Artificial Sequence
  Synthetic
gaugcuacauccuuugcccu

SEQ ID NO: 16471 - RNA, 20 nt, Artificial Sequence
  Synthetic
augcuacauccuuugcccuc

SEQ ID NO: 16472 - RNA, 20 nt, Artificial Sequence
  Synthetic
ugcuacauccuuugcccucu

SEQ ID NO: 16473 - RNA, 20 nt, Artificial Sequence
  Synthetic
gcuacauccuuugcccucuc

SEQ ID NO: 16474 - RNA, 20 nt, Artificial Sequence
  Synthetic
cuacauccuuugcccucuca

SEQ ID NO: 16475 - RNA, 20 nt, Artificial Sequence
  Synthetic
uacauccuuugcccucucag

SEQ ID NO: 16476 - RNA, 20 nt, Artificial Sequence
  Synthetic
acauccuuugcccucucaga

SEQ ID NO: 16477 - RNA, 20 nt, Artificial Sequence
  Synthetic
cauccuuugcccucucagag

SEQ ID NO: 16478 - RNA, 20 nt, Artificial Sequence
  Synthetic
auccuuugcccucucagagg

SEQ ID NO: 16479 - RNA, 20 nt, Artificial Sequence
  Synthetic
uccuuugcccucucagaggg

SEQ ID NO: 16480 - RNA, 20 nt, Artificial Sequence
  Synthetic
ccuuugcccucucagagggu

SEQ ID NO: 16481 - RNA, 20 nt, Artificial Sequence
  Synthetic
cuuugcccucucagaggguc

SEQ ID NO: 16482 - RNA, 20 nt, Artificial Sequence
  Synthetic
uuugcccucucagaggguca

SEQ ID NO: 16483 - RNA, 20 nt, Artificial Sequence
  Synthetic
uugcccucucagagggucag

SEQ ID NO: 16484 - RNA, 20 nt, Artificial Sequence
  Synthetic
ugcccucucagagggucaga

SEQ ID NO: 16485 - RNA, 20 nt, Artificial Sequence
  Synthetic
gcccucucagagggucagaa

SEQ ID NO: 16486 - RNA, 20 nt, Artificial Sequence
  Synthetic
cccucucagagggucagaau

SEQ ID NO: 16487 - RNA, 20 nt, Artificial Sequence
  Synthetic
ccucucagagggucagaauu

SEQ ID NO: 16488 - RNA, 20 nt, Artificial Sequence
  Synthetic
cucucagagggucagaauug

SEQ ID NO: 16489 - RNA, 20 nt, Artificial Sequence
  Synthetic
ucucagagggucagaauuga

SEQ ID NO: 16490 - RNA, 20 nt, Artificial Sequence
  Synthetic
cucagagggucagaauugag

SEQ ID NO: 16491 - RNA, 20 nt, Artificial Sequence
  Synthetic
ucagagggucagaauugaga

SEQ ID NO: 16492 - RNA, 20 nt, Artificial Sequence
  Synthetic
cagagggucagaauugagaa

SEQ ID NO: 16493 - RNA, 20 nt, Artificial Sequence
  Synthetic
agagggucagaauugagaac

SEQ ID NO: 16494 - RNA, 20 nt, Artificial Sequence
  Synthetic
gagggucagaauugagaaca

SEQ ID NO: 16495 - RNA, 20 nt, Artificial Sequence
  Synthetic
agggucagaauugagaacau

SEQ ID NO: 16496 - RNA, 20 nt, Artificial Sequence
  Synthetic
gggucagaauugagaacauc

SEQ ID NO: 16497 - RNA, 20 nt, Artificial Sequence
  Synthetic
ggucagaauugagaacaucu

SEQ ID NO: 16498 - RNA, 20 nt, Artificial Sequence
  Synthetic
gucagaauugagaacaucuc

SEQ ID NO: 16499 - RNA, 20 nt, Artificial Sequence
  Synthetic
ucagaauugagaacaucucc

SEQ ID NO: 16500 - RNA, 20 nt, Artificial Sequence
  Synthetic
cagaauugagaacaucuccc

SEQ ID NO: 16501 - RNA, 20 nt, Artificial Sequence
  Synthetic
agaauugagaacaucuccca

SEQ ID NO: 16502 - RNA, 20 nt, Artificial Sequence
  Synthetic
gaauugagaacaucucccag

SEQ ID NO: 16503 - RNA, 20 nt, Artificial Sequence
  Synthetic
aauugagaacaucucccagu

SEQ ID NO: 16504 - RNA, 20 nt, Artificial Sequence
  Synthetic
auugagaacaucucccagua

SEQ ID NO: 16505 - RNA, 20 nt, Artificial Sequence
  Synthetic
uugagaacaucucccaguac

SEQ ID NO: 16506 - RNA, 20 nt, Artificial Sequence
  Synthetic
ugagaacaucucccaguacc

SEQ ID NO: 16507 - RNA, 20 nt, Artificial Sequence
  Synthetic
gagaacaucucccaguaccu

SEQ ID NO: 16508 - RNA, 20 nt, Artificial Sequence
  Synthetic
agaacaucucccaguaccua

SEQ ID NO: 16509 - RNA, 20 nt, Artificial Sequence
  Synthetic
gaacaucucccaguaccuag

SEQ ID NO: 16510 - RNA, 20 nt, Artificial Sequence
  Synthetic
aacaucucccaguaccuaga

SEQ ID NO: 16511 - RNA, 20 nt, Artificial Sequence
  Synthetic
acaucucccaguaccuagac

SEQ ID NO: 16512 - RNA, 20 nt, Artificial Sequence
  Synthetic
caucucccaguaccuagaca

SEQ ID NO: 16513 - RNA, 20 nt, Artificial Sequence
  Synthetic
aucucccaguaccuagacau

SEQ ID NO: 16514 - RNA, 20 nt, Artificial Sequence
  Synthetic
ucucccaguaccuagacaua

SEQ ID NO: 16515 - RNA, 20 nt, Artificial Sequence
  Synthetic
cucccaguaccuagacauac

SEQ ID NO: 16516 - RNA, 20 nt, Artificial Sequence
  Synthetic
ucccaguaccuagacauacu

SEQ ID NO: 16517 - RNA, 20 nt, Artificial Sequence
  Synthetic
cccaguaccuagacauacuc

SEQ ID NO: 16518 - RNA, 20 nt, Artificial Sequence
  Synthetic
ccaguaccuagacauacucu

SEQ ID NO: 16519 - RNA, 20 nt, Artificial Sequence
  Synthetic
caguaccuagacauacucug

SEQ ID NO: 16520 - RNA, 20 nt, Artificial Sequence
  Synthetic
aguaccuagacauacucugg

SEQ ID NO: 16521 - RNA, 20 nt, Artificial Sequence
  Synthetic
guaccuagacauacucuggu

SEQ ID NO: 16522 - RNA, 20 nt, Artificial Sequence
  Synthetic
uaccuagacauacucuggua

SEQ ID NO: 16523 - RNA, 20 nt, Artificial Sequence
  Synthetic
accuagacauacucugguac

SEQ ID NO: 16524 - RNA, 20 nt, Artificial Sequence
  Synthetic
ccuagacauacucugguaca

SEQ ID NO: 16525 - RNA, 20 nt, Artificial Sequence
  Synthetic
cuagacauacucugguacau

SEQ ID NO: 16526 - RNA, 20 nt, Artificial Sequence
  Synthetic
uagacauacucugguacaua

SEQ ID NO: 16527 - RNA, 20 nt, Artificial Sequence
  Synthetic
agacauacucugguacauau

SEQ ID NO: 16528 - RNA, 20 nt, Artificial Sequence
  Synthetic
gacauacucugguacauaug

SEQ ID NO: 16529 - RNA, 20 nt, Artificial Sequence
  Synthetic
acauacucugguacauauga

SEQ ID NO: 16530 - RNA, 20 nt, Artificial Sequence
  Synthetic
cauacucugguacauaugaa

SEQ ID NO: 16531 - RNA, 20 nt, Artificial Sequence
  Synthetic
auacucugguacauaugaag

SEQ ID NO: 16532 - RNA, 20 nt, Artificial Sequence
  Synthetic
uacucugguacauaugaagu

SEQ ID NO: 16533 - RNA, 20 nt, Artificial Sequence
  Synthetic
acucugguacauaugaaguu

SEQ ID NO: 16534 - RNA, 20 nt, Artificial Sequence
  Synthetic
cucugguacauaugaaguuu

SEQ ID NO: 16535 - RNA, 20 nt, Artificial Sequence
  Synthetic
ucugguacauaugaaguuug

SEQ ID NO: 16536 - RNA, 20 nt, Artificial Sequence
  Synthetic
cugguacauaugaaguuugu

SEQ ID NO: 16537 - RNA, 20 nt, Artificial Sequence
  Synthetic
ugguacauaugaaguuugug

SEQ ID NO: 16538 - RNA, 20 nt, Artificial Sequence
  Synthetic
gguacauaugaaguuuguga

SEQ ID NO: 16539 - RNA, 20 nt, Artificial Sequence
  Synthetic
guacauaugaaguuugugau

SEQ ID NO: 16540 - RNA, 20 nt, Artificial Sequence
  Synthetic
uacauaugaaguuugugauc

SEQ ID NO: 16541 - RNA, 20 nt, Artificial Sequence
  Synthetic
acauaugaaguuugugaucu

SEQ ID NO: 16542 - RNA, 20 nt, Artificial Sequence
  Synthetic
cauaugaaguuugugaucua

SEQ ID NO: 16543 - RNA, 20 nt, Artificial Sequence
  Synthetic
auaugaaguuugugaucuau

SEQ ID NO: 16544 - RNA, 20 nt, Artificial Sequence
  Synthetic
uaugaaguuugugaucuaug

SEQ ID NO: 16545 - RNA, 20 nt, Artificial Sequence
  Synthetic
augaaguuugugaucuauga

SEQ ID NO: 16546 - RNA, 20 nt, Artificial Sequence
  Synthetic
ugaaguuugugaucuaugaa

SEQ ID NO: 16547 - RNA, 20 nt, Artificial Sequence
  Synthetic
gaaguuugugaucuaugaau

SEQ ID NO: 16548 - RNA, 20 nt, Artificial Sequence
  Synthetic
aaguuugugaucuaugaauu

SEQ ID NO: 16549 - RNA, 20 nt, Artificial Sequence
  Synthetic
aguuugugaucuaugaauuu

SEQ ID NO: 16550 - RNA, 20 nt, Artificial Sequence
  Synthetic
guuugugaucuaugaauuug

SEQ ID NO: 16551 - RNA, 20 nt, Artificial Sequence
  Synthetic
uuugugaucuaugaauuugg

SEQ ID NO: 16552 - RNA, 20 nt, Artificial Sequence
  Synthetic
uugugaucuaugaauuugga

SEQ ID NO: 16553 - RNA, 20 nt, Artificial Sequence
  Synthetic
ugugaucuaugaauuuggac

SEQ ID NO: 16554 - RNA, 20 nt, Artificial Sequence
  Synthetic
gugaucuaugaauuuggacc

SEQ ID NO: 16555 - RNA, 20 nt, Artificial Sequence
  Synthetic
ugaucuaugaauuuggacca

SEQ ID NO: 16556 - RNA, 20 nt, Artificial Sequence
  Synthetic
gaucuaugaauuuggaccac

SEQ ID NO: 16557 - RNA, 20 nt, Artificial Sequence
  Synthetic
aucuaugaauuuggaccaca

SEQ ID NO: 16558 - RNA, 20 nt, Artificial Sequence
  Synthetic
ucuaugaauuuggaccacag

SEQ ID NO: 16559 - RNA, 20 nt, Artificial Sequence
  Synthetic
cuaugaauuuggaccacaga

SEQ ID NO: 16560 - RNA, 20 nt, Artificial Sequence
  Synthetic
uaugaauuuggaccacagaa

SEQ ID NO: 16561 - RNA, 20 nt, Artificial Sequence
  Synthetic
augaauuuggaccacagaau

SEQ ID NO: 16562 - RNA, 20 nt, Artificial Sequence
  Synthetic
ugaauuuggaccacagaauc

SEQ ID NO: 16563 - RNA, 20 nt, Artificial Sequence
  Synthetic
gaauuuggaccacagaaucc

SEQ ID NO: 16564 - RNA, 20 nt, Artificial Sequence
  Synthetic
aauuuggaccacagaaucca

SEQ ID NO: 16565 - RNA, 20 nt, Artificial Sequence
  Synthetic
auuuggaccacagaauccac

SEQ ID NO: 16566 - RNA, 20 nt, Artificial Sequence
  Synthetic
uuuggaccacagaauccacc

SEQ ID NO: 16567 - RNA, 20 nt, Artificial Sequence
  Synthetic
uuggaccacagaauccacca

SEQ ID NO: 16568 - RNA, 20 nt, Artificial Sequence
  Synthetic
uggaccacagaauccaccac

SEQ ID NO: 16569 - RNA, 20 nt, Artificial Sequence
  Synthetic
ggaccacagaauccaccacu

SEQ ID NO: 16570 - RNA, 20 nt, Artificial Sequence
  Synthetic
gaccacagaauccaccacua

SEQ ID NO: 16571 - RNA, 20 nt, Artificial Sequence
  Synthetic
accacagaauccaccacuac

SEQ ID NO: 16572 - RNA, 20 nt, Artificial Sequence
  Synthetic
ccacagaauccaccacuaca

SEQ ID NO: 16573 - RNA, 20 nt, Artificial Sequence
  Synthetic
cacagaauccaccacuacau

SEQ ID NO: 16574 - RNA, 20 nt, Artificial Sequence
  Synthetic
acagaauccaccacuacauc

SEQ ID NO: 16575 - RNA, 20 nt, Artificial Sequence
  Synthetic
cagaauccaccacuacaucu

SEQ ID NO: 16576 - RNA, 20 nt, Artificial Sequence
  Synthetic
agaauccaccacuacaucua

SEQ ID NO: 16577 - RNA, 20 nt, Artificial Sequence
  Synthetic
gaauccaccacuacaucuag

SEQ ID NO: 16578 - RNA, 20 nt, Artificial Sequence
  Synthetic
aauccaccacuacaucuagc

SEQ ID NO: 16579 - RNA, 20 nt, Artificial Sequence
  Synthetic
auccaccacuacaucuagcu

SEQ ID NO: 16580 - RNA, 20 nt, Artificial Sequence
  Synthetic
uccaccacuacaucuagcuc

SEQ ID NO: 16581 - RNA, 20 nt, Artificial Sequence
  Synthetic
ccaccacuacaucuagcucu

SEQ ID NO: 16582 - RNA, 20 nt, Artificial Sequence
  Synthetic
caccacuacaucuagcucuu

SEQ ID NO: 16583 - RNA, 20 nt, Artificial Sequence
  Synthetic
accacuacaucuagcucuua

SEQ ID NO: 16584 - RNA, 20 nt, Artificial Sequence
  Synthetic
ccacuacaucuagcucuuac

SEQ ID NO: 16585 - RNA, 20 nt, Artificial Sequence
  Synthetic
cacuacaucuagcucuuacu

SEQ ID NO: 16586 - RNA, 20 nt, Artificial Sequence
  Synthetic
acuacaucuagcucuuacuu

SEQ ID NO: 16587 - RNA, 20 nt, Artificial Sequence
  Synthetic
cuacaucuagcucuuacuuc

SEQ ID NO: 16588 - RNA, 20 nt, Artificial Sequence
  Synthetic
uacaucuagcucuuacuucu

SEQ ID NO: 16589 - RNA, 20 nt, Artificial Sequence
  Synthetic
acaucuagcucuuacuucuc

SEQ ID NO: 16590 - RNA, 20 nt, Artificial Sequence
  Synthetic
caucuagcucuuacuucucu

SEQ ID NO: 16591 - RNA, 20 nt, Artificial Sequence
  Synthetic
aucuagcucuuacuucucuc

SEQ ID NO: 16592 - RNA, 20 nt, Artificial Sequence
  Synthetic
ucuagcucuuacuucucucc

SEQ ID NO: 16593 - RNA, 20 nt, Artificial Sequence
  Synthetic
cuagcucuuacuucucucca

SEQ ID NO: 16594 - RNA, 20 nt, Artificial Sequence
  Synthetic
uagcucuuacuucucuccaa

SEQ ID NO: 16595 - RNA, 20 nt, Artificial Sequence
  Synthetic
agcucuuacuucucuccaau

SEQ ID NO: 16596 - RNA, 20 nt, Artificial Sequence
  Synthetic
gcucuuacuucucuccaaug

SEQ ID NO: 16597 - RNA, 20 nt, Artificial Sequence
  Synthetic
cucuuacuucucuccaaugc

SEQ ID NO: 16598 - RNA, 20 nt, Artificial Sequence
  Synthetic
ucuuacuucucuccaaugcc

SEQ ID NO: 16599 - RNA, 20 nt, Artificial Sequence
  Synthetic
cuuacuucucuccaaugccc

SEQ ID NO: 16600 - RNA, 20 nt, Artificial Sequence
  Synthetic
uuacuucucuccaaugcccu

SEQ ID NO: 16601 - RNA, 20 nt, Artificial Sequence
  Synthetic
uacuucucuccaaugcccug

SEQ ID NO: 16602 - RNA, 20 nt, Artificial Sequence
  Synthetic
acuucucuccaaugcccugc

SEQ ID NO: 16603 - RNA, 20 nt, Artificial Sequence
  Synthetic
cuucucuccaaugcccugcu

SEQ ID NO: 16604 - RNA, 20 nt, Artificial Sequence
  Synthetic
uucucuccaaugcccugcug

SEQ ID NO: 16605 - RNA, 20 nt, Artificial Sequence
  Synthetic
ucucuccaaugcccugcugg

SEQ ID NO: 16606 - RNA, 20 nt, Artificial Sequence
  Synthetic
cucuccaaugcccugcuggu

SEQ ID NO: 16607 - RNA, 20 nt, Artificial Sequence
  Synthetic
ucuccaaugcccugcugguu

SEQ ID NO: 16608 - RNA, 20 nt, Artificial Sequence
  Synthetic
cuccaaugcccugcugguuc

SEQ ID NO: 16609 - RNA, 20 nt, Artificial Sequence
  Synthetic
uccaaugcccugcugguuca

SEQ ID NO: 16610 - RNA, 20 nt, Artificial Sequence
  Synthetic
ccaaugcccugcugguucag

SEQ ID NO: 16611 - RNA, 20 nt, Artificial Sequence
  Synthetic
caaugcccugcugguucagu

SEQ ID NO: 16612 - RNA, 20 nt, Artificial Sequence
  Synthetic
aaugcccugcugguucaguc

SEQ ID NO: 16613 - RNA, 20 nt, Artificial Sequence
  Synthetic
augcccugcugguucaguca

SEQ ID NO: 16614 - RNA, 20 nt, Artificial Sequence
  Synthetic
ugcccugcugguucagucaa

SEQ ID NO: 16615 - RNA, 20 nt, Artificial Sequence
  Synthetic
gcccugcugguucagucaac

SEQ ID NO: 16616 - RNA, 20 nt, Artificial Sequence
  Synthetic
cccugcugguucagucaaca

SEQ ID NO: 16617 - RNA, 20 nt, Artificial Sequence
  Synthetic
ccugcugguucagucaacag

SEQ ID NO: 16618 - RNA, 20 nt, Artificial Sequence
  Synthetic
cugcugguucagucaacagu

SEQ ID NO: 16619 - RNA, 20 nt, Artificial Sequence
  Synthetic
ugcugguucagucaacagua

SEQ ID NO: 16620 - RNA, 20 nt, Artificial Sequence
  Synthetic
gcugguucagucaacaguaa

SEQ ID NO: 16621 - RNA, 20 nt, Artificial Sequence
  Synthetic
cugguucagucaacaguaag

SEQ ID NO: 16622 - RNA, 20 nt, Artificial Sequence
  Synthetic
ugguucagucaacaguaagu

SEQ ID NO: 16623 - RNA, 20 nt, Artificial Sequence
  Synthetic
gguucagucaacaguaaguc

SEQ ID NO: 16624 - RNA, 20 nt, Artificial Sequence
  Synthetic
guucagucaacaguaaguca

SEQ ID NO: 16625 - RNA, 20 nt, Artificial Sequence
  Synthetic
uucagucaacaguaagucaa

SEQ ID NO: 16626 - RNA, 20 nt, Artificial Sequence
  Synthetic
ucagucaacaguaagucaac

SEQ ID NO: 16627 - RNA, 20 nt, Artificial Sequence
  Synthetic
cagucaacaguaagucaaca

SEQ ID NO: 16628 - RNA, 20 nt, Artificial Sequence
  Synthetic
agucaacaguaagucaacag

SEQ ID NO: 16629 - RNA, 20 nt, Artificial Sequence
  Synthetic
gucaacaguaagucaacaga

SEQ ID NO: 16630 - RNA, 20 nt, Artificial Sequence
  Synthetic
ucaacaguaagucaacagac

SEQ ID NO: 16631 - RNA, 20 nt, Artificial Sequence
  Synthetic
caacaguaagucaacagaca

SEQ ID NO: 16632 - RNA, 20 nt, Artificial Sequence
  Synthetic
aacaguaagucaacagacag

SEQ ID NO: 16633 - RNA, 20 nt, Artificial Sequence
  Synthetic
acaguaagucaacagacaga

SEQ ID NO: 16634 - RNA, 20 nt, Artificial Sequence
  Synthetic
caguaagucaacagacagac

SEQ ID NO: 16635 - RNA, 20 nt, Artificial Sequence
  Synthetic
aguaagucaacagacagaca

SEQ ID NO: 16636 - RNA, 20 nt, Artificial Sequence
  Synthetic
guaagucaacagacagacau

SEQ ID NO: 16637 - RNA, 20 nt, Artificial Sequence
  Synthetic
uaagucaacagacagacaug

SEQ ID NO: 16638 - RNA, 20 nt, Artificial Sequence
  Synthetic
aagucaacagacagacaugu

SEQ ID NO: 16639 - RNA, 20 nt, Artificial Sequence
  Synthetic
agucaacagacagacaugua

SEQ ID NO: 16640 - RNA, 20 nt, Artificial Sequence
  Synthetic
gucaacagacagacauguaa

SEQ ID NO: 16641 - RNA, 20 nt, Artificial Sequence
  Synthetic
ucaacagacagacauguaag

SEQ ID NO: 16642 - RNA, 20 nt, Artificial Sequence
  Synthetic
caacagacagacauguaaga

SEQ ID NO: 16643 - RNA, 20 nt, Artificial Sequence
  Synthetic
aacagacagacauguaagag

SEQ ID NO: 16644 - RNA, 20 nt, Artificial Sequence
  Synthetic
acagacagacauguaagagc

SEQ ID NO: 16645 - RNA, 20 nt, Artificial Sequence
  Synthetic
cagacagacauguaagagcu

SEQ ID NO: 16646 - RNA, 20 nt, Artificial Sequence
  Synthetic
agacagacauguaagagcua

SEQ ID NO: 16647 - RNA, 20 nt, Artificial Sequence
  Synthetic
gacagacauguaagagcuaa

SEQ ID NO: 16648 - RNA, 20 nt, Artificial Sequence
  Synthetic
acagacauguaagagcuaau

SEQ ID NO: 16649 - RNA, 20 nt, Artificial Sequence
  Synthetic
cagacauguaagagcuaaug

SEQ ID NO: 16650 - RNA, 20 nt, Artificial Sequence
  Synthetic
agacauguaagagcuaaugu

SEQ ID NO: 16651 - RNA, 20 nt, Artificial Sequence
  Synthetic
gacauguaagagcuaaugua

SEQ ID NO: 16652 - RNA, 20 nt, Artificial Sequence
  Synthetic
acauguaagagcuaauguaa

SEQ ID NO: 16653 - RNA, 20 nt, Artificial Sequence
  Synthetic
cauguaagagcuaauguaag

SEQ ID NO: 16654 - RNA, 20 nt, Artificial Sequence
  Synthetic
auguaagagcuaauguaaga

SEQ ID NO: 16655 - RNA, 20 nt, Artificial Sequence
  Synthetic
uguaagagcuaauguaagau

SEQ ID NO: 16656 - RNA, 20 nt, Artificial Sequence
  Synthetic
guaagagcuaauguaagaug

SEQ ID NO: 16657 - RNA, 20 nt, Artificial Sequence
  Synthetic
uaagagcuaauguaagaugc

SEQ ID NO: 16658 - RNA, 20 nt, Artificial Sequence
  Synthetic
aagagcuaauguaagaugcu

SEQ ID NO: 16659 - RNA, 20 nt, Artificial Sequence
  Synthetic
agagcuaauguaagaugcua

SEQ ID NO: 16660 - RNA, 20 nt, Artificial Sequence
  Synthetic
gagcuaauguaagaugcuag

SEQ ID NO: 16661 - RNA, 20 nt, Artificial Sequence
  Synthetic
agcuaauguaagaugcuagg

SEQ ID NO: 16662 - RNA, 20 nt, Artificial Sequence
  Synthetic
gcuaauguaagaugcuaggc

SEQ ID NO: 16663 - RNA, 20 nt, Artificial Sequence
  Synthetic
cuaauguaagaugcuaggca

SEQ ID NO: 16664 - RNA, 20 nt, Artificial Sequence
  Synthetic
uaauguaagaugcuaggcag

SEQ ID NO: 16665 - RNA, 20 nt, Artificial Sequence
  Synthetic
aauguaagaugcuaggcaga

SEQ ID NO: 16666 - RNA, 20 nt, Artificial Sequence
  Synthetic
auguaagaugcuaggcagaa

SEQ ID NO: 16667 - RNA, 20 nt, Artificial Sequence
  Synthetic
uguaagaugcuaggcagaau

SEQ ID NO: 16668 - RNA, 20 nt, Artificial Sequence
  Synthetic
guaagaugcuaggcagaaug

SEQ ID NO: 16669 - RNA, 20 nt, Artificial Sequence
  Synthetic
uaagaugcuaggcagaaugc

SEQ ID NO: 16670 - RNA, 20 nt, Artificial Sequence
  Synthetic
aagaugcuaggcagaaugca

SEQ ID NO: 16671 - RNA, 20 nt, Artificial Sequence
  Synthetic
agaugcuaggcagaaugcaa

SEQ ID NO: 16672 - RNA, 20 nt, Artificial Sequence
  Synthetic
gaugcuaggcagaaugcaag

SEQ ID NO: 16673 - RNA, 20 nt, Artificial Sequence
  Synthetic
augcuaggcagaaugcaaga

SEQ ID NO: 16674 - RNA, 20 nt, Artificial Sequence
  Synthetic
ugcuaggcagaaugcaagau

SEQ ID NO: 16675 - RNA, 20 nt, Artificial Sequence
  Synthetic
gcuaggcagaaugcaagaug

SEQ ID NO: 16676 - RNA, 20 nt, Artificial Sequence
  Synthetic
cuaggcagaaugcaagaugu

SEQ ID NO: 16677 - RNA, 20 nt, Artificial Sequence
  Synthetic
uaggcagaaugcaagaugua

SEQ ID NO: 16678 - RNA, 20 nt, Artificial Sequence
  Synthetic
aggcagaaugcaagauguaa

SEQ ID NO: 16679 - RNA, 20 nt, Artificial Sequence
  Synthetic
ggcagaaugcaagauguaag

SEQ ID NO: 16680 - RNA, 20 nt, Artificial Sequence
  Synthetic
gcagaaugcaagauguaaga

SEQ ID NO: 16681 - RNA, 20 nt, Artificial Sequence
  Synthetic
cagaaugcaagauguaagau

SEQ ID NO: 16682 - RNA, 20 nt, Artificial Sequence
  Synthetic
agaaugcaagauguaagaug

SEQ ID NO: 16683 - RNA, 20 nt, Artificial Sequence
  Synthetic
gaaugcaagauguaagaugu

SEQ ID NO: 16684 - RNA, 20 nt, Artificial Sequence
  Synthetic
aaugcaagauguaagaugua

SEQ ID NO: 16685 - RNA, 20 nt, Artificial Sequence
  Synthetic
augcaagauguaagauguaa

SEQ ID NO: 16686 - RNA, 20 nt, Artificial Sequence
  Synthetic
ugcaagauguaagauguaag

SEQ ID NO: 16687 - RNA, 20 nt, Artificial Sequence
  Synthetic
gcaagauguaagauguaaga

SEQ ID NO: 16688 - RNA, 20 nt, Artificial Sequence
  Synthetic
caagauguaagauguaagau

SEQ ID NO: 16689 - RNA, 20 nt, Artificial Sequence
  Synthetic
aagauguaagauguaagaug

SEQ ID NO: 16690 - RNA, 20 nt, Artificial Sequence
  Synthetic
agauguaagauguaagaugu

SEQ ID NO: 16691 - RNA, 20 nt, Artificial Sequence
  Synthetic
gauguaagauguaagaugua

SEQ ID NO: 16692 - RNA, 20 nt, Artificial Sequence
  Synthetic
auguaagauguaagauguaa

SEQ ID NO: 16693 - RNA, 20 nt, Artificial Sequence
  Synthetic
uguaagauguaagauguaag

SEQ ID NO: 16694 - RNA, 20 nt, Artificial Sequence
  Synthetic
guaagauguaagauguaaga

SEQ ID NO: 16695 - RNA, 20 nt, Artificial Sequence
  Synthetic
uaagauguaagauguaagau

SEQ ID NO: 16696 - RNA, 20 nt, Artificial Sequence
  Synthetic
aagauguaagauguaagaug

SEQ ID NO: 16697 - RNA, 20 nt, Artificial Sequence
  Synthetic
agauguaagauguaagaugu

SEQ ID NO: 16698 - RNA, 20 nt, Artificial Sequence
  Synthetic
gauguaagauguaagaugua

SEQ ID NO: 16699 - RNA, 20 nt, Artificial Sequence
  Synthetic
auguaagauguaagauguaa

SEQ ID NO: 16700 - RNA, 20 nt, Artificial Sequence
  Synthetic
uguaagauguaagauguaag

SEQ ID NO: 16701 - RNA, 20 nt, Artificial Sequence
  Synthetic
guaagauguaagauguaagc

SEQ ID NO: 16702 - RNA, 20 nt, Artificial Sequence
  Synthetic
uaagauguaagauguaagca

SEQ ID NO: 16703 - RNA, 20 nt, Artificial Sequence
  Synthetic
aagauguaagauguaagcau

SEQ ID NO: 16704 - RNA, 20 nt, Artificial Sequence
  Synthetic
agauguaagauguaagcaug

SEQ ID NO: 16705 - RNA, 20 nt, Artificial Sequence
  Synthetic
gauguaagauguaagcaugu

SEQ ID NO: 16706 - RNA, 20 nt, Artificial Sequence
  Synthetic
auguaagauguaagcaugua

SEQ ID NO: 16707 - RNA, 20 nt, Artificial Sequence
  Synthetic
uguaagauguaagcauguaa

SEQ ID NO: 16708 - RNA, 20 nt, Artificial Sequence
  Synthetic
guaagauguaagcauguaag

SEQ ID NO: 16709 - RNA, 20 nt, Artificial Sequence
  Synthetic
uaagauguaagcauguaaga

SEQ ID NO: 16710 - RNA, 20 nt, Artificial Sequence
  Synthetic
aagauguaagcauguaagau

SEQ ID NO: 16711 - RNA, 20 nt, Artificial Sequence
  Synthetic
agauguaagcauguaagaug

SEQ ID NO: 16712 - RNA, 20 nt, Artificial Sequence
  Synthetic
gauguaagcauguaagaugc

SEQ ID NO: 16713 - RNA, 20 nt, Artificial Sequence
  Synthetic
auguaagcauguaagaugcu

SEQ ID NO: 16714 - RNA, 20 nt, Artificial Sequence
  Synthetic
uguaagcauguaagaugcua

SEQ ID NO: 16715 - RNA, 20 nt, Artificial Sequence
  Synthetic
guaagcauguaagaugcuag

SEQ ID NO: 16716 - RNA, 20 nt, Artificial Sequence
  Synthetic
uaagcauguaagaugcuagg

SEQ ID NO: 16717 - RNA, 20 nt, Artificial Sequence
  Synthetic
aagcauguaagaugcuaggc

SEQ ID NO: 16718 - RNA, 20 nt, Artificial Sequence
  Synthetic
agcauguaagaugcuaggca

SEQ ID NO: 16719 - RNA, 20 nt, Artificial Sequence
  Synthetic
gcauguaagaugcuaggcag

SEQ ID NO: 16720 - RNA, 20 nt, Artificial Sequence
  Synthetic
cauguaagaugcuaggcaga

SEQ ID NO: 16721 - RNA, 20 nt, Artificial Sequence
  Synthetic
auguaagaugcuaggcagaa

SEQ ID NO: 16722 - RNA, 20 nt, Artificial Sequence
  Synthetic
uguaagaugcuaggcagaau

SEQ ID NO: 16723 - RNA, 20 nt, Artificial Sequence
  Synthetic
guaagaugcuaggcagaauc

SEQ ID NO: 16724 - RNA, 20 nt, Artificial Sequence
  Synthetic
uaagaugcuaggcagaaucc

SEQ ID NO: 16725 - RNA, 20 nt, Artificial Sequence
  Synthetic
aagaugcuaggcagaaucca

SEQ ID NO: 16726 - RNA, 20 nt, Artificial Sequence
  Synthetic
agaugcuaggcagaauccag

SEQ ID NO: 16727 - RNA, 20 nt, Artificial Sequence
  Synthetic
gaugcuaggcagaauccaga

SEQ ID NO: 16728 - RNA, 20 nt, Artificial Sequence
  Synthetic
augcuaggcagaauccagag

SEQ ID NO: 16729 - RNA, 20 nt, Artificial Sequence
  Synthetic
ugcuaggcagaauccagaga

SEQ ID NO: 16730 - RNA, 20 nt, Artificial Sequence
  Synthetic
gcuaggcagaauccagagac

SEQ ID NO: 16731 - RNA, 20 nt, Artificial Sequence
  Synthetic
cuaggcagaauccagagaca

SEQ ID NO: 16732 - RNA, 20 nt, Artificial Sequence
  Synthetic
uaggcagaauccagagacaa

SEQ ID NO: 16733 - RNA, 20 nt, Artificial Sequence
  Synthetic
aggcagaauccagagacaaa

SEQ ID NO: 16734 - RNA, 20 nt, Artificial Sequence
  Synthetic
ggcagaauccagagacaaag

SEQ ID NO: 16735 - RNA, 20 nt, Artificial Sequence
  Synthetic
gcagaauccagagacaaagu

SEQ ID NO: 16736 - RNA, 20 nt, Artificial Sequence
  Synthetic
cagaauccagagacaaaguu

SEQ ID NO: 16737 - RNA, 20 nt, Artificial Sequence
  Synthetic
agaauccagagacaaaguug

SEQ ID NO: 16738 - RNA, 20 nt, Artificial Sequence
  Synthetic
gaauccagagacaaaguugg

SEQ ID NO: 16739 - RNA, 20 nt, Artificial Sequence
  Synthetic
aauccagagacaaaguugga

SEQ ID NO: 16740 - RNA, 20 nt, Artificial Sequence
  Synthetic
auccagagacaaaguuggaa

SEQ ID NO: 16741 - RNA, 20 nt, Artificial Sequence
  Synthetic
uccagagacaaaguuggaag

SEQ ID NO: 16742 - RNA, 20 nt, Artificial Sequence
  Synthetic
ccagagacaaaguuggaaga

SEQ ID NO: 16743 - RNA, 20 nt, Artificial Sequence
  Synthetic
cagagacaaaguuggaagau

SEQ ID NO: 16744 - RNA, 20 nt, Artificial Sequence
  Synthetic
agagacaaaguuggaagaug

SEQ ID NO: 16745 - RNA, 20 nt, Artificial Sequence
  Synthetic
gagacaaaguuggaagaugu

SEQ ID NO: 16746 - RNA, 20 nt, Artificial Sequence
  Synthetic
agacaaaguuggaagauguc

SEQ ID NO: 16747 - RNA, 20 nt, Artificial Sequence
  Synthetic
gacaaaguuggaagauguca

SEQ ID NO: 16748 - RNA, 20 nt, Artificial Sequence
  Synthetic
acaaaguuggaagaugucac

SEQ ID NO: 16749 - RNA, 20 nt, Artificial Sequence
  Synthetic
caaaguuggaagaugucacc

SEQ ID NO: 16750 - RNA, 20 nt, Artificial Sequence
  Synthetic
aaaguuggaagaugucaccc

SEQ ID NO: 16751 - RNA, 20 nt, Artificial Sequence
  Synthetic
aaguuggaagaugucacccu

SEQ ID NO: 16752 - RNA, 20 nt, Artificial Sequence
  Synthetic
aguuggaagaugucacccug

SEQ ID NO: 16753 - RNA, 20 nt, Artificial Sequence
  Synthetic
guuggaagaugucacccugu

SEQ ID NO: 16754 - RNA, 20 nt, Artificial Sequence
  Synthetic
uuggaagaugucacccugug

SEQ ID NO: 16755 - RNA, 20 nt, Artificial Sequence
  Synthetic
uggaagaugucacccugugu

SEQ ID NO: 16756 - RNA, 20 nt, Artificial Sequence
  Synthetic
ggaagaugucacccugugua

SEQ ID NO: 16757 - RNA, 20 nt, Artificial Sequence
  Synthetic
gaagaugucacccuguguaa

SEQ ID NO: 16758 - RNA, 20 nt, Artificial Sequence
  Synthetic
aagaugucacccuguguaac

SEQ ID NO: 16759 - RNA, 20 nt, Artificial Sequence
  Synthetic
agaugucacccuguguaaca

SEQ ID NO: 16760 - RNA, 20 nt, Artificial Sequence
  Synthetic
gaugucacccuguguaacag

SEQ ID NO: 16761 - RNA, 20 nt, Artificial Sequence
  Synthetic
augucacccuguguaacaga

SEQ ID NO: 16762 - RNA, 20 nt, Artificial Sequence
  Synthetic
ugucacccuguguaacagaa

SEQ ID NO: 16763 - RNA, 20 nt, Artificial Sequence
  Synthetic
gucacccuguguaacagaag

SEQ ID NO: 16764 - RNA, 20 nt, Artificial Sequence
  Synthetic
ucacccuguguaacagaagu

SEQ ID NO: 16765 - RNA, 20 nt, Artificial Sequence
  Synthetic
cacccuguguaacagaaguu

SEQ ID NO: 16766 - RNA, 20 nt, Artificial Sequence
  Synthetic
acccuguguaacagaaguuu

SEQ ID NO: 16767 - RNA, 20 nt, Artificial Sequence
  Synthetic
cccuguguaacagaaguuuc

SEQ ID NO: 16768 - RNA, 20 nt, Artificial Sequence
  Synthetic
ccuguguaacagaaguuucu

SEQ ID NO: 16769 - RNA, 20 nt, Artificial Sequence
  Synthetic
cuguguaacagaaguuucua

SEQ ID NO: 16770 - RNA, 20 nt, Artificial Sequence
  Synthetic
uguguaacagaaguuucuag

SEQ ID NO: 16771 - RNA, 20 nt, Artificial Sequence
  Synthetic
guguaacagaaguuucuagg

SEQ ID NO: 16772 - RNA, 20 nt, Artificial Sequence
  Synthetic
uguaacagaaguuucuagga

SEQ ID NO: 16773 - RNA, 20 nt, Artificial Sequence
  Synthetic
guaacagaaguuucuaggac

SEQ ID NO: 16774 - RNA, 20 nt, Artificial Sequence
  Synthetic
uaacagaaguuucuaggacu

SEQ ID NO: 16775 - RNA, 20 nt, Artificial Sequence
  Synthetic
aacagaaguuucuaggacuc

SEQ ID NO: 16776 - RNA, 20 nt, Artificial Sequence
  Synthetic
acagaaguuucuaggacucu

SEQ ID NO: 16777 - RNA, 20 nt, Artificial Sequence
  Synthetic
cagaaguuucuaggacucug

SEQ ID NO: 16778 - RNA, 20 nt, Artificial Sequence
  Synthetic
agaaguuucuaggacucugc

SEQ ID NO: 16779 - RNA, 20 nt, Artificial Sequence
  Synthetic
gaaguuucuaggacucugca

SEQ ID NO: 16780 - RNA, 20 nt, Artificial Sequence
  Synthetic
aaguuucuaggacucugcac

SEQ ID NO: 16781 - RNA, 20 nt, Artificial Sequence
  Synthetic
aguuucuaggacucugcaca

SEQ ID NO: 16782 - RNA, 20 nt, Artificial Sequence
  Synthetic
guuucuaggacucugcacac

SEQ ID NO: 16783 - RNA, 20 nt, Artificial Sequence
  Synthetic
uuucuaggacucugcacacu

SEQ ID NO: 16784 - RNA, 20 nt, Artificial Sequence
  Synthetic
uucuaggacucugcacacua

SEQ ID NO: 16785 - RNA, 20 nt, Artificial Sequence
  Synthetic
ucuaggacucugcacacuau

SEQ ID NO: 16786 - RNA, 20 nt, Artificial Sequence
  Synthetic
cuaggacucugcacacuaug

SEQ ID NO: 16787 - RNA, 20 nt, Artificial Sequence
  Synthetic
uaggacucugcacacuaugc

SEQ ID NO: 16788 - RNA, 20 nt, Artificial Sequence
  Synthetic
aggacucugcacacuaugca

SEQ ID NO: 16789 - RNA, 20 nt, Artificial Sequence
  Synthetic
ggacucugcacacuaugcau

SEQ ID NO: 16790 - RNA, 20 nt, Artificial Sequence
  Synthetic
gacucugcacacuaugcaua

SEQ ID NO: 16791 - RNA, 20 nt, Artificial Sequence
  Synthetic
acucugcacacuaugcauau

SEQ ID NO: 16792 - RNA, 20 nt, Artificial Sequence
  Synthetic
cucugcacacuaugcauauu

SEQ ID NO: 16793 - RNA, 20 nt, Artificial Sequence
  Synthetic
ucugcacacuaugcauauua

SEQ ID NO: 16794 - RNA, 20 nt, Artificial Sequence
  Synthetic
cugcacacuaugcauauuaa

SEQ ID NO: 16795 - RNA, 20 nt, Artificial Sequence
  Synthetic
ugcacacuaugcauauuaau

SEQ ID NO: 16796 - RNA, 20 nt, Artificial Sequence
  Synthetic
gcacacuaugcauauuaaua

SEQ ID NO: 16797 - RNA, 20 nt, Artificial Sequence
  Synthetic
cacacuaugcauauuaauaa

SEQ ID NO: 16798 - RNA, 20 nt, Artificial Sequence
  Synthetic
acacuaugcauauuaauaac

SEQ ID NO: 16799 - RNA, 20 nt, Artificial Sequence
  Synthetic
cacuaugcauauuaauaacg

SEQ ID NO: 16800 - RNA, 20 nt, Artificial Sequence
  Synthetic
acuaugcauauuaauaacgu

SEQ ID NO: 16801 - RNA, 20 nt, Artificial Sequence
  Synthetic
cuaugcauauuaauaacgua

SEQ ID NO: 16802 - RNA, 20 nt, Artificial Sequence
  Synthetic
uaugcauauuaauaacguau

SEQ ID NO: 16803 - RNA, 20 nt, Artificial Sequence
  Synthetic
augcauauuaauaacguauu

SEQ ID NO: 16804 - RNA, 20 nt, Artificial Sequence
  Synthetic
ugcauauuaauaacguauuu

SEQ ID NO: 16805 - RNA, 20 nt, Artificial Sequence
  Synthetic
gcauauuaauaacguauuua

SEQ ID NO: 16806 - RNA, 20 nt, Artificial Sequence
  Synthetic
cauauuaauaacguauuuaa

SEQ ID NO: 16807 - RNA, 20 nt, Artificial Sequence
  Synthetic
auauuaauaacguauuuaaa

SEQ ID NO: 16808 - RNA, 20 nt, Artificial Sequence
  Synthetic
uauuaauaacguauuuaaag

SEQ ID NO: 16809 - RNA, 20 nt, Artificial Sequence
  Synthetic
auuaauaacguauuuaaaga

SEQ ID NO: 16810 - RNA, 20 nt, Artificial Sequence
  Synthetic
uuaauaacguauuuaaagag

SEQ ID NO: 16811 - RNA, 20 nt, Artificial Sequence
  Synthetic
uaauaacguauuuaaagagg

SEQ ID NO: 16812 - RNA, 20 nt, Artificial Sequence
  Synthetic
aauaacguauuuaaagaggg

SEQ ID NO: 16813 - RNA, 20 nt, Artificial Sequence
  Synthetic
auaacguauuuaaagaggga

SEQ ID NO: 16814 - RNA, 20 nt, Artificial Sequence
  Synthetic
uaacguauuuaaagagggaa

SEQ ID NO: 16815 - RNA, 20 nt, Artificial Sequence
  Synthetic
aacguauuuaaagagggaac

SEQ ID NO: 16816 - RNA, 20 nt, Artificial Sequence
  Synthetic
acguauuuaaagagggaacu

SEQ ID NO: 16817 - RNA, 20 nt, Artificial Sequence
  Synthetic
cguauuuaaagagggaacuu

SEQ ID NO: 16818 - RNA, 20 nt, Artificial Sequence
  Synthetic
guauuuaaagagggaacuug

SEQ ID NO: 16819 - RNA, 20 nt, Artificial Sequence
  Synthetic
uauuuaaagagggaacuuga

SEQ ID NO: 16820 - RNA, 20 nt, Artificial Sequence
  Synthetic
auuuaaagagggaacuugaa

SEQ ID NO: 16821 - RNA, 20 nt, Artificial Sequence
  Synthetic
uuuaaagagggaacuugaag

SEQ ID NO: 16822 - RNA, 20 nt, Artificial Sequence
  Synthetic
uuaaagagggaacuugaaga

SEQ ID NO: 16823 - RNA, 20 nt, Artificial Sequence
  Synthetic
uaaagagggaacuugaagac

SEQ ID NO: 16824 - RNA, 20 nt, Artificial Sequence
  Synthetic
aaagagggaacuugaagaca

SEQ ID NO: 16825 - RNA, 20 nt, Artificial Sequence
  Synthetic
aagagggaacuugaagacag

SEQ ID NO: 16826 - RNA, 20 nt, Artificial Sequence
  Synthetic
agagggaacuugaagacagu

SEQ ID NO: 16827 - RNA, 20 nt, Artificial Sequence
  Synthetic
gagggaacuugaagacaguu

SEQ ID NO: 16828 - RNA, 20 nt, Artificial Sequence
  Synthetic
agggaacuugaagacaguuu

SEQ ID NO: 16829 - RNA, 20 nt, Artificial Sequence
  Synthetic
gggaacuugaagacaguuua

SEQ ID NO: 16830 - RNA, 20 nt, Artificial Sequence
  Synthetic
ggaacuugaagacaguuuag

SEQ ID NO: 16831 - RNA, 20 nt, Artificial Sequence
  Synthetic
gaacuugaagacaguuuagg

SEQ ID NO: 16832 - RNA, 20 nt, Artificial Sequence
  Synthetic
aacuugaagacaguuuaggc

SEQ ID NO: 16833 - RNA, 20 nt, Artificial Sequence
  Synthetic
acuugaagacaguuuaggca

SEQ ID NO: 16834 - RNA, 20 nt, Artificial Sequence
  Synthetic
cuugaagacaguuuaggcag

SEQ ID NO: 16835 - RNA, 20 nt, Artificial Sequence
  Synthetic
uugaagacaguuuaggcagg

SEQ ID NO: 16836 - RNA, 20 nt, Artificial Sequence
  Synthetic
ugaagacaguuuaggcagga

SEQ ID NO: 16837 - RNA, 20 nt, Artificial Sequence
  Synthetic
gaagacaguuuaggcaggag

SEQ ID NO: 16838 - RNA, 20 nt, Artificial Sequence
  Synthetic
aagacaguuuaggcaggaga

SEQ ID NO: 16839 - RNA, 20 nt, Artificial Sequence
  Synthetic
agacaguuuaggcaggagau

SEQ ID NO: 16840 - RNA, 20 nt, Artificial Sequence
  Synthetic
gacaguuuaggcaggagauu

SEQ ID NO: 16841 - RNA, 20 nt, Artificial Sequence
  Synthetic
acaguuuaggcaggagauua

SEQ ID NO: 16842 - RNA, 20 nt, Artificial Sequence
  Synthetic
caguuuaggcaggagauuaa

SEQ ID NO: 16843 - RNA, 20 nt, Artificial Sequence
  Synthetic
aguuuaggcaggagauuaag

SEQ ID NO: 16844 - RNA, 20 nt, Artificial Sequence
  Synthetic
guuuaggcaggagauuaagg

SEQ ID NO: 16845 - RNA, 20 nt, Artificial Sequence
  Synthetic
uuuaggcaggagauuaagga

SEQ ID NO: 16846 - RNA, 20 nt, Artificial Sequence
  Synthetic
uuaggcaggagauuaaggag

SEQ ID NO: 16847 - RNA, 20 nt, Artificial Sequence
  Synthetic
uaggcaggagauuaaggaga

SEQ ID NO: 16848 - RNA, 20 nt, Artificial Sequence
  Synthetic
aggcaggagauuaaggagac

SEQ ID NO: 16849 - RNA, 20 nt, Artificial Sequence
  Synthetic
ggcaggagauuaaggagacc

SEQ ID NO: 16850 - RNA, 20 nt, Artificial Sequence
  Synthetic
gcaggagauuaaggagaccu

SEQ ID NO: 16851 - RNA, 20 nt, Artificial Sequence
  Synthetic
caggagauuaaggagaccuc

SEQ ID NO: 16852 - RNA, 20 nt, Artificial Sequence
  Synthetic
aggagauuaaggagaccucu

SEQ ID NO: 16853 - RNA, 20 nt, Artificial Sequence
  Synthetic
ggagauuaaggagaccucuc

SEQ ID NO: 16854 - RNA, 20 nt, Artificial Sequence
  Synthetic
gagauuaaggagaccucuca

SEQ ID NO: 16855 - RNA, 20 nt, Artificial Sequence
  Synthetic
agauuaaggagaccucucau

SEQ ID NO: 16856 - RNA, 20 nt, Artificial Sequence
  Synthetic
gauuaaggagaccucucaug

SEQ ID NO: 16857 - RNA, 20 nt, Artificial Sequence
  Synthetic
auuaaggagaccucucaugu

SEQ ID NO: 16858 - RNA, 20 nt, Artificial Sequence
  Synthetic
uuaaggagaccucucaugug

SEQ ID NO: 16859 - RNA, 20 nt, Artificial Sequence
  Synthetic
uaaggagaccucucaugugu

SEQ ID NO: 16860 - RNA, 20 nt, Artificial Sequence
  Synthetic
aaggagaccucucauguguu

SEQ ID NO: 16861 - RNA, 20 nt, Artificial Sequence
  Synthetic
aggagaccucucauguguuu

SEQ ID NO: 16862 - RNA, 20 nt, Artificial Sequence
  Synthetic
ggagaccucucauguguuuu

SEQ ID NO: 16863 - RNA, 20 nt, Artificial Sequence
  Synthetic
gagaccucucauguguuuuc

SEQ ID NO: 16864 - RNA, 20 nt, Artificial Sequence
  Synthetic
agaccucucauguguuuuca

SEQ ID NO: 16865 - RNA, 20 nt, Artificial Sequence
  Synthetic
gaccucucauguguuuucau

SEQ ID NO: 16866 - RNA, 20 nt, Artificial Sequence
  Synthetic
accucucauguguuuucaug

SEQ ID NO: 16867 - RNA, 20 nt, Artificial Sequence
  Synthetic
ccucucauguguuuucaugu

SEQ ID NO: 16868 - RNA, 20 nt, Artificial Sequence
  Synthetic
cucucauguguuuucaugug

SEQ ID NO: 16869 - RNA, 20 nt, Artificial Sequence
  Synthetic
ucucauguguuuucaugugu

SEQ ID NO: 16870 - RNA, 20 nt, Artificial Sequence
  Synthetic
cucauguguuuucauguguu

SEQ ID NO: 16871 - RNA, 20 nt, Artificial Sequence
  Synthetic
ucauguguuuucauguguug

SEQ ID NO: 16872 - RNA, 20 nt, Artificial Sequence
  Synthetic
cauguguuuucauguguugu

SEQ ID NO: 16873 - RNA, 20 nt, Artificial Sequence
  Synthetic
auguguuuucauguguuguc

SEQ ID NO: 16874 - RNA, 20 nt, Artificial Sequence
  Synthetic
uguguuuucauguguuguca

SEQ ID NO: 16875 - RNA, 20 nt, Artificial Sequence
  Synthetic
guguuuucauguguugucau

SEQ ID NO: 16876 - RNA, 20 nt, Artificial Sequence
  Synthetic
uguuuucauguguugucaua

SEQ ID NO: 16877 - RNA, 20 nt, Artificial Sequence
  Synthetic
guuuucauguguugucauag

SEQ ID NO: 16878 - RNA, 20 nt, Artificial Sequence
  Synthetic
uuuucauguguugucauagc

SEQ ID NO: 16879 - RNA, 20 nt, Artificial Sequence
  Synthetic
uuucauguguugucauagcc

SEQ ID NO: 16880 - RNA, 20 nt, Artificial Sequence
  Synthetic
uucauguguugucauagccc

SEQ ID NO: 16881 - RNA, 20 nt, Artificial Sequence
  Synthetic
ucauguguugucauagcccc

SEQ ID NO: 16882 - RNA, 20 nt, Artificial Sequence
  Synthetic
cauguguugucauagcccca

SEQ ID NO: 16883 - RNA, 20 nt, Artificial Sequence
  Synthetic
auguguugucauagccccau

SEQ ID NO: 16884 - RNA, 20 nt, Artificial Sequence
  Synthetic
uguguugucauagccccaug

SEQ ID NO: 16885 - RNA, 20 nt, Artificial Sequence
  Synthetic
guguugucauagccccaugu

SEQ ID NO: 16886 - RNA, 20 nt, Artificial Sequence
  Synthetic
uguugucauagccccauguu

SEQ ID NO: 16887 - RNA, 20 nt, Artificial Sequence
  Synthetic
guugucauagccccauguuu

SEQ ID NO: 16888 - RNA, 20 nt, Artificial Sequence
  Synthetic
uugucauagccccauguuug

SEQ ID NO: 16889 - RNA, 20 nt, Artificial Sequence
  Synthetic
ugucauagccccauguuugg

SEQ ID NO: 16890 - RNA, 20 nt, Artificial Sequence
  Synthetic
gucauagccccauguuugga

SEQ ID NO: 16891 - RNA, 20 nt, Artificial Sequence
  Synthetic
ucauagccccauguuuggaa

SEQ ID NO: 16892 - RNA, 20 nt, Artificial Sequence
  Synthetic
cauagccccauguuuggaaa

SEQ ID NO: 16893 - RNA, 20 nt, Artificial Sequence
  Synthetic
auagccccauguuuggaaau

SEQ ID NO: 16894 - RNA, 20 nt, Artificial Sequence
  Synthetic
uagccccauguuuggaaaug

SEQ ID NO: 16895 - RNA, 20 nt, Artificial Sequence
  Synthetic
agccccauguuuggaaauga

SEQ ID NO: 16896 - RNA, 20 nt, Artificial Sequence
  Synthetic
gccccauguuuggaaaugac

SEQ ID NO: 16897 - RNA, 20 nt, Artificial Sequence
  Synthetic
ccccauguuuggaaaugaca

SEQ ID NO: 16898 - RNA, 20 nt, Artificial Sequence
  Synthetic
cccauguuuggaaaugacaa

SEQ ID NO: 16899 - RNA, 20 nt, Artificial Sequence
  Synthetic
ccauguuuggaaaugacaau

SEQ ID NO: 16900 - RNA, 20 nt, Artificial Sequence
  Synthetic
cauguuuggaaaugacaaua

SEQ ID NO: 16901 - RNA, 20 nt, Artificial Sequence
  Synthetic
auguuuggaaaugacaauau

SEQ ID NO: 16902 - RNA, 20 nt, Artificial Sequence
  Synthetic
uguuuggaaaugacaauaug

SEQ ID NO: 16903 - RNA, 20 nt, Artificial Sequence
  Synthetic
guuuggaaaugacaauaugu

SEQ ID NO: 16904 - RNA, 20 nt, Artificial Sequence
  Synthetic
uuuggaaaugacaauaugug

SEQ ID NO: 16905 - RNA, 20 nt, Artificial Sequence
  Synthetic
uuggaaaugacaauauguga

SEQ ID NO: 16906 - RNA, 20 nt, Artificial Sequence
  Synthetic
uggaaaugacaauaugugac

SEQ ID NO: 16907 - RNA, 20 nt, Artificial Sequence
  Synthetic
ggaaaugacaauaugugaca

SEQ ID NO: 16908 - RNA, 20 nt, Artificial Sequence
  Synthetic
gaaaugacaauaugugacac

SEQ ID NO: 16909 - RNA, 20 nt, Artificial Sequence
  Synthetic
aaaugacaauaugugacaca

SEQ ID NO: 16910 - RNA, 20 nt, Artificial Sequence
  Synthetic
aaugacaauaugugacacaa

SEQ ID NO: 16911 - RNA, 20 nt, Artificial Sequence
  Synthetic
augacaauaugugacacaag

SEQ ID NO: 16912 - RNA, 20 nt, Artificial Sequence
  Synthetic
ugacaauaugugacacaaga

SEQ ID NO: 16913 - RNA, 20 nt, Artificial Sequence
  Synthetic
gacaauaugugacacaagag

SEQ ID NO: 16914 - RNA, 20 nt, Artificial Sequence
  Synthetic
acaauaugugacacaagagu

SEQ ID NO: 16915 - RNA, 20 nt, Artificial Sequence
  Synthetic
caauaugugacacaagagug

SEQ ID NO: 16916 - RNA, 20 nt, Artificial Sequence
  Synthetic
aauaugugacacaagagugu

SEQ ID NO: 16917 - RNA, 20 nt, Artificial Sequence
  Synthetic
auaugugacacaagaguguc

SEQ ID NO: 16918 - RNA, 20 nt, Artificial Sequence
  Synthetic
uaugugacacaagaguguca

SEQ ID NO: 16919 - RNA, 20 nt, Artificial Sequence
  Synthetic
augugacacaagagugucaa

SEQ ID NO: 16920 - RNA, 20 nt, Artificial Sequence
  Synthetic
ugugacacaagagugucaaa

SEQ ID NO: 16921 - RNA, 20 nt, Artificial Sequence
  Synthetic
gugacacaagagugucaaaa

SEQ ID NO: 16922 - RNA, 20 nt, Artificial Sequence
  Synthetic
ugacacaagagugucaaaau

SEQ ID NO: 16923 - RNA, 20 nt, Artificial Sequence
  Synthetic
gacacaagagugucaaaaug

SEQ ID NO: 16924 - RNA, 20 nt, Artificial Sequence
  Synthetic
acacaagagugucaaaauga

SEQ ID NO: 16925 - RNA, 20 nt, Artificial Sequence
  Synthetic
cacaagagugucaaaaugaa

SEQ ID NO: 16926 - RNA, 20 nt, Artificial Sequence
  Synthetic
acaagagugucaaaaugaag

SEQ ID NO: 16927 - RNA, 20 nt, Artificial Sequence
  Synthetic
caagagugucaaaaugaaga

SEQ ID NO: 16928 - RNA, 20 nt, Artificial Sequence
  Synthetic
aagagugucaaaaugaagac

SEQ ID NO: 16929 - RNA, 20 nt, Artificial Sequence
  Synthetic
agagugucaaaaugaagaca

SEQ ID NO: 16930 - RNA, 20 nt, Artificial Sequence
  Synthetic
gagugucaaaaugaagacac

SEQ ID NO: 16931 - RNA, 20 nt, Artificial Sequence
  Synthetic
agugucaaaaugaagacacc

SEQ ID NO: 16932 - RNA, 20 nt, Artificial Sequence
  Synthetic
gugucaaaaugaagacacca

SEQ ID NO: 16933 - RNA, 20 nt, Artificial Sequence
  Synthetic
ugucaaaaugaagacaccag

SEQ ID NO: 16934 - RNA, 20 nt, Artificial Sequence
  Synthetic
gucaaaaugaagacaccaga

SEQ ID NO: 16935 - RNA, 20 nt, Artificial Sequence
  Synthetic
ucaaaaugaagacaccagag

SEQ ID NO: 16936 - RNA, 20 nt, Artificial Sequence
  Synthetic
caaaaugaagacaccagagg

SEQ ID NO: 16937 - RNA, 20 nt, Artificial Sequence
  Synthetic
aaaaugaagacaccagagga

SEQ ID NO: 16938 - RNA, 20 nt, Artificial Sequence
  Synthetic
aaaugaagacaccagaggau

SEQ ID NO: 16939 - RNA, 20 nt, Artificial Sequence
  Synthetic
aaugaagacaccagaggaug

SEQ ID NO: 16940 - RNA, 20 nt, Artificial Sequence
  Synthetic
augaagacaccagaggauga

SEQ ID NO: 16941 - RNA, 20 nt, Artificial Sequence
  Synthetic
ugaagacaccagaggaugac

SEQ ID NO: 16942 - RNA, 20 nt, Artificial Sequence
  Synthetic
gaagacaccagaggaugaca

SEQ ID NO: 16943 - RNA, 20 nt, Artificial Sequence
  Synthetic
aagacaccagaggaugacaa

SEQ ID NO: 16944 - RNA, 20 nt, Artificial Sequence
  Synthetic
agacaccagaggaugacaac

SEQ ID NO: 16945 - RNA, 20 nt, Artificial Sequence
  Synthetic
gacaccagaggaugacaaca

SEQ ID NO: 16946 - RNA, 20 nt, Artificial Sequence
  Synthetic
acaccagaggaugacaacag

SEQ ID NO: 16947 - RNA, 20 nt, Artificial Sequence
  Synthetic
caccagaggaugacaacagu

SEQ ID NO: 16948 - RNA, 20 nt, Artificial Sequence
  Synthetic
accagaggaugacaacaguc

SEQ ID NO: 16949 - RNA, 20 nt, Artificial Sequence
  Synthetic
ccagaggaugacaacaguca

SEQ ID NO: 16950 - RNA, 20 nt, Artificial Sequence
  Synthetic
cagaggaugacaacagucaa

SEQ ID NO: 16951 - RNA, 20 nt, Artificial Sequence
  Synthetic
agaggaugacaacagucaau

SEQ ID NO: 16952 - RNA, 20 nt, Artificial Sequence
  Synthetic
gaggaugacaacagucaauc

SEQ ID NO: 16953 - RNA, 20 nt, Artificial Sequence
  Synthetic
aggaugacaacagucaauca

SEQ ID NO: 16954 - RNA, 20 nt, Artificial Sequence
  Synthetic
ggaugacaacagucaaucaa

SEQ ID NO: 16955 - RNA, 20 nt, Artificial Sequence
  Synthetic
gaugacaacagucaaucaaa

SEQ ID NO: 16956 - RNA, 20 nt, Artificial Sequence
  Synthetic
augacaacagucaaucaaag

SEQ ID NO: 16957 - RNA, 20 nt, Artificial Sequence
  Synthetic
ugacaacagucaaucaaagc

SEQ ID NO: 16958 - RNA, 20 nt, Artificial Sequence
  Synthetic
gacaacagucaaucaaagcc

SEQ ID NO: 16959 - RNA, 20 nt, Artificial Sequence
  Synthetic
acaacagucaaucaaagccc

SEQ ID NO: 16960 - RNA, 20 nt, Artificial Sequence
  Synthetic
caacagucaaucaaagccca

SEQ ID NO: 16961 - RNA, 20 nt, Artificial Sequence
  Synthetic
aacagucaaucaaagcccag

SEQ ID NO: 16962 - RNA, 20 nt, Artificial Sequence
  Synthetic
acagucaaucaaagcccagu

SEQ ID NO: 16963 - RNA, 20 nt, Artificial Sequence
  Synthetic
cagucaaucaaagcccagua

SEQ ID NO: 16964 - RNA, 20 nt, Artificial Sequence
  Synthetic
agucaaucaaagcccaguag

SEQ ID NO: 16965 - RNA, 20 nt, Artificial Sequence
  Synthetic
gucaaucaaagcccaguaga

SEQ ID NO: 16966 - RNA, 20 nt, Artificial Sequence
  Synthetic
ucaaucaaagcccaguagaa

SEQ ID NO: 16967 - RNA, 20 nt, Artificial Sequence
  Synthetic
caaucaaagcccaguagaau

SEQ ID NO: 16968 - RNA, 20 nt, Artificial Sequence
  Synthetic
aaucaaagcccaguagaauc

SEQ ID NO: 16969 - RNA, 20 nt, Artificial Sequence
  Synthetic
aucaaagcccaguagaaucu

SEQ ID NO: 16970 - RNA, 20 nt, Artificial Sequence
  Synthetic
ucaaagcccaguagaaucua

SEQ ID NO: 16971 - RNA, 20 nt, Artificial Sequence
  Synthetic
caaagcccaguagaaucuag

SEQ ID NO: 16972 - RNA, 20 nt, Artificial Sequence
  Synthetic
aaagcccaguagaaucuagg

SEQ ID NO: 16973 - RNA, 20 nt, Artificial Sequence
  Synthetic
aagcccaguagaaucuagga

SEQ ID NO: 16974 - RNA, 20 nt, Artificial Sequence
  Synthetic
agcccaguagaaucuaggaa

SEQ ID NO: 16975 - RNA, 20 nt, Artificial Sequence
  Synthetic
gcccaguagaaucuaggaac

SEQ ID NO: 16976 - RNA, 20 nt, Artificial Sequence
  Synthetic
cccaguagaaucuaggaacu

SEQ ID NO: 16977 - RNA, 20 nt, Artificial Sequence
  Synthetic
ccaguagaaucuaggaacug

SEQ ID NO: 16978 - RNA, 20 nt, Artificial Sequence
  Synthetic
caguagaaucuaggaacugg

SEQ ID NO: 16979 - RNA, 20 nt, Artificial Sequence
  Synthetic
aguagaaucuaggaacugga

SEQ ID NO: 16980 - RNA, 20 nt, Artificial Sequence
  Synthetic
guagaaucuaggaacuggaa

SEQ ID NO: 16981 - RNA, 20 nt, Artificial Sequence
  Synthetic
uagaaucuaggaacuggaag

SEQ ID NO: 16982 - RNA, 20 nt, Artificial Sequence
  Synthetic
agaaucuaggaacuggaagc

SEQ ID NO: 16983 - RNA, 20 nt, Artificial Sequence
  Synthetic
gaaucuaggaacuggaagca

SEQ ID NO: 16984 - RNA, 20 nt, Artificial Sequence
  Synthetic
aaucuaggaacuggaagcaa

SEQ ID NO: 16985 - RNA, 20 nt, Artificial Sequence
  Synthetic
aucuaggaacuggaagcaag

SEQ ID NO: 16986 - RNA, 20 nt, Artificial Sequence
  Synthetic
ucuaggaacuggaagcaagg

SEQ ID NO: 16987 - RNA, 20 nt, Artificial Sequence
  Synthetic
cuaggaacuggaagcaagga

SEQ ID NO: 16988 - RNA, 20 nt, Artificial Sequence
  Synthetic
uaggaacuggaagcaaggaa

SEQ ID NO: 16989 - RNA, 20 nt, Artificial Sequence
  Synthetic
aggaacuggaagcaaggaag

SEQ ID NO: 16990 - RNA, 20 nt, Artificial Sequence
  Synthetic
ggaacuggaagcaaggaagg

SEQ ID NO: 16991 - RNA, 20 nt, Artificial Sequence
  Synthetic
gaacuggaagcaaggaaggu

SEQ ID NO: 16992 - RNA, 20 nt, Artificial Sequence
  Synthetic
aacuggaagcaaggaaggug

SEQ ID NO: 16993 - RNA, 20 nt, Artificial Sequence
  Synthetic
acuggaagcaaggaagguga

SEQ ID NO: 16994 - RNA, 20 nt, Artificial Sequence
  Synthetic
cuggaagcaaggaaggugag

SEQ ID NO: 16995 - RNA, 20 nt, Artificial Sequence
  Synthetic
uggaagcaaggaaggugaga

SEQ ID NO: 16996 - RNA, 20 nt, Artificial Sequence
  Synthetic
ggaagcaaggaaggugagaa

SEQ ID NO: 16997 - RNA, 20 nt, Artificial Sequence
  Synthetic
gaagcaaggaaggugagaau

SEQ ID NO: 16998 - RNA, 20 nt, Artificial Sequence
  Synthetic
aagcaaggaaggugagaauu

SEQ ID NO: 16999 - RNA, 20 nt, Artificial Sequence
  Synthetic
agcaaggaaggugagaauuu

SEQ ID NO: 17000 - RNA, 20 nt, Artificial Sequence
  Synthetic
gcaaggaaggugagaauuug

SEQ ID NO: 17001 - RNA, 20 nt, Artificial Sequence
  Synthetic
caaggaaggugagaauuugu

SEQ ID NO: 17002 - RNA, 20 nt, Artificial Sequence
  Synthetic
aaggaaggugagaauuuguc

SEQ ID NO: 17003 - RNA, 20 nt, Artificial Sequence
  Synthetic
aggaaggugagaauuuguca

SEQ ID NO: 17004 - RNA, 20 nt, Artificial Sequence
  Synthetic
ggaaggugagaauuugucag

SEQ ID NO: 17005 - RNA, 20 nt, Artificial Sequence
  Synthetic
gaaggugagaauuugucagu

SEQ ID NO: 17006 - RNA, 20 nt, Artificial Sequence
  Synthetic
aaggugagaauuugucagug

SEQ ID NO: 17007 - RNA, 20 nt, Artificial Sequence
  Synthetic
aggugagaauuugucagugu

SEQ ID NO: 17008 - RNA, 20 nt, Artificial Sequence
  Synthetic
ggugagaauuugucagugug

SEQ ID NO: 17009 - RNA, 20 nt, Artificial Sequence
  Synthetic
gugagaauuugucagugugg

SEQ ID NO: 17010 - RNA, 20 nt, Artificial Sequence
  Synthetic
ugagaauuugucaguguggc

SEQ ID NO: 17011 - RNA, 20 nt, Artificial Sequence
  Synthetic
gagaauuugucaguguggcu

SEQ ID NO: 17012 - RNA, 20 nt, Artificial Sequence
  Synthetic
agaauuugucaguguggcuu

SEQ ID NO: 17013 - RNA, 20 nt, Artificial Sequence
  Synthetic
gaauuugucaguguggcuuc

SEQ ID NO: 17014 - RNA, 20 nt, Artificial Sequence
  Synthetic
aauuugucaguguggcuuca

SEQ ID NO: 17015 - RNA, 20 nt, Artificial Sequence
  Synthetic
auuugucaguguggcuucau

SEQ ID NO: 17016 - RNA, 20 nt, Artificial Sequence
  Synthetic
uuugucaguguggcuucauc

SEQ ID NO: 17017 - RNA, 20 nt, Artificial Sequence
  Synthetic
uugucaguguggcuucauca

SEQ ID NO: 17018 - RNA, 20 nt, Artificial Sequence
  Synthetic
ugucaguguggcuucaucac

SEQ ID NO: 17019 - RNA, 20 nt, Artificial Sequence
  Synthetic
gucaguguggcuucaucacu

SEQ ID NO: 17020 - RNA, 20 nt, Artificial Sequence
  Synthetic
ucaguguggcuucaucacua

SEQ ID NO: 17021 - RNA, 20 nt, Artificial Sequence
  Synthetic
caguguggcuucaucacuac

SEQ ID NO: 17022 - RNA, 20 nt, Artificial Sequence
  Synthetic
aguguggcuucaucacuacc

SEQ ID NO: 17023 - RNA, 20 nt, Artificial Sequence
  Synthetic
guguggcuucaucacuaccu

SEQ ID NO: 17024 - RNA, 20 nt, Artificial Sequence
  Synthetic
uguggcuucaucacuaccua

SEQ ID NO: 17025 - RNA, 20 nt, Artificial Sequence
  Synthetic
guggcuucaucacuaccuau

SEQ ID NO: 17026 - RNA, 20 nt, Artificial Sequence
  Synthetic
uggcuucaucacuaccuauu

SEQ ID NO: 17027 - RNA, 20 nt, Artificial Sequence
  Synthetic
ggcuucaucacuaccuauug

SEQ ID NO: 17028 - RNA, 20 nt, Artificial Sequence
  Synthetic
gcuucaucacuaccuauugg

SEQ ID NO: 17029 - RNA, 20 nt, Artificial Sequence
  Synthetic
cuucaucacuaccuauuggu

SEQ ID NO: 17030 - RNA, 20 nt, Artificial Sequence
  Synthetic
uucaucacuaccuauuggug

SEQ ID NO: 17031 - RNA, 20 nt, Artificial Sequence
  Synthetic
ucaucacuaccuauuggugg

SEQ ID NO: 17032 - RNA, 20 nt, Artificial Sequence
  Synthetic
caucacuaccuauuggugga

SEQ ID NO: 17033 - RNA, 20 nt, Artificial Sequence
  Synthetic
aucacuaccuauugguggaa

SEQ ID NO: 17034 - RNA, 20 nt, Artificial Sequence
  Synthetic
ucacuaccuauugguggaag

SEQ ID NO: 17035 - RNA, 20 nt, Artificial Sequence
  Synthetic
cacuaccuauugguggaaga

SEQ ID NO: 17036 - RNA, 20 nt, Artificial Sequence
  Synthetic
acuaccuauugguggaagac

SEQ ID NO: 17037 - RNA, 20 nt, Artificial Sequence
  Synthetic
cuaccuauugguggaagaca

SEQ ID NO: 17038 - RNA, 20 nt, Artificial Sequence
  Synthetic
uaccuauugguggaagacac

SEQ ID NO: 17039 - RNA, 20 nt, Artificial Sequence
  Synthetic
accuauugguggaagacaca

SEQ ID NO: 17040 - RNA, 20 nt, Artificial Sequence
  Synthetic
ccuauugguggaagacacau

SEQ ID NO: 17041 - RNA, 20 nt, Artificial Sequence
  Synthetic
cuauugguggaagacacaua

SEQ ID NO: 17042 - RNA, 20 nt, Artificial Sequence
  Synthetic
uauugguggaagacacauac

SEQ ID NO: 17043 - RNA, 20 nt, Artificial Sequence
  Synthetic
auugguggaagacacauacc

SEQ ID NO: 17044 - RNA, 20 nt, Artificial Sequence
  Synthetic
uugguggaagacacauaccu

SEQ ID NO: 17045 - RNA, 20 nt, Artificial Sequence
  Synthetic
ugguggaagacacauaccug

SEQ ID NO: 17046 - RNA, 20 nt, Artificial Sequence
  Synthetic
gguggaagacacauaccuga

SEQ ID NO: 17047 - RNA, 20 nt, Artificial Sequence
  Synthetic
guggaagacacauaccugau

SEQ ID NO: 17048 - RNA, 20 nt, Artificial Sequence
  Synthetic
uggaagacacauaccugaua

SEQ ID NO: 17049 - RNA, 20 nt, Artificial Sequence
  Synthetic
ggaagacacauaccugauaa

SEQ ID NO: 17050 - RNA, 20 nt, Artificial Sequence
  Synthetic
gaagacacauaccugauaac

SEQ ID NO: 17051 - RNA, 20 nt, Artificial Sequence
  Synthetic
aagacacauaccugauaacu

SEQ ID NO: 17052 - RNA, 20 nt, Artificial Sequence
  Synthetic
agacacauaccugauaacua

SEQ ID NO: 17053 - RNA, 20 nt, Artificial Sequence
  Synthetic
gacacauaccugauaacuac

SEQ ID NO: 17054 - RNA, 20 nt, Artificial Sequence
  Synthetic
acacauaccugauaacuacu

SEQ ID NO: 17055 - RNA, 20 nt, Artificial Sequence
  Synthetic
cacauaccugauaacuacuu

SEQ ID NO: 17056 - RNA, 20 nt, Artificial Sequence
  Synthetic
acauaccugauaacuacuuu

SEQ ID NO: 17057 - RNA, 20 nt, Artificial Sequence
  Synthetic
cauaccugauaacuacuuug

SEQ ID NO: 17058 - RNA, 20 nt, Artificial Sequence
  Synthetic
auaccugauaacuacuuugc

SEQ ID NO: 17059 - RNA, 20 nt, Artificial Sequence
  Synthetic
uaccugauaacuacuuugcu

SEQ ID NO: 17060 - RNA, 20 nt, Artificial Sequence
  Synthetic
accugauaacuacuuugcua

SEQ ID NO: 17061 - RNA, 20 nt, Artificial Sequence
  Synthetic
ccugauaacuacuuugcuag

SEQ ID NO: 17062 - RNA, 20 nt, Artificial Sequence
  Synthetic
cugauaacuacuuugcuagu

SEQ ID NO: 17063 - RNA, 20 nt, Artificial Sequence
  Synthetic
ugauaacuacuuugcuaguu

SEQ ID NO: 17064 - RNA, 20 nt, Artificial Sequence
  Synthetic
gauaacuacuuugcuaguuc

SEQ ID NO: 17065 - RNA, 20 nt, Artificial Sequence
  Synthetic
auaacuacuuugcuaguucu

SEQ ID NO: 17066 - RNA, 20 nt, Artificial Sequence
  Synthetic
uaacuacuuugcuaguucuu

SEQ ID NO: 17067 - RNA, 20 nt, Artificial Sequence
  Synthetic
aacuacuuugcuaguucuua

SEQ ID NO: 17068 - RNA, 20 nt, Artificial Sequence
  Synthetic
acuacuuugcuaguucuuag

SEQ ID NO: 17069 - RNA, 20 nt, Artificial Sequence
  Synthetic
cuacuuugcuaguucuuagc

SEQ ID NO: 17070 - RNA, 20 nt, Artificial Sequence
  Synthetic
uacuuugcuaguucuuagca

SEQ ID NO: 17071 - RNA, 20 nt, Artificial Sequence
  Synthetic
acuuugcuaguucuuagcac

SEQ ID NO: 17072 - RNA, 20 nt, Artificial Sequence
  Synthetic
cuuugcuaguucuuagcaca

SEQ ID NO: 17073 - RNA, 20 nt, Artificial Sequence
  Synthetic
uuugcuaguucuuagcacau

SEQ ID NO: 17074 - RNA, 20 nt, Artificial Sequence
  Synthetic
uugcuaguucuuagcacauc

SEQ ID NO: 17075 - RNA, 20 nt, Artificial Sequence
  Synthetic
ugcuaguucuuagcacauca

SEQ ID NO: 17076 - RNA, 20 nt, Artificial Sequence
  Synthetic
gcuaguucuuagcacaucag

SEQ ID NO: 17077 - RNA, 20 nt, Artificial Sequence
  Synthetic
cuaguucuuagcacaucagg

SEQ ID NO: 17078 - RNA, 20 nt, Artificial Sequence
  Synthetic
uaguucuuagcacaucaggg

SEQ ID NO: 17079 - RNA, 20 nt, Artificial Sequence
  Synthetic
aguucuuagcacaucagggc

SEQ ID NO: 17080 - RNA, 20 nt, Artificial Sequence
  Synthetic
guucuuagcacaucagggcc

SEQ ID NO: 17081 - RNA, 20 nt, Artificial Sequence
  Synthetic
uucuuagcacaucagggcca

SEQ ID NO: 17082 - RNA, 20 nt, Artificial Sequence
  Synthetic
ucuuagcacaucagggccau

SEQ ID NO: 17083 - RNA, 20 nt, Artificial Sequence
  Synthetic
cuuagcacaucagggccauu

SEQ ID NO: 17084 - RNA, 20 nt, Artificial Sequence
  Synthetic
uuagcacaucagggccauuu

SEQ ID NO: 17085 - RNA, 20 nt, Artificial Sequence
  Synthetic
uagcacaucagggccauuuu

SEQ ID NO: 17086 - RNA, 20 nt, Artificial Sequence
  Synthetic
agcacaucagggccauuuuc

SEQ ID NO: 17087 - RNA, 20 nt, Artificial Sequence
  Synthetic
gcacaucagggccauuuucu

SEQ ID NO: 17088 - RNA, 20 nt, Artificial Sequence
  Synthetic
cacaucagggccauuuucug

SEQ ID NO: 17089 - RNA, 20 nt, Artificial Sequence
  Synthetic
acaucagggccauuuucugg

SEQ ID NO: 17090 - RNA, 20 nt, Artificial Sequence
  Synthetic
caucagggccauuuucugga

SEQ ID NO: 17091 - RNA, 20 nt, Artificial Sequence
  Synthetic
aucagggccauuuucuggag

SEQ ID NO: 17092 - RNA, 20 nt, Artificial Sequence
  Synthetic
ucagggccauuuucuggagg

SEQ ID NO: 17093 - RNA, 20 nt, Artificial Sequence
  Synthetic
cagggccauuuucuggaggc

SEQ ID NO: 17094 - RNA, 20 nt, Artificial Sequence
  Synthetic
agggccauuuucuggaggca

SEQ ID NO: 17095 - RNA, 20 nt, Artificial Sequence
  Synthetic
gggccauuuucuggaggcau

SEQ ID NO: 17096 - RNA, 20 nt, Artificial Sequence
  Synthetic
ggccauuuucuggaggcaua

SEQ ID NO: 17097 - RNA, 20 nt, Artificial Sequence
  Synthetic
gccauuuucuggaggcauaa

SEQ ID NO: 17098 - RNA, 20 nt, Artificial Sequence
  Synthetic
ccauuuucuggaggcauaau

SEQ ID NO: 17099 - RNA, 20 nt, Artificial Sequence
  Synthetic
cauuuucuggaggcauaaug

SEQ ID NO: 17100 - RNA, 20 nt, Artificial Sequence
  Synthetic
auuuucuggaggcauaaugu

SEQ ID NO: 17101 - RNA, 20 nt, Artificial Sequence
  Synthetic
uuuucuggaggcauaaugua

SEQ ID NO: 17102 - RNA, 20 nt, Artificial Sequence
  Synthetic
uuucuggaggcauaauguaa

SEQ ID NO: 17103 - RNA, 20 nt, Artificial Sequence
  Synthetic
uucuggaggcauaauguaau

SEQ ID NO: 17104 - RNA, 20 nt, Artificial Sequence
  Synthetic
ucuggaggcauaauguaauc

SEQ ID NO: 17105 - RNA, 20 nt, Artificial Sequence
  Synthetic
cuggaggcauaauguaaucu

SEQ ID NO: 17106 - RNA, 20 nt, Artificial Sequence
  Synthetic
uggaggcauaauguaaucua

SEQ ID NO: 17107 - RNA, 20 nt, Artificial Sequence
  Synthetic
ggaggcauaauguaaucuac

SEQ ID NO: 17108 - RNA, 20 nt, Artificial Sequence
  Synthetic
gaggcauaauguaaucuaca

SEQ ID NO: 17109 - RNA, 20 nt, Artificial Sequence
  Synthetic
aggcauaauguaaucuacag

SEQ ID NO: 17110 - RNA, 20 nt, Artificial Sequence
  Synthetic
ggcauaauguaaucuacaga

SEQ ID NO: 17111 - RNA, 20 nt, Artificial Sequence
  Synthetic
gcauaauguaaucuacagaa

SEQ ID NO: 17112 - RNA, 20 nt, Artificial Sequence
  Synthetic
cauaauguaaucuacagaaa

SEQ ID NO: 17113 - RNA, 20 nt, Artificial Sequence
  Synthetic
auaauguaaucuacagaaac

SEQ ID NO: 17114 - RNA, 20 nt, Artificial Sequence
  Synthetic
uaauguaaucuacagaaaca

SEQ ID NO: 17115 - RNA, 20 nt, Artificial Sequence
  Synthetic
aauguaaucuacagaaacag

SEQ ID NO: 17116 - RNA, 20 nt, Artificial Sequence
  Synthetic
auguaaucuacagaaacagc

SEQ ID NO: 17117 - RNA, 20 nt, Artificial Sequence
  Synthetic
uguaaucuacagaaacagcu

SEQ ID NO: 17118 - RNA, 20 nt, Artificial Sequence
  Synthetic
guaaucuacagaaacagcuc

SEQ ID NO: 17119 - RNA, 20 nt, Artificial Sequence
  Synthetic
uaaucuacagaaacagcucu

SEQ ID NO: 17120 - RNA, 20 nt, Artificial Sequence
  Synthetic
aaucuacagaaacagcucuc

SEQ ID NO: 17121 - RNA, 20 nt, Artificial Sequence
  Synthetic
aucuacagaaacagcucuca

SEQ ID NO: 17122 - RNA, 20 nt, Artificial Sequence
  Synthetic
ucuacagaaacagcucucaa

SEQ ID NO: 17123 - RNA, 20 nt, Artificial Sequence
  Synthetic
cuacagaaacagcucucaag

SEQ ID NO: 17124 - RNA, 20 nt, Artificial Sequence
  Synthetic
uacagaaacagcucucaagc

SEQ ID NO: 17125 - RNA, 20 nt, Artificial Sequence
  Synthetic
acagaaacagcucucaagcc

SEQ ID NO: 17126 - RNA, 20 nt, Artificial Sequence
  Synthetic
cagaaacagcucucaagccu

SEQ ID NO: 17127 - RNA, 20 nt, Artificial Sequence
  Synthetic
agaaacagcucucaagccug

SEQ ID NO: 17128 - RNA, 20 nt, Artificial Sequence
  Synthetic
gaaacagcucucaagccuga

SEQ ID NO: 17129 - RNA, 20 nt, Artificial Sequence
  Synthetic
aaacagcucucaagccugac

SEQ ID NO: 17130 - RNA, 20 nt, Artificial Sequence
  Synthetic
aacagcucucaagccugacc

SEQ ID NO: 17131 - RNA, 20 nt, Artificial Sequence
  Synthetic
acagcucucaagccugaccu

SEQ ID NO: 17132 - RNA, 20 nt, Artificial Sequence
  Synthetic
cagcucucaagccugaccuu

SEQ ID NO: 17133 - RNA, 20 nt, Artificial Sequence
  Synthetic
agcucucaagccugaccuuu

SEQ ID NO: 17134 - RNA, 20 nt, Artificial Sequence
  Synthetic
gcucucaagccugaccuuug

SEQ ID NO: 17135 - RNA, 20 nt, Artificial Sequence
  Synthetic
cucucaagccugaccuuugc

SEQ ID NO: 17136 - RNA, 20 nt, Artificial Sequence
  Synthetic
ucucaagccugaccuuugcu

SEQ ID NO: 17137 - RNA, 20 nt, Artificial Sequence
  Synthetic
cucaagccugaccuuugcuc

SEQ ID NO: 17138 - RNA, 20 nt, Artificial Sequence
  Synthetic
ucaagccugaccuuugcucu

SEQ ID NO: 17139 - RNA, 20 nt, Artificial Sequence
  Synthetic
caagccugaccuuugcucua

SEQ ID NO: 17140 - RNA, 20 nt, Artificial Sequence
  Synthetic
aagccugaccuuugcucuac

SEQ ID NO: 17141 - RNA, 20 nt, Artificial Sequence
  Synthetic
agccugaccuuugcucuaca

SEQ ID NO: 17142 - RNA, 20 nt, Artificial Sequence
  Synthetic
gccugaccuuugcucuacag

SEQ ID NO: 17143 - RNA, 20 nt, Artificial Sequence
  Synthetic
ccugaccuuugcucuacaga

SEQ ID NO: 17144 - RNA, 20 nt, Artificial Sequence
  Synthetic
cugaccuuugcucuacagau

SEQ ID NO: 17145 - RNA, 20 nt, Artificial Sequence
  Synthetic
ugaccuuugcucuacagaua

SEQ ID NO: 17146 - RNA, 20 nt, Artificial Sequence
  Synthetic
gaccuuugcucuacagauag

SEQ ID NO: 17147 - RNA, 20 nt, Artificial Sequence
  Synthetic
accuuugcucuacagauagc

SEQ ID NO: 17148 - RNA, 20 nt, Artificial Sequence
  Synthetic
ccuuugcucuacagauagcc

SEQ ID NO: 17149 - RNA, 20 nt, Artificial Sequence
  Synthetic
cuuugcucuacagauagccu

SEQ ID NO: 17150 - RNA, 20 nt, Artificial Sequence
  Synthetic
uuugcucuacagauagccuc

SEQ ID NO: 17151 - RNA, 20 nt, Artificial Sequence
  Synthetic
uugcucuacagauagccuca

SEQ ID NO: 17152 - RNA, 20 nt, Artificial Sequence
  Synthetic
ugcucuacagauagccucag

SEQ ID NO: 17153 - RNA, 20 nt, Artificial Sequence
  Synthetic
gcucuacagauagccucagu

SEQ ID NO: 17154 - RNA, 20 nt, Artificial Sequence
  Synthetic
cucuacagauagccucagua

SEQ ID NO: 17155 - RNA, 20 nt, Artificial Sequence
  Synthetic
ucuacagauagccucaguau

SEQ ID NO: 17156 - RNA, 20 nt, Artificial Sequence
  Synthetic
cuacagauagccucaguauu

SEQ ID NO: 17157 - RNA, 20 nt, Artificial Sequence
  Synthetic
uacagauagccucaguauuc

SEQ ID NO: 17158 - RNA, 20 nt, Artificial Sequence
  Synthetic
acagauagccucaguauuca

SEQ ID NO: 17159 - RNA, 20 nt, Artificial Sequence
  Synthetic
cagauagccucaguauucac

SEQ ID NO: 17160 - RNA, 20 nt, Artificial Sequence
  Synthetic
agauagccucaguauucacc

SEQ ID NO: 17161 - RNA, 20 nt, Artificial Sequence
  Synthetic
gauagccucaguauucaccu

SEQ ID NO: 17162 - RNA, 20 nt, Artificial Sequence
  Synthetic
auagccucaguauucaccuc

SEQ ID NO: 17163 - RNA, 20 nt, Artificial Sequence
  Synthetic
uagccucaguauucaccucu

SEQ ID NO: 17164 - RNA, 20 nt, Artificial Sequence
  Synthetic
agccucaguauucaccucug

SEQ ID NO: 17165 - RNA, 20 nt, Artificial Sequence
  Synthetic
gccucaguauucaccucuga

SEQ ID NO: 17166 - RNA, 20 nt, Artificial Sequence
  Synthetic
ccucaguauucaccucugau

SEQ ID NO: 17167 - RNA, 20 nt, Artificial Sequence
  Synthetic
cucaguauucaccucugauu

SEQ ID NO: 17168 - RNA, 20 nt, Artificial Sequence
  Synthetic
ucaguauucaccucugauua

SEQ ID NO: 17169 - RNA, 20 nt, Artificial Sequence
  Synthetic
caguauucaccucugauuau

SEQ ID NO: 17170 - RNA, 20 nt, Artificial Sequence
  Synthetic
aguauucaccucugauuaug

SEQ ID NO: 17171 - RNA, 20 nt, Artificial Sequence
  Synthetic
guauucaccucugauuaugu

SEQ ID NO: 17172 - RNA, 20 nt, Artificial Sequence
  Synthetic
uauucaccucugauuaugug

SEQ ID NO: 17173 - RNA, 20 nt, Artificial Sequence
  Synthetic
auucaccucugauuaugugu

SEQ ID NO: 17174 - RNA, 20 nt, Artificial Sequence
  Synthetic
uucaccucugauuauguguc

SEQ ID NO: 17175 - RNA, 20 nt, Artificial Sequence
  Synthetic
ucaccucugauuaugugucc

SEQ ID NO: 17176 - RNA, 20 nt, Artificial Sequence
  Synthetic
caccucugauuaugugucca

SEQ ID NO: 17177 - RNA, 20 nt, Artificial Sequence
  Synthetic
accucugauuauguguccag

SEQ ID NO: 17178 - RNA, 20 nt, Artificial Sequence
  Synthetic
ccucugauuauguguccaga

SEQ ID NO: 17179 - RNA, 20 nt, Artificial Sequence
  Synthetic
cucugauuauguguccagau

SEQ ID NO: 17180 - RNA, 20 nt, Artificial Sequence
  Synthetic
ucugauuauguguccagauu

SEQ ID NO: 17181 - RNA, 20 nt, Artificial Sequence
  Synthetic
cugauuauguguccagauug

SEQ ID NO: 17182 - RNA, 20 nt, Artificial Sequence
  Synthetic
ugauuauguguccagauugc

SEQ ID NO: 17183 - RNA, 20 nt, Artificial Sequence
  Synthetic
gauuauguguccagauugca

SEQ ID NO: 17184 - RNA, 20 nt, Artificial Sequence
  Synthetic
auuauguguccagauugcag

SEQ ID NO: 17185 - RNA, 20 nt, Artificial Sequence
  Synthetic
uuauguguccagauugcagu

SEQ ID NO: 17186 - RNA, 20 nt, Artificial Sequence
  Synthetic
uauguguccagauugcaguu

SEQ ID NO: 17187 - RNA, 20 nt, Artificial Sequence
  Synthetic
auguguccagauugcaguuu

SEQ ID NO: 17188 - RNA, 20 nt, Artificial Sequence
  Synthetic
uguguccagauugcaguuuc

SEQ ID NO: 17189 - RNA, 20 nt, Artificial Sequence
  Synthetic
guguccagauugcaguuuca

SEQ ID NO: 17190 - RNA, 20 nt, Artificial Sequence
  Synthetic
uguccagauugcaguuucau

SEQ ID NO: 17191 - RNA, 20 nt, Artificial Sequence
  Synthetic
guccagauugcaguuucauu

SEQ ID NO: 17192 - RNA, 20 nt, Artificial Sequence
  Synthetic
uccagauugcaguuucauuc

SEQ ID NO: 17193 - RNA, 20 nt, Artificial Sequence
  Synthetic
ccagauugcaguuucauucc

SEQ ID NO: 17194 - RNA, 20 nt, Artificial Sequence
  Synthetic
cagauugcaguuucauuccu

SEQ ID NO: 17195 - RNA, 20 nt, Artificial Sequence
  Synthetic
agauugcaguuucauuccug

SEQ ID NO: 17196 - RNA, 20 nt, Artificial Sequence
  Synthetic
gauugcaguuucauuccugu

SEQ ID NO: 17197 - RNA, 20 nt, Artificial Sequence
  Synthetic
auugcaguuucauuccuguu

SEQ ID NO: 17198 - RNA, 20 nt, Artificial Sequence
  Synthetic
uugcaguuucauuccuguug

SEQ ID NO: 17199 - RNA, 20 nt, Artificial Sequence
  Synthetic
ugcaguuucauuccuguuga

SEQ ID NO: 17200 - RNA, 20 nt, Artificial Sequence
  Synthetic
gcaguuucauuccuguugau

SEQ ID NO: 17201 - RNA, 20 nt, Artificial Sequence
  Synthetic
caguuucauuccuguugaua

SEQ ID NO: 17202 - RNA, 20 nt, Artificial Sequence
  Synthetic
aguuucauuccuguugauac

SEQ ID NO: 17203 - RNA, 20 nt, Artificial Sequence
  Synthetic
guuucauuccuguugauacg

SEQ ID NO: 17204 - RNA, 20 nt, Artificial Sequence
  Synthetic
uuucauuccuguugauacgc

SEQ ID NO: 17205 - RNA, 20 nt, Artificial Sequence
  Synthetic
uucauuccuguugauacgcc

SEQ ID NO: 17206 - RNA, 20 nt, Artificial Sequence
  Synthetic
ucauuccuguugauacgccu

SEQ ID NO: 17207 - RNA, 20 nt, Artificial Sequence
  Synthetic
cauuccuguugauacgccug

SEQ ID NO: 17208 - RNA, 20 nt, Artificial Sequence
  Synthetic
auuccuguugauacgccugg

SEQ ID NO: 17209 - RNA, 20 nt, Artificial Sequence
  Synthetic
uuccuguugauacgccuggc

SEQ ID NO: 17210 - RNA, 20 nt, Artificial Sequence
  Synthetic
uccuguugauacgccuggcu

SEQ ID NO: 17211 - RNA, 20 nt, Artificial Sequence
  Synthetic
ccuguugauacgccuggcuu

SEQ ID NO: 17212 - RNA, 20 nt, Artificial Sequence
  Synthetic
cuguugauacgccuggcuug

SEQ ID NO: 17213 - RNA, 20 nt, Artificial Sequence
  Synthetic
uguugauacgccuggcuugg

SEQ ID NO: 17214 - RNA, 20 nt, Artificial Sequence
  Synthetic
guugauacgccuggcuuggg

SEQ ID NO: 17215 - RNA, 20 nt, Artificial Sequence
  Synthetic
uugauacgccuggcuugggu

SEQ ID NO: 17216 - RNA, 20 nt, Artificial Sequence
  Synthetic
ugauacgccuggcuugggug

SEQ ID NO: 17217 - RNA, 20 nt, Artificial Sequence
  Synthetic
gauacgccuggcuugggugg

SEQ ID NO: 17218 - RNA, 20 nt, Artificial Sequence
  Synthetic
auacgccuggcuuggguggg

SEQ ID NO: 17219 - RNA, 20 nt, Artificial Sequence
  Synthetic
uacgccuggcuugggugggg

SEQ ID NO: 17220 - RNA, 20 nt, Artificial Sequence
  Synthetic
acgccuggcuugggugggga

SEQ ID NO: 17221 - RNA, 20 nt, Artificial Sequence
  Synthetic
cgccuggcuuggguggggac

SEQ ID NO: 17222 - RNA, 20 nt, Artificial Sequence
  Synthetic
gccuggcuuggguggggacc

SEQ ID NO: 17223 - RNA, 20 nt, Artificial Sequence
  Synthetic
ccuggcuuggguggggaccu

SEQ ID NO: 17224 - RNA, 20 nt, Artificial Sequence
  Synthetic
cuggcuuggguggggaccuu

SEQ ID NO: 17225 - RNA, 20 nt, Artificial Sequence
  Synthetic
uggcuuggguggggaccuuc

SEQ ID NO: 17226 - RNA, 20 nt, Artificial Sequence
  Synthetic
ggcuuggguggggaccuucc

SEQ ID NO: 17227 - RNA, 20 nt, Artificial Sequence
  Synthetic
gcuuggguggggaccuuccu

SEQ ID NO: 17228 - RNA, 20 nt, Artificial Sequence
  Synthetic
cuuggguggggaccuuccuu

SEQ ID NO: 17229 - RNA, 20 nt, Artificial Sequence
  Synthetic
uuggguggggaccuuccuuc

SEQ ID NO: 17230 - RNA, 20 nt, Artificial Sequence
  Synthetic
uggguggggaccuuccuucc

SEQ ID NO: 17231 - RNA, 20 nt, Artificial Sequence
  Synthetic
ggguggggaccuuccuucca

SEQ ID NO: 17232 - RNA, 20 nt, Artificial Sequence
  Synthetic
gguggggaccuuccuuccag

SEQ ID NO: 17233 - RNA, 20 nt, Artificial Sequence
  Synthetic
guggggaccuuccuuccaga

SEQ ID NO: 17234 - RNA, 20 nt, Artificial Sequence
  Synthetic
uggggaccuuccuuccagau

SEQ ID NO: 17235 - RNA, 20 nt, Artificial Sequence
  Synthetic
ggggaccuuccuuccagauc

SEQ ID NO: 17236 - RNA, 20 nt, Artificial Sequence
  Synthetic
gggaccuuccuuccagaucc

SEQ ID NO: 17237 - RNA, 20 nt, Artificial Sequence
  Synthetic
ggaccuuccuuccagauccu

SEQ ID NO: 17238 - RNA, 20 nt, Artificial Sequence
  Synthetic
gaccuuccuuccagauccuc

SEQ ID NO: 17239 - RNA, 20 nt, Artificial Sequence
  Synthetic
accuuccuuccagauccucu

SEQ ID NO: 17240 - RNA, 20 nt, Artificial Sequence
  Synthetic
ccuuccuuccagauccucua

SEQ ID NO: 17241 - RNA, 20 nt, Artificial Sequence
  Synthetic
cuuccuuccagauccucuaa

SEQ ID NO: 17242 - RNA, 20 nt, Artificial Sequence
  Synthetic
uuccuuccagauccucuaag

SEQ ID NO: 17243 - RNA, 20 nt, Artificial Sequence
  Synthetic
uccuuccagauccucuaagu

SEQ ID NO: 17244 - RNA, 20 nt, Artificial Sequence
  Synthetic
ccuuccagauccucuaaguu

SEQ ID NO: 17245 - RNA, 20 nt, Artificial Sequence
  Synthetic
cuuccagauccucuaaguuc

SEQ ID NO: 17246 - RNA, 20 nt, Artificial Sequence
  Synthetic
uuccagauccucuaaguucu

SEQ ID NO: 17247 - RNA, 20 nt, Artificial Sequence
  Synthetic
uccagauccucuaaguucuc

SEQ ID NO: 17248 - RNA, 20 nt, Artificial Sequence
  Synthetic
ccagauccucuaaguucucu

SEQ ID NO: 17249 - RNA, 20 nt, Artificial Sequence
  Synthetic
cagauccucuaaguucucuu

SEQ ID NO: 17250 - RNA, 20 nt, Artificial Sequence
  Synthetic
agauccucuaaguucucuuu

SEQ ID NO: 17251 - RNA, 20 nt, Artificial Sequence
  Synthetic
gauccucuaaguucucuuuc

SEQ ID NO: 17252 - RNA, 20 nt, Artificial Sequence
  Synthetic
auccucuaaguucucuuuca

SEQ ID NO: 17253 - RNA, 20 nt, Artificial Sequence
  Synthetic
uccucuaaguucucuuucau

SEQ ID NO: 17254 - RNA, 20 nt, Artificial Sequence
  Synthetic
ccucuaaguucucuuucaua

SEQ ID NO: 17255 - RNA, 20 nt, Artificial Sequence
  Synthetic
cucuaaguucucuuucauau

SEQ ID NO: 17256 - RNA, 20 nt, Artificial Sequence
  Synthetic
ucuaaguucucuuucauaug

SEQ ID NO: 17257 - RNA, 20 nt, Artificial Sequence
  Synthetic
cuaaguucucuuucauaugc

SEQ ID NO: 17258 - RNA, 20 nt, Artificial Sequence
  Synthetic
uaaguucucuuucauaugca

SEQ ID NO: 17259 - RNA, 20 nt, Artificial Sequence
  Synthetic
aaguucucuuucauaugcau

SEQ ID NO: 17260 - RNA, 20 nt, Artificial Sequence
  Synthetic
aguucucuuucauaugcauc

SEQ ID NO: 17261 - RNA, 20 nt, Artificial Sequence
  Synthetic
guucucuuucauaugcaucu

SEQ ID NO: 17262 - RNA, 20 nt, Artificial Sequence
  Synthetic
uucucuuucauaugcaucuc

SEQ ID NO: 17263 - RNA, 20 nt, Artificial Sequence
  Synthetic
ucucuuucauaugcaucuca

SEQ ID NO: 17264 - RNA, 20 nt, Artificial Sequence
  Synthetic
cucuuucauaugcaucucau

SEQ ID NO: 17265 - RNA, 20 nt, Artificial Sequence
  Synthetic
ucuuucauaugcaucucauu

SEQ ID NO: 17266 - RNA, 20 nt, Artificial Sequence
  Synthetic
cuuucauaugcaucucauuc

SEQ ID NO: 17267 - RNA, 20 nt, Artificial Sequence
  Synthetic
uuucauaugcaucucauucc

SEQ ID NO: 17268 - RNA, 20 nt, Artificial Sequence
  Synthetic
uucauaugcaucucauucca

SEQ ID NO: 17269 - RNA, 20 nt, Artificial Sequence
  Synthetic
ucauaugcaucucauuccag

SEQ ID NO: 17270 - RNA, 20 nt, Artificial Sequence
  Synthetic
cauaugcaucucauuccagg

SEQ ID NO: 17271 - RNA, 20 nt, Artificial Sequence
  Synthetic
auaugcaucucauuccaggg

SEQ ID NO: 17272 - RNA, 20 nt, Artificial Sequence
  Synthetic
uaugcaucucauuccaggga

SEQ ID NO: 17273 - RNA, 20 nt, Artificial Sequence
  Synthetic
augcaucucauuccagggag

SEQ ID NO: 17274 - RNA, 20 nt, Artificial Sequence
  Synthetic
ugcaucucauuccagggaga

SEQ ID NO: 17275 - RNA, 20 nt, Artificial Sequence
  Synthetic
gcaucucauuccagggagaa

SEQ ID NO: 17276 - RNA, 20 nt, Artificial Sequence
  Synthetic
caucucauuccagggagaag

SEQ ID NO: 17277 - RNA, 20 nt, Artificial Sequence
  Synthetic
aucucauuccagggagaagg

SEQ ID NO: 17278 - RNA, 20 nt, Artificial Sequence
  Synthetic
ucucauuccagggagaaggg

SEQ ID NO: 17279 - RNA, 20 nt, Artificial Sequence
  Synthetic
cucauuccagggagaagggg

SEQ ID NO: 17280 - RNA, 20 nt, Artificial Sequence
  Synthetic
ucauuccagggagaagggga

SEQ ID NO: 17281 - RNA, 20 nt, Artificial Sequence
  Synthetic
cauuccagggagaaggggag

SEQ ID NO: 17282 - RNA, 20 nt, Artificial Sequence
  Synthetic
auuccagggagaaggggaga

SEQ ID NO: 17283 - RNA, 20 nt, Artificial Sequence
  Synthetic
uuccagggagaaggggagag

SEQ ID NO: 17284 - RNA, 20 nt, Artificial Sequence
  Synthetic
uccagggagaaggggagagu

SEQ ID NO: 17285 - RNA, 20 nt, Artificial Sequence
  Synthetic
ccagggagaaggggagaguu

SEQ ID NO: 17286 - RNA, 20 nt, Artificial Sequence
  Synthetic
cagggagaaggggagaguuc

SEQ ID NO: 17287 - RNA, 20 nt, Artificial Sequence
  Synthetic
agggagaaggggagaguucu

SEQ ID NO: 17288 - RNA, 20 nt, Artificial Sequence
  Synthetic
gggagaaggggagaguucua

SEQ ID NO: 17289 - RNA, 20 nt, Artificial Sequence
  Synthetic
ggagaaggggagaguucuaa

SEQ ID NO: 17290 - RNA, 20 nt, Artificial Sequence
  Synthetic
gagaaggggagaguucuaag

SEQ ID NO: 17291 - RNA, 20 nt, Artificial Sequence
  Synthetic
agaaggggagaguucuaagu

SEQ ID NO: 17292 - RNA, 20 nt, Artificial Sequence
  Synthetic
gaaggggagaguucuaaguc

SEQ ID NO: 17293 - RNA, 20 nt, Artificial Sequence
  Synthetic
aaggggagaguucuaagucc

SEQ ID NO: 17294 - RNA, 20 nt, Artificial Sequence
  Synthetic
aggggagaguucuaaguccc

SEQ ID NO: 17295 - RNA, 20 nt, Artificial Sequence
  Synthetic
ggggagaguucuaaguccca

SEQ ID NO: 17296 - RNA, 20 nt, Artificial Sequence
  Synthetic
gggagaguucuaagucccaa

SEQ ID NO: 17297 - RNA, 20 nt, Artificial Sequence
  Synthetic
ggagaguucuaagucccaag

SEQ ID NO: 17298 - RNA, 20 nt, Artificial Sequence
  Synthetic
gagaguucuaagucccaagu

SEQ ID NO: 17299 - RNA, 20 nt, Artificial Sequence
  Synthetic
agaguucuaagucccaaguu

SEQ ID NO: 17300 - RNA, 20 nt, Artificial Sequence
  Synthetic
gaguucuaagucccaaguuc

SEQ ID NO: 17301 - RNA, 20 nt, Artificial Sequence
  Synthetic
aguucuaagucccaaguucu

SEQ ID NO: 17302 - RNA, 20 nt, Artificial Sequence
  Synthetic
guucuaagucccaaguucua

SEQ ID NO: 17303 - RNA, 20 nt, Artificial Sequence
  Synthetic
uucuaagucccaaguucuaa

SEQ ID NO: 17304 - RNA, 20 nt, Artificial Sequence
  Synthetic
ucuaagucccaaguucuaag

SEQ ID NO: 17305 - RNA, 20 nt, Artificial Sequence
  Synthetic
cuaagucccaaguucuaaga

SEQ ID NO: 17306 - RNA, 20 nt, Artificial Sequence
  Synthetic
uaagucccaaguucuaagac

SEQ ID NO: 17307 - RNA, 20 nt, Artificial Sequence
  Synthetic
aagucccaaguucuaagaca

SEQ ID NO: 17308 - RNA, 20 nt, Artificial Sequence
  Synthetic
agucccaaguucuaagacac

SEQ ID NO: 17309 - RNA, 20 nt, Artificial Sequence
  Synthetic
gucccaaguucuaagacaca

SEQ ID NO: 17310 - RNA, 20 nt, Artificial Sequence
  Synthetic
ucccaaguucuaagacacau

SEQ ID NO: 17311 - RNA, 20 nt, Artificial Sequence
  Synthetic
cccaaguucuaagacacaua

SEQ ID NO: 17312 - RNA, 20 nt, Artificial Sequence
  Synthetic
ccaaguucuaagacacauac

SEQ ID NO: 17313 - RNA, 20 nt, Artificial Sequence
  Synthetic
caaguucuaagacacauaca

SEQ ID NO: 17314 - RNA, 20 nt, Artificial Sequence
  Synthetic
aaguucuaagacacauacag

SEQ ID NO: 17315 - RNA, 20 nt, Artificial Sequence
  Synthetic
aguucuaagacacauacagg

SEQ ID NO: 17316 - RNA, 20 nt, Artificial Sequence
  Synthetic
guucuaagacacauacaggu

SEQ ID NO: 17317 - RNA, 20 nt, Artificial Sequence
  Synthetic
uucuaagacacauacaggua

SEQ ID NO: 17318 - RNA, 20 nt, Artificial Sequence
  Synthetic
ucuaagacacauacagguac

SEQ ID NO: 17319 - RNA, 20 nt, Artificial Sequence
  Synthetic
cuaagacacauacagguaca

SEQ ID NO: 17320 - RNA, 20 nt, Artificial Sequence
  Synthetic
uaagacacauacagguacac

SEQ ID NO: 17321 - RNA, 20 nt, Artificial Sequence
  Synthetic
aagacacauacagguacaca

SEQ ID NO: 17322 - RNA, 20 nt, Artificial Sequence
  Synthetic
agacacauacagguacacac

SEQ ID NO: 17323 - RNA, 20 nt, Artificial Sequence
  Synthetic
gacacauacagguacacacc

SEQ ID NO: 17324 - RNA, 20 nt, Artificial Sequence
  Synthetic
acacauacagguacacaccc

SEQ ID NO: 17325 - RNA, 20 nt, Artificial Sequence
  Synthetic
cacauacagguacacaccca

SEQ ID NO: 17326 - RNA, 20 nt, Artificial Sequence
  Synthetic
acauacagguacacacccac

SEQ ID NO: 17327 - RNA, 20 nt, Artificial Sequence
  Synthetic
cauacagguacacacccaca

SEQ ID NO: 17328 - RNA, 20 nt, Artificial Sequence
  Synthetic
auacagguacacacccacac

SEQ ID NO: 17329 - RNA, 20 nt, Artificial Sequence
  Synthetic
uacagguacacacccacaca

SEQ ID NO: 17330 - RNA, 20 nt, Artificial Sequence
  Synthetic
acagguacacacccacacau

SEQ ID NO: 17331 - RNA, 20 nt, Artificial Sequence
  Synthetic
cagguacacacccacacaua

SEQ ID NO: 17332 - RNA, 20 nt, Artificial Sequence
  Synthetic
agguacacacccacacauac

SEQ ID NO: 17333 - RNA, 20 nt, Artificial Sequence
  Synthetic
gguacacacccacacauaca

SEQ ID NO: 17334 - RNA, 20 nt, Artificial Sequence
  Synthetic
guacacacccacacauacaa

SEQ ID NO: 17335 - RNA, 20 nt, Artificial Sequence
  Synthetic
uacacacccacacauacaag

SEQ ID NO: 17336 - RNA, 20 nt, Artificial Sequence
  Synthetic
acacacccacacauacaagc

SEQ ID NO: 17337 - RNA, 20 nt, Artificial Sequence
  Synthetic
cacacccacacauacaagca

SEQ ID NO: 17338 - RNA, 20 nt, Artificial Sequence
  Synthetic
acacccacacauacaagcac

SEQ ID NO: 17339 - RNA, 20 nt, Artificial Sequence
  Synthetic
cacccacacauacaagcacc

SEQ ID NO: 17340 - RNA, 20 nt, Artificial Sequence
  Synthetic
acccacacauacaagcaccc

SEQ ID NO: 17341 - RNA, 20 nt, Artificial Sequence
  Synthetic
cccacacauacaagcaccca

SEQ ID NO: 17342 - RNA, 20 nt, Artificial Sequence
  Synthetic
ccacacauacaagcacccac

SEQ ID NO: 17343 - RNA, 20 nt, Artificial Sequence
  Synthetic
cacacauacaagcacccacc

SEQ ID NO: 17344 - RNA, 20 nt, Artificial Sequence
  Synthetic
acacauacaagcacccaccc

SEQ ID NO: 17345 - RNA, 20 nt, Artificial Sequence
  Synthetic
cacauacaagcacccacccu

SEQ ID NO: 17346 - RNA, 20 nt, Artificial Sequence
  Synthetic
acauacaagcacccacccuc

SEQ ID NO: 17347 - RNA, 20 nt, Artificial Sequence
  Synthetic
cauacaagcacccacccuca

SEQ ID NO: 17348 - RNA, 20 nt, Artificial Sequence
  Synthetic
auacaagcacccacccucac

SEQ ID NO: 17349 - RNA, 20 nt, Artificial Sequence
  Synthetic
uacaagcacccacccucacu

SEQ ID NO: 17350 - RNA, 20 nt, Artificial Sequence
  Synthetic
acaagcacccacccucacuu

SEQ ID NO: 17351 - RNA, 20 nt, Artificial Sequence
  Synthetic
caagcacccacccucacuuu

SEQ ID NO: 17352 - RNA, 20 nt, Artificial Sequence
  Synthetic
aagcacccacccucacuuua

SEQ ID NO: 17353 - RNA, 20 nt, Artificial Sequence
  Synthetic
agcacccacccucacuuuau

SEQ ID NO: 17354 - RNA, 20 nt, Artificial Sequence
  Synthetic
gcacccacccucacuuuaug

SEQ ID NO: 17355 - RNA, 20 nt, Artificial Sequence
  Synthetic
cacccacccucacuuuaugg

SEQ ID NO: 17356 - RNA, 20 nt, Artificial Sequence
  Synthetic
acccacccucacuuuaugga

SEQ ID NO: 17357 - RNA, 20 nt, Artificial Sequence
  Synthetic
cccacccucacuuuauggaa

SEQ ID NO: 17358 - RNA, 20 nt, Artificial Sequence
  Synthetic
ccacccucacuuuauggaaa

SEQ ID NO: 17359 - RNA, 20 nt, Artificial Sequence
  Synthetic
cacccucacuuuauggaaag

SEQ ID NO: 17360 - RNA, 20 nt, Artificial Sequence
  Synthetic
acccucacuuuauggaaagc

SEQ ID NO: 17361 - RNA, 20 nt, Artificial Sequence
  Synthetic
cccucacuuuauggaaagca

SEQ ID NO: 17362 - RNA, 20 nt, Artificial Sequence
  Synthetic
ccucacuuuauggaaagcau

SEQ ID NO: 17363 - RNA, 20 nt, Artificial Sequence
  Synthetic
cucacuuuauggaaagcauc

SEQ ID NO: 17364 - RNA, 20 nt, Artificial Sequence
  Synthetic
ucacuuuauggaaagcaucc

SEQ ID NO: 17365 - RNA, 20 nt, Artificial Sequence
  Synthetic
cacuuuauggaaagcaucca

SEQ ID NO: 17366 - RNA, 20 nt, Artificial Sequence
  Synthetic
acuuuauggaaagcauccag

SEQ ID NO: 17367 - RNA, 20 nt, Artificial Sequence
  Synthetic
cuuuauggaaagcauccagu

SEQ ID NO: 17368 - RNA, 20 nt, Artificial Sequence
  Synthetic
uuuauggaaagcauccagug

SEQ ID NO: 17369 - RNA, 20 nt, Artificial Sequence
  Synthetic
uuauggaaagcauccagugg

SEQ ID NO: 17370 - RNA, 20 nt, Artificial Sequence
  Synthetic
uauggaaagcauccaguggg

SEQ ID NO: 17371 - RNA, 20 nt, Artificial Sequence
  Synthetic
auggaaagcauccagugggg

SEQ ID NO: 17372 - RNA, 20 nt, Artificial Sequence
  Synthetic
uggaaagcauccagugggga

SEQ ID NO: 17373 - RNA, 20 nt, Artificial Sequence
  Synthetic
ggaaagcauccaguggggag

SEQ ID NO: 17374 - RNA, 20 nt, Artificial Sequence
  Synthetic
gaaagcauccaguggggaga

SEQ ID NO: 17375 - RNA, 20 nt, Artificial Sequence
  Synthetic
aaagcauccaguggggagac

SEQ ID NO: 17376 - RNA, 20 nt, Artificial Sequence
  Synthetic
aagcauccaguggggagacu

SEQ ID NO: 17377 - RNA, 20 nt, Artificial Sequence
  Synthetic
agcauccaguggggagacuc

SEQ ID NO: 17378 - RNA, 20 nt, Artificial Sequence
  Synthetic
gcauccaguggggagacuca

SEQ ID NO: 17379 - RNA, 20 nt, Artificial Sequence
  Synthetic
cauccaguggggagacucau

SEQ ID NO: 17380 - RNA, 20 nt, Artificial Sequence
  Synthetic
auccaguggggagacucaug

SEQ ID NO: 17381 - RNA, 20 nt, Artificial Sequence
  Synthetic
uccaguggggagacucauga

SEQ ID NO: 17382 - RNA, 20 nt, Artificial Sequence
  Synthetic
ccaguggggagacucaugaa

SEQ ID NO: 17383 - RNA, 20 nt, Artificial Sequence
  Synthetic
caguggggagacucaugaac

SEQ ID NO: 17384 - RNA, 20 nt, Artificial Sequence
  Synthetic
aguggggagacucaugaaca

SEQ ID NO: 17385 - RNA, 20 nt, Artificial Sequence
  Synthetic
guggggagacucaugaacau

SEQ ID NO: 17386 - RNA, 20 nt, Artificial Sequence
  Synthetic
uggggagacucaugaacauc

SEQ ID NO: 17387 - RNA, 20 nt, Artificial Sequence
  Synthetic
ggggagacucaugaacauca

SEQ ID NO: 17388 - RNA, 20 nt, Artificial Sequence
  Synthetic
gggagacucaugaacaucag

SEQ ID NO: 17389 - RNA, 20 nt, Artificial Sequence
  Synthetic
ggagacucaugaacaucagu

SEQ ID NO: 17390 - RNA, 20 nt, Artificial Sequence
  Synthetic
gagacucaugaacaucaguc

SEQ ID NO: 17391 - RNA, 20 nt, Artificial Sequence
  Synthetic
agacucaugaacaucaguca

SEQ ID NO: 17392 - RNA, 20 nt, Artificial Sequence
  Synthetic
gacucaugaacaucagucau

SEQ ID NO: 17393 - RNA, 20 nt, Artificial Sequence
  Synthetic
acucaugaacaucagucauu

SEQ ID NO: 17394 - RNA, 20 nt, Artificial Sequence
  Synthetic
cucaugaacaucagucauuc

SEQ ID NO: 17395 - RNA, 20 nt, Artificial Sequence
  Synthetic
ucaugaacaucagucauucu

SEQ ID NO: 17396 - RNA, 20 nt, Artificial Sequence
  Synthetic
caugaacaucagucauucug

SEQ ID NO: 17397 - RNA, 20 nt, Artificial Sequence
  Synthetic
augaacaucagucauucuga

SEQ ID NO: 17398 - RNA, 20 nt, Artificial Sequence
  Synthetic
ugaacaucagucauucugag

SEQ ID NO: 17399 - RNA, 20 nt, Artificial Sequence
  Synthetic
gaacaucagucauucugagg

SEQ ID NO: 17400 - RNA, 20 nt, Artificial Sequence
  Synthetic
aacaucagucauucugaggc

SEQ ID NO: 17401 - RNA, 20 nt, Artificial Sequence
  Synthetic
acaucagucauucugaggcc

SEQ ID NO: 17402 - RNA, 20 nt, Artificial Sequence
  Synthetic
caucagucauucugaggcca

SEQ ID NO: 17403 - RNA, 20 nt, Artificial Sequence
  Synthetic
aucagucauucugaggccac

SEQ ID NO: 17404 - RNA, 20 nt, Artificial Sequence
  Synthetic
ucagucauucugaggccaca

SEQ ID NO: 17405 - RNA, 20 nt, Artificial Sequence
  Synthetic
cagucauucugaggccacau

SEQ ID NO: 17406 - RNA, 20 nt, Artificial Sequence
  Synthetic
agucauucugaggccacauc

SEQ ID NO: 17407 - RNA, 20 nt, Artificial Sequence
  Synthetic
gucauucugaggccacaucc

SEQ ID NO: 17408 - RNA, 20 nt, Artificial Sequence
  Synthetic
ucauucugaggccacauccu

SEQ ID NO: 17409 - RNA, 20 nt, Artificial Sequence
  Synthetic
cauucugaggccacauccuu

SEQ ID NO: 17410 - RNA, 20 nt, Artificial Sequence
  Synthetic
auucugaggccacauccuuc

SEQ ID NO: 17411 - RNA, 20 nt, Artificial Sequence
  Synthetic
uucugaggccacauccuucu

SEQ ID NO: 17412 - RNA, 20 nt, Artificial Sequence
  Synthetic
ucugaggccacauccuucua

SEQ ID NO: 17413 - RNA, 20 nt, Artificial Sequence
  Synthetic
cugaggccacauccuucuac

SEQ ID NO: 17414 - RNA, 20 nt, Artificial Sequence
  Synthetic
ugaggccacauccuucuacu

SEQ ID NO: 17415 - RNA, 20 nt, Artificial Sequence
  Synthetic
gaggccacauccuucuacua

SEQ ID NO: 17416 - RNA, 20 nt, Artificial Sequence
  Synthetic
aggccacauccuucuacuaa

SEQ ID NO: 17417 - RNA, 20 nt, Artificial Sequence
  Synthetic
ggccacauccuucuacuaaa

SEQ ID NO: 17418 - RNA, 20 nt, Artificial Sequence
  Synthetic
gccacauccuucuacuaaac

SEQ ID NO: 17419 - RNA, 20 nt, Artificial Sequence
  Synthetic
ccacauccuucuacuaaacu

SEQ ID NO: 17420 - RNA, 20 nt, Artificial Sequence
  Synthetic
cacauccuucuacuaaacua

SEQ ID NO: 17421 - RNA, 20 nt, Artificial Sequence
  Synthetic
acauccuucuacuaaacuaa

SEQ ID NO: 17422 - RNA, 20 nt, Artificial Sequence
  Synthetic
cauccuucuacuaaacuaau

SEQ ID NO: 17423 - RNA, 20 nt, Artificial Sequence
  Synthetic
auccuucuacuaaacuaauc

SEQ ID NO: 17424 - RNA, 20 nt, Artificial Sequence
  Synthetic
uccuucuacuaaacuaauca

SEQ ID NO: 17425 - RNA, 20 nt, Artificial Sequence
  Synthetic
ccuucuacuaaacuaaucau

SEQ ID NO: 17426 - RNA, 20 nt, Artificial Sequence
  Synthetic
cuucuacuaaacuaaucauu

SEQ ID NO: 17427 - RNA, 20 nt, Artificial Sequence
  Synthetic
uucuacuaaacuaaucauuc

SEQ ID NO: 17428 - RNA, 20 nt, Artificial Sequence
  Synthetic
ucuacuaaacuaaucauucc

SEQ ID NO: 17429 - RNA, 20 nt, Artificial Sequence
  Synthetic
cuacuaaacuaaucauuccg

SEQ ID NO: 17430 - RNA, 20 nt, Artificial Sequence
  Synthetic
uacuaaacuaaucauuccgc

SEQ ID NO: 17431 - RNA, 20 nt, Artificial Sequence
  Synthetic
acuaaacuaaucauuccgca

SEQ ID NO: 17432 - RNA, 20 nt, Artificial Sequence
  Synthetic
cuaaacuaaucauuccgcag

SEQ ID NO: 17433 - RNA, 20 nt, Artificial Sequence
  Synthetic
uaaacuaaucauuccgcaga

SEQ ID NO: 17434 - RNA, 20 nt, Artificial Sequence
  Synthetic
aaacuaaucauuccgcagac

SEQ ID NO: 17435 - RNA, 20 nt, Artificial Sequence
  Synthetic
aacuaaucauuccgcagacu

SEQ ID NO: 17436 - RNA, 20 nt, Artificial Sequence
  Synthetic
acuaaucauuccgcagacuu

SEQ ID NO: 17437 - RNA, 20 nt, Artificial Sequence
  Synthetic
cuaaucauuccgcagacuug

SEQ ID NO: 17438 - RNA, 20 nt, Artificial Sequence
  Synthetic
uaaucauuccgcagacuugg

SEQ ID NO: 17439 - RNA, 20 nt, Artificial Sequence
  Synthetic
aaucauuccgcagacuugga

SEQ ID NO: 17440 - RNA, 20 nt, Artificial Sequence
  Synthetic
aucauuccgcagacuuggau

SEQ ID NO: 17441 - RNA, 20 nt, Artificial Sequence
  Synthetic
ucauuccgcagacuuggaug

SEQ ID NO: 17442 - RNA, 20 nt, Artificial Sequence
  Synthetic
cauuccgcagacuuggaugc

SEQ ID NO: 17443 - RNA, 20 nt, Artificial Sequence
  Synthetic
auuccgcagacuuggaugca

SEQ ID NO: 17444 - RNA, 20 nt, Artificial Sequence
  Synthetic
uuccgcagacuuggaugcac

SEQ ID NO: 17445 - RNA, 20 nt, Artificial Sequence
  Synthetic
uccgcagacuuggaugcacc

SEQ ID NO: 17446 - RNA, 20 nt, Artificial Sequence
  Synthetic
ccgcagacuuggaugcaccc

SEQ ID NO: 17447 - RNA, 20 nt, Artificial Sequence
  Synthetic
cgcagacuuggaugcacccc

SEQ ID NO: 17448 - RNA, 20 nt, Artificial Sequence
  Synthetic
gcagacuuggaugcaccccg

SEQ ID NO: 17449 - RNA, 20 nt, Artificial Sequence
  Synthetic
cagacuuggaugcaccccgc

SEQ ID NO: 17450 - RNA, 20 nt, Artificial Sequence
  Synthetic
agacuuggaugcaccccgcu

SEQ ID NO: 17451 - RNA, 20 nt, Artificial Sequence
  Synthetic
gacuuggaugcaccccgcuu

SEQ ID NO: 17452 - RNA, 20 nt, Artificial Sequence
  Synthetic
acuuggaugcaccccgcuuc

SEQ ID NO: 17453 - RNA, 20 nt, Artificial Sequence
  Synthetic
cuuggaugcaccccgcuucc

SEQ ID NO: 17454 - RNA, 20 nt, Artificial Sequence
  Synthetic
uuggaugcaccccgcuucca

SEQ ID NO: 17455 - RNA, 20 nt, Artificial Sequence
  Synthetic
uggaugcaccccgcuuccac

SEQ ID NO: 17456 - RNA, 20 nt, Artificial Sequence
  Synthetic
ggaugcaccccgcuuccaca

SEQ ID NO: 17457 - RNA, 20 nt, Artificial Sequence
  Synthetic
gaugcaccccgcuuccacau

SEQ ID NO: 17458 - RNA, 20 nt, Artificial Sequence
  Synthetic
augcaccccgcuuccacaug

SEQ ID NO: 17459 - RNA, 20 nt, Artificial Sequence
  Synthetic
ugcaccccgcuuccacaugg

SEQ ID NO: 17460 - RNA, 20 nt, Artificial Sequence
  Synthetic
gcaccccgcuuccacaugga

SEQ ID NO: 17461 - RNA, 20 nt, Artificial Sequence
  Synthetic
caccccgcuuccacauggac

SEQ ID NO: 17462 - RNA, 20 nt, Artificial Sequence
  Synthetic
accccgcuuccacauggacu

SEQ ID NO: 17463 - RNA, 20 nt, Artificial Sequence
  Synthetic
ccccgcuuccacauggacuu

SEQ ID NO: 17464 - RNA, 20 nt, Artificial Sequence
  Synthetic
cccgcuuccacauggacuuu

SEQ ID NO: 17465 - RNA, 20 nt, Artificial Sequence
  Synthetic
ccgcuuccacauggacuuua

SEQ ID NO: 17466 - RNA, 20 nt, Artificial Sequence
  Synthetic
cgcuuccacauggacuuuac

SEQ ID NO: 17467 - RNA, 20 nt, Artificial Sequence
  Synthetic
gcuuccacauggacuuuacc

SEQ ID NO: 17468 - RNA, 20 nt, Artificial Sequence
  Synthetic
cuuccacauggacuuuacca

SEQ ID NO: 17469 - RNA, 20 nt, Artificial Sequence
  Synthetic
uuccacauggacuuuaccau

SEQ ID NO: 17470 - RNA, 20 nt, Artificial Sequence
  Synthetic
uccacauggacuuuaccauc

SEQ ID NO: 17471 - RNA, 20 nt, Artificial Sequence
  Synthetic
ccacauggacuuuaccaucc

SEQ ID NO: 17472 - RNA, 20 nt, Artificial Sequence
  Synthetic
cacauggacuuuaccaucca

SEQ ID NO: 17473 - RNA, 20 nt, Artificial Sequence
  Synthetic
acauggacuuuaccauccac

SEQ ID NO: 17474 - RNA, 20 nt, Artificial Sequence
  Synthetic
cauggacuuuaccauccaca

SEQ ID NO: 17475 - RNA, 20 nt, Artificial Sequence
  Synthetic
auggacuuuaccauccacaa

SEQ ID NO: 17476 - RNA, 20 nt, Artificial Sequence
  Synthetic
uggacuuuaccauccacaac

SEQ ID NO: 17477 - RNA, 20 nt, Artificial Sequence
  Synthetic
ggacuuuaccauccacaacu

SEQ ID NO: 17478 - RNA, 20 nt, Artificial Sequence
  Synthetic
gacuuuaccauccacaacuu

SEQ ID NO: 17479 - RNA, 20 nt, Artificial Sequence
  Synthetic
acuuuaccauccacaacuua

SEQ ID NO: 17480 - RNA, 20 nt, Artificial Sequence
  Synthetic
cuuuaccauccacaacuuac

SEQ ID NO: 17481 - RNA, 20 nt, Artificial Sequence
  Synthetic
uuuaccauccacaacuuacc

SEQ ID NO: 17482 - RNA, 20 nt, Artificial Sequence
  Synthetic
uuaccauccacaacuuacca

SEQ ID NO: 17483 - RNA, 20 nt, Artificial Sequence
  Synthetic
uaccauccacaacuuaccag

SEQ ID NO: 17484 - RNA, 20 nt, Artificial Sequence
  Synthetic
accauccacaacuuaccagc

SEQ ID NO: 17485 - RNA, 20 nt, Artificial Sequence
  Synthetic
ccauccacaacuuaccagca

SEQ ID NO: 17486 - RNA, 20 nt, Artificial Sequence
  Synthetic
cauccacaacuuaccagcaa

SEQ ID NO: 17487 - RNA, 20 nt, Artificial Sequence
  Synthetic
auccacaacuuaccagcaag

SEQ ID NO: 17488 - RNA, 20 nt, Artificial Sequence
  Synthetic
uccacaacuuaccagcaaga

SEQ ID NO: 17489 - RNA, 20 nt, Artificial Sequence
  Synthetic
ccacaacuuaccagcaagaa

SEQ ID NO: 17490 - RNA, 20 nt, Artificial Sequence
  Synthetic
cacaacuuaccagcaagaau

SEQ ID NO: 17491 - RNA, 20 nt, Artificial Sequence
  Synthetic
acaacuuaccagcaagaauu

SEQ ID NO: 17492 - RNA, 20 nt, Artificial Sequence
  Synthetic
caacuuaccagcaagaauuu

SEQ ID NO: 17493 - RNA, 20 nt, Artificial Sequence
  Synthetic
aacuuaccagcaagaauuug

SEQ ID NO: 17494 - RNA, 20 nt, Artificial Sequence
  Synthetic
acuuaccagcaagaauuugg

SEQ ID NO: 17495 - RNA, 20 nt, Artificial Sequence
  Synthetic
cuuaccagcaagaauuugga

SEQ ID NO: 17496 - RNA, 20 nt, Artificial Sequence
  Synthetic
uuaccagcaagaauuuggaa

SEQ ID NO: 17497 - RNA, 20 nt, Artificial Sequence
  Synthetic
uaccagcaagaauuuggaag

SEQ ID NO: 17498 - RNA, 20 nt, Artificial Sequence
  Synthetic
accagcaagaauuuggaaga

SEQ ID NO: 17499 - RNA, 20 nt, Artificial Sequence
  Synthetic
ccagcaagaauuuggaagau

SEQ ID NO: 17500 - RNA, 20 nt, Artificial Sequence
  Synthetic
cagcaagaauuuggaagauu

SEQ ID NO: 17501 - RNA, 20 nt, Artificial Sequence
  Synthetic
agcaagaauuuggaagauuc

SEQ ID NO: 17502 - RNA, 20 nt, Artificial Sequence
  Synthetic
gcaagaauuuggaagauucc

SEQ ID NO: 17503 - RNA, 20 nt, Artificial Sequence
  Synthetic
caagaauuuggaagauucca

SEQ ID NO: 17504 - RNA, 20 nt, Artificial Sequence
  Synthetic
aagaauuuggaagauuccag

SEQ ID NO: 17505 - RNA, 20 nt, Artificial Sequence
  Synthetic
agaauuuggaagauuccagu

SEQ ID NO: 17506 - RNA, 20 nt, Artificial Sequence
  Synthetic
gaauuuggaagauuccagug

SEQ ID NO: 17507 - RNA, 20 nt, Artificial Sequence
  Synthetic
aauuuggaagauuccaguga

SEQ ID NO: 17508 - RNA, 20 nt, Artificial Sequence
  Synthetic
auuuggaagauuccagugau

SEQ ID NO: 17509 - RNA, 20 nt, Artificial Sequence
  Synthetic
uuuggaagauuccagugaug

SEQ ID NO: 17510 - RNA, 20 nt, Artificial Sequence
  Synthetic
uuggaagauuccagugaugu

SEQ ID NO: 17511 - RNA, 20 nt, Artificial Sequence
  Synthetic
uggaagauuccagugaugua

SEQ ID NO: 17512 - RNA, 20 nt, Artificial Sequence
  Synthetic
ggaagauuccagugauguaa

SEQ ID NO: 17513 - RNA, 20 nt, Artificial Sequence
  Synthetic
gaagauuccagugauguaaa

SEQ ID NO: 17514 - RNA, 20 nt, Artificial Sequence
  Synthetic
aagauuccagugauguaaaa

SEQ ID NO: 17515 - RNA, 20 nt, Artificial Sequence
  Synthetic
agauuccagugauguaaaac

SEQ ID NO: 17516 - RNA, 20 nt, Artificial Sequence
  Synthetic
gauuccagugauguaaaacc

SEQ ID NO: 17517 - RNA, 20 nt, Artificial Sequence
  Synthetic
auuccagugauguaaaaccu

SEQ ID NO: 17518 - RNA, 20 nt, Artificial Sequence
  Synthetic
uuccagugauguaaaaccug

SEQ ID NO: 17519 - RNA, 20 nt, Artificial Sequence
  Synthetic
uccagugauguaaaaccugc

SEQ ID NO: 17520 - RNA, 20 nt, Artificial Sequence
  Synthetic
ccagugauguaaaaccugcc

SEQ ID NO: 17521 - RNA, 20 nt, Artificial Sequence
  Synthetic
cagugauguaaaaccugccc

SEQ ID NO: 17522 - RNA, 20 nt, Artificial Sequence
  Synthetic
agugauguaaaaccugcccc

SEQ ID NO: 17523 - RNA, 20 nt, Artificial Sequence
  Synthetic
gugauguaaaaccugccccc

SEQ ID NO: 17524 - RNA, 20 nt, Artificial Sequence
  Synthetic
ugauguaaaaccugcccccc

SEQ ID NO: 17525 - RNA, 20 nt, Artificial Sequence
  Synthetic
gauguaaaaccugccccccu

SEQ ID NO: 17526 - RNA, 20 nt, Artificial Sequence
  Synthetic
auguaaaaccugccccccuu

SEQ ID NO: 17527 - RNA, 20 nt, Artificial Sequence
  Synthetic
uguaaaaccugccccccuug

SEQ ID NO: 17528 - RNA, 20 nt, Artificial Sequence
  Synthetic
guaaaaccugccccccuugg

SEQ ID NO: 17529 - RNA, 20 nt, Artificial Sequence
  Synthetic
uaaaaccugccccccuuggu

SEQ ID NO: 17530 - RNA, 20 nt, Artificial Sequence
  Synthetic
aaaaccugccccccuuggug

SEQ ID NO: 17531 - RNA, 20 nt, Artificial Sequence
  Synthetic
aaaccugccccccuugguga

SEQ ID NO: 17532 - RNA, 20 nt, Artificial Sequence
  Synthetic
aaccugccccccuuggugag

SEQ ID NO: 17533 - RNA, 20 nt, Artificial Sequence
  Synthetic
accugccccccuuggugagg

SEQ ID NO: 17534 - RNA, 20 nt, Artificial Sequence
  Synthetic
ccugccccccuuggugaggg

SEQ ID NO: 17535 - RNA, 20 nt, Artificial Sequence
  Synthetic
cugccccccuuggugagggu

SEQ ID NO: 17536 - RNA, 20 nt, Artificial Sequence
  Synthetic
ugccccccuuggugagggug

SEQ ID NO: 17537 - RNA, 20 nt, Artificial Sequence
  Synthetic
gccccccuuggugaggguga

SEQ ID NO: 17538 - RNA, 20 nt, Artificial Sequence
  Synthetic
ccccccuuggugagggugaa

SEQ ID NO: 17539 - RNA, 20 nt, Artificial Sequence
  Synthetic
cccccuuggugagggugaag

SEQ ID NO: 17540 - RNA, 20 nt, Artificial Sequence
  Synthetic
ccccuuggugagggugaaga

SEQ ID NO: 17541 - RNA, 20 nt, Artificial Sequence
  Synthetic
cccuuggugagggugaagag

SEQ ID NO: 17542 - RNA, 20 nt, Artificial Sequence
  Synthetic
ccuuggugagggugaagagu

SEQ ID NO: 17543 - RNA, 20 nt, Artificial Sequence
  Synthetic
cuuggugagggugaagaguu

SEQ ID NO: 17544 - RNA, 20 nt, Artificial Sequence
  Synthetic
uuggugagggugaagaguug

SEQ ID NO: 17545 - RNA, 20 nt, Artificial Sequence
  Synthetic
uggugagggugaagaguugg

SEQ ID NO: 17546 - RNA, 20 nt, Artificial Sequence
  Synthetic
ggugagggugaagaguuggc

SEQ ID NO: 17547 - RNA, 20 nt, Artificial Sequence
  Synthetic
gugagggugaagaguuggca

SEQ ID NO: 17548 - RNA, 20 nt, Artificial Sequence
  Synthetic
ugagggugaagaguuggcag

SEQ ID NO: 17549 - RNA, 20 nt, Artificial Sequence
  Synthetic
gagggugaagaguuggcaga

SEQ ID NO: 17550 - RNA, 20 nt, Artificial Sequence
  Synthetic
agggugaagaguuggcagaa

SEQ ID NO: 17551 - RNA, 20 nt, Artificial Sequence
  Synthetic
gggugaagaguuggcagaag

SEQ ID NO: 17552 - RNA, 20 nt, Artificial Sequence
  Synthetic
ggugaagaguuggcagaaga

SEQ ID NO: 17553 - RNA, 20 nt, Artificial Sequence
  Synthetic
gugaagaguuggcagaagaa

SEQ ID NO: 17554 - RNA, 20 nt, Artificial Sequence
  Synthetic
ugaagaguuggcagaagaac

SEQ ID NO: 17555 - RNA, 20 nt, Artificial Sequence
  Synthetic
gaagaguuggcagaagaaca

SEQ ID NO: 17556 - RNA, 20 nt, Artificial Sequence
  Synthetic
aagaguuggcagaagaacag

SEQ ID NO: 17557 - RNA, 20 nt, Artificial Sequence
  Synthetic
agaguuggcagaagaacagg

SEQ ID NO: 17558 - RNA, 20 nt, Artificial Sequence
  Synthetic
gaguuggcagaagaacagga

SEQ ID NO: 17559 - RNA, 20 nt, Artificial Sequence
  Synthetic
aguuggcagaagaacaggaa

SEQ ID NO: 17560 - RNA, 20 nt, Artificial Sequence
  Synthetic
guuggcagaagaacaggaac

SEQ ID NO: 17561 - RNA, 20 nt, Artificial Sequence
  Synthetic
uuggcagaagaacaggaaca

SEQ ID NO: 17562 - RNA, 20 nt, Artificial Sequence
  Synthetic
uggcagaagaacaggaacag

SEQ ID NO: 17563 - RNA, 20 nt, Artificial Sequence
  Synthetic
ggcagaagaacaggaacaga

SEQ ID NO: 17564 - RNA, 20 nt, Artificial Sequence
  Synthetic
gcagaagaacaggaacagag

SEQ ID NO: 17565 - RNA, 20 nt, Artificial Sequence
  Synthetic
cagaagaacaggaacagaga

SEQ ID NO: 17566 - RNA, 20 nt, Artificial Sequence
  Synthetic
agaagaacaggaacagagac

SEQ ID NO: 17567 - RNA, 20 nt, Artificial Sequence
  Synthetic
gaagaacaggaacagagaca

SEQ ID NO: 17568 - RNA, 20 nt, Artificial Sequence
  Synthetic
aagaacaggaacagagacag

SEQ ID NO: 17569 - RNA, 20 nt, Artificial Sequence
  Synthetic
agaacaggaacagagacaga

SEQ ID NO: 17570 - RNA, 20 nt, Artificial Sequence
  Synthetic
gaacaggaacagagacagaa

SEQ ID NO: 17571 - RNA, 20 nt, Artificial Sequence
  Synthetic
aacaggaacagagacagaau

SEQ ID NO: 17572 - RNA, 20 nt, Artificial Sequence
  Synthetic
acaggaacagagacagaaug

SEQ ID NO: 17573 - RNA, 20 nt, Artificial Sequence
  Synthetic
caggaacagagacagaaugc

SEQ ID NO: 17574 - RNA, 20 nt, Artificial Sequence
  Synthetic
aggaacagagacagaaugcu

SEQ ID NO: 17575 - RNA, 20 nt, Artificial Sequence
  Synthetic
ggaacagagacagaaugcug

SEQ ID NO: 17576 - RNA, 20 nt, Artificial Sequence
  Synthetic
gaacagagacagaaugcuga

SEQ ID NO: 17577 - RNA, 20 nt, Artificial Sequence
  Synthetic
aacagagacagaaugcugaa

SEQ ID NO: 17578 - RNA, 20 nt, Artificial Sequence
  Synthetic
acagagacagaaugcugaag

SEQ ID NO: 17579 - RNA, 20 nt, Artificial Sequence
  Synthetic
cagagacagaaugcugaaga

SEQ ID NO: 17580 - RNA, 20 nt, Artificial Sequence
  Synthetic
agagacagaaugcugaagau

SEQ ID NO: 17581 - RNA, 20 nt, Artificial Sequence
  Synthetic
gagacagaaugcugaagaug

SEQ ID NO: 17582 - RNA, 20 nt, Artificial Sequence
  Synthetic
agacagaaugcugaagauga

SEQ ID NO: 17583 - RNA, 20 nt, Artificial Sequence
  Synthetic
gacagaaugcugaagaugau

SEQ ID NO: 17584 - RNA, 20 nt, Artificial Sequence
  Synthetic
acagaaugcugaagaugauc

SEQ ID NO: 17585 - RNA, 20 nt, Artificial Sequence
  Synthetic
cagaaugcugaagaugaucg

SEQ ID NO: 17586 - RNA, 20 nt, Artificial Sequence
  Synthetic
agaaugcugaagaugaucga

SEQ ID NO: 17587 - RNA, 20 nt, Artificial Sequence
  Synthetic
gaaugcugaagaugaucgac

SEQ ID NO: 17588 - RNA, 20 nt, Artificial Sequence
  Synthetic
aaugcugaagaugaucgaca

SEQ ID NO: 17589 - RNA, 20 nt, Artificial Sequence
  Synthetic
augcugaagaugaucgacag

SEQ ID NO: 17590 - RNA, 20 nt, Artificial Sequence
  Synthetic
ugcugaagaugaucgacagg

SEQ ID NO: 17591 - RNA, 20 nt, Artificial Sequence
  Synthetic
gcugaagaugaucgacagga

SEQ ID NO: 17592 - RNA, 20 nt, Artificial Sequence
  Synthetic
cugaagaugaucgacaggau

SEQ ID NO: 17593 - RNA, 20 nt, Artificial Sequence
  Synthetic
ugaagaugaucgacaggauc

SEQ ID NO: 17594 - RNA, 20 nt, Artificial Sequence
  Synthetic
gaagaugaucgacaggauca

SEQ ID NO: 17595 - RNA, 20 nt, Artificial Sequence
  Synthetic
aagaugaucgacaggaucau

SEQ ID NO: 17596 - RNA, 20 nt, Artificial Sequence
  Synthetic
agaugaucgacaggaucaug

SEQ ID NO: 17597 - RNA, 20 nt, Artificial Sequence
  Synthetic
gaugaucgacaggaucaugg

SEQ ID NO: 17598 - RNA, 20 nt, Artificial Sequence
  Synthetic
augaucgacaggaucauggu

SEQ ID NO: 17599 - RNA, 20 nt, Artificial Sequence
  Synthetic
ugaucgacaggaucauggug

SEQ ID NO: 17600 - RNA, 20 nt, Artificial Sequence
  Synthetic
gaucgacaggaucauggugg

SEQ ID NO: 17601 - RNA, 20 nt, Artificial Sequence
  Synthetic
aucgacaggaucaugguggc

SEQ ID NO: 17602 - RNA, 20 nt, Artificial Sequence
  Synthetic
ucgacaggaucaugguggcc

SEQ ID NO: 17603 - RNA, 20 nt, Artificial Sequence
  Synthetic
cgacaggaucaugguggccu

SEQ ID NO: 17604 - RNA, 20 nt, Artificial Sequence
  Synthetic
gacaggaucaugguggccug

SEQ ID NO: 17605 - RNA, 20 nt, Artificial Sequence
  Synthetic
acaggaucaugguggccugg

SEQ ID NO: 17606 - RNA, 20 nt, Artificial Sequence
  Synthetic
caggaucaugguggccugga

SEQ ID NO: 17607 - RNA, 20 nt, Artificial Sequence
  Synthetic
aggaucaugguggccuggac

SEQ ID NO: 17608 - RNA, 20 nt, Artificial Sequence
  Synthetic
ggaucaugguggccuggaca

SEQ ID NO: 17609 - RNA, 20 nt, Artificial Sequence
  Synthetic
gaucaugguggccuggacag

SEQ ID NO: 17610 - RNA, 20 nt, Artificial Sequence
  Synthetic
aucaugguggccuggacaga

SEQ ID NO: 17611 - RNA, 20 nt, Artificial Sequence
  Synthetic
ucaugguggccuggacagac

SEQ ID NO: 17612 - RNA, 20 nt, Artificial Sequence
  Synthetic
caugguggccuggacagacu

SEQ ID NO: 17613 - RNA, 20 nt, Artificial Sequence
  Synthetic
augguggccuggacagacug

SEQ ID NO: 17614 - RNA, 20 nt, Artificial Sequence
  Synthetic
ugguggccuggacagacugc

SEQ ID NO: 17615 - RNA, 20 nt, Artificial Sequence
  Synthetic
gguggccuggacagacugca

SEQ ID NO: 17616 - RNA, 20 nt, Artificial Sequence
  Synthetic
guggccuggacagacugcag

SEQ ID NO: 17617 - RNA, 20 nt, Artificial Sequence
  Synthetic
uggccuggacagacugcagc

SEQ ID NO: 17618 - RNA, 20 nt, Artificial Sequence
  Synthetic
ggccuggacagacugcagcc

SEQ ID NO: 17619 - RNA, 20 nt, Artificial Sequence
  Synthetic
gccuggacagacugcagcca

SEQ ID NO: 17620 - RNA, 20 nt, Artificial Sequence
  Synthetic
ccuggacagacugcagccau

SEQ ID NO: 17621 - RNA, 20 nt, Artificial Sequence
  Synthetic
cuggacagacugcagccauu

SEQ ID NO: 17622 - RNA, 20 nt, Artificial Sequence
  Synthetic
uggacagacugcagccauuc

SEQ ID NO: 17623 - RNA, 20 nt, Artificial Sequence
  Synthetic
ggacagacugcagccauucg

SEQ ID NO: 17624 - RNA, 20 nt, Artificial Sequence
  Synthetic
gacagacugcagccauucgu

SEQ ID NO: 17625 - RNA, 20 nt, Artificial Sequence
  Synthetic
acagacugcagccauucguu

SEQ ID NO: 17626 - RNA, 20 nt, Artificial Sequence
  Synthetic
cagacugcagccauucguuu

SEQ ID NO: 17627 - RNA, 20 nt, Artificial Sequence
  Synthetic
agacugcagccauucguuug

SEQ ID NO: 17628 - RNA, 20 nt, Artificial Sequence
  Synthetic
gacugcagccauucguuugg

SEQ ID NO: 17629 - RNA, 20 nt, Artificial Sequence
  Synthetic
acugcagccauucguuuggu

SEQ ID NO: 17630 - RNA, 20 nt, Artificial Sequence
  Synthetic
cugcagccauucguuuggug

SEQ ID NO: 17631 - RNA, 20 nt, Artificial Sequence
  Synthetic
ugcagccauucguuugguga

SEQ ID NO: 17632 - RNA, 20 nt, Artificial Sequence
  Synthetic
gcagccauucguuuggugau

SEQ ID NO: 17633 - RNA, 20 nt, Artificial Sequence
  Synthetic
cagccauucguuuggugaug

SEQ ID NO: 17634 - RNA, 20 nt, Artificial Sequence
  Synthetic
agccauucguuuggugauga

SEQ ID NO: 17635 - RNA, 20 nt, Artificial Sequence
  Synthetic
gccauucguuuggugaugau

SEQ ID NO: 17636 - RNA, 20 nt, Artificial Sequence
  Synthetic
ccauucguuuggugaugaug

SEQ ID NO: 17637 - RNA, 20 nt, Artificial Sequence
  Synthetic
cauucguuuggugaugauga

SEQ ID NO: 17638 - RNA, 20 nt, Artificial Sequence
  Synthetic
auucguuuggugaugaugag

SEQ ID NO: 17639 - RNA, 20 nt, Artificial Sequence
  Synthetic
uucguuuggugaugaugaga

SEQ ID NO: 17640 - RNA, 20 nt, Artificial Sequence
  Synthetic
ucguuuggugaugaugagaa

SEQ ID NO: 17641 - RNA, 20 nt, Artificial Sequence
  Synthetic
cguuuggugaugaugagaaa

SEQ ID NO: 17642 - RNA, 20 nt, Artificial Sequence
  Synthetic
guuuggugaugaugagaaac

SEQ ID NO: 17643 - RNA, 20 nt, Artificial Sequence
  Synthetic
uuuggugaugaugagaaaca

SEQ ID NO: 17644 - RNA, 20 nt, Artificial Sequence
  Synthetic
uuggugaugaugagaaacag

SEQ ID NO: 17645 - RNA, 20 nt, Artificial Sequence
  Synthetic
uggugaugaugagaaacagu

SEQ ID NO: 17646 - RNA, 20 nt, Artificial Sequence
  Synthetic
ggugaugaugagaaacagug

SEQ ID NO: 17647 - RNA, 20 nt, Artificial Sequence
  Synthetic
gugaugaugagaaacagugg

SEQ ID NO: 17648 - RNA, 20 nt, Artificial Sequence
  Synthetic
ugaugaugagaaacaguggu

SEQ ID NO: 17649 - RNA, 20 nt, Artificial Sequence
  Synthetic
gaugaugagaaacaguggug

SEQ ID NO: 17650 - RNA, 20 nt, Artificial Sequence
  Synthetic
augaugagaaacaguggugg

SEQ ID NO: 17651 - RNA, 20 nt, Artificial Sequence
  Synthetic
ugaugagaaacaguggugga

SEQ ID NO: 17652 - RNA, 20 nt, Artificial Sequence
  Synthetic
gaugagaaacagugguggac

SEQ ID NO: 17653 - RNA, 20 nt, Artificial Sequence
  Synthetic
augagaaacagugguggaca

SEQ ID NO: 17654 - RNA, 20 nt, Artificial Sequence
  Synthetic
ugagaaacagugguggacau

SEQ ID NO: 17655 - RNA, 20 nt, Artificial Sequence
  Synthetic
gagaaacagugguggacauu

SEQ ID NO: 17656 - RNA, 20 nt, Artificial Sequence
  Synthetic
agaaacagugguggacauuu

SEQ ID NO: 17657 - RNA, 20 nt, Artificial Sequence
  Synthetic
gaaacagugguggacauuuc

SEQ ID NO: 17658 - RNA, 20 nt, Artificial Sequence
  Synthetic
aaacagugguggacauuucc

SEQ ID NO: 17659 - RNA, 20 nt, Artificial Sequence
  Synthetic
aacagugguggacauuuccu

SEQ ID NO: 17660 - RNA, 20 nt, Artificial Sequence
  Synthetic
acagugguggacauuuccug

SEQ ID NO: 17661 - RNA, 20 nt, Artificial Sequence
  Synthetic
cagugguggacauuuccuga

SEQ ID NO: 17662 - RNA, 20 nt, Artificial Sequence
  Synthetic
agugguggacauuuccugag

SEQ ID NO: 17663 - RNA, 20 nt, Artificial Sequence
  Synthetic
gugguggacauuuccugagg

SEQ ID NO: 17664 - RNA, 20 nt, Artificial Sequence
  Synthetic
ugguggacauuuccugagga

SEQ ID NO: 17665 - RNA, 20 nt, Artificial Sequence
  Synthetic
gguggacauuuccugaggaa

SEQ ID NO: 17666 - RNA, 20 nt, Artificial Sequence
  Synthetic
guggacauuuccugaggaag

SEQ ID NO: 17667 - RNA, 20 nt, Artificial Sequence
  Synthetic
uggacauuuccugaggaaga

SEQ ID NO: 17668 - RNA, 20 nt, Artificial Sequence
  Synthetic
ggacauuuccugaggaagag

SEQ ID NO: 17669 - RNA, 20 nt, Artificial Sequence
  Synthetic
gacauuuccugaggaagagg

SEQ ID NO: 17670 - RNA, 20 nt, Artificial Sequence
  Synthetic
acauuuccugaggaagaggu

SEQ ID NO: 17671 - RNA, 20 nt, Artificial Sequence
  Synthetic
cauuuccugaggaagaggug

SEQ ID NO: 17672 - RNA, 20 nt, Artificial Sequence
  Synthetic
auuuccugaggaagaggugc

SEQ ID NO: 17673 - RNA, 20 nt, Artificial Sequence
  Synthetic
uuuccugaggaagaggugcu

SEQ ID NO: 17674 - RNA, 20 nt, Artificial Sequence
  Synthetic
uuccugaggaagaggugcua

SEQ ID NO: 17675 - RNA, 20 nt, Artificial Sequence
  Synthetic
uccugaggaagaggugcuac

SEQ ID NO: 17676 - RNA, 20 nt, Artificial Sequence
  Synthetic
ccugaggaagaggugcuaca

SEQ ID NO: 17677 - RNA, 20 nt, Artificial Sequence
  Synthetic
cugaggaagaggugcuacag

SEQ ID NO: 17678 - RNA, 20 nt, Artificial Sequence
  Synthetic
ugaggaagaggugcuacagu

SEQ ID NO: 17679 - RNA, 20 nt, Artificial Sequence
  Synthetic
gaggaagaggugcuacaguu

SEQ ID NO: 17680 - RNA, 20 nt, Artificial Sequence
  Synthetic
aggaagaggugcuacaguuc

SEQ ID NO: 17681 - RNA, 20 nt, Artificial Sequence
  Synthetic
ggaagaggugcuacaguucu

SEQ ID NO: 17682 - RNA, 20 nt, Artificial Sequence
  Synthetic
gaagaggugcuacaguucug

SEQ ID NO: 17683 - RNA, 20 nt, Artificial Sequence
  Synthetic
aagaggugcuacaguucugc

SEQ ID NO: 17684 - RNA, 20 nt, Artificial Sequence
  Synthetic
agaggugcuacaguucugcc

SEQ ID NO: 17685 - RNA, 20 nt, Artificial Sequence
  Synthetic
gaggugcuacaguucugcca

SEQ ID NO: 17686 - RNA, 20 nt, Artificial Sequence
  Synthetic
aggugcuacaguucugccag

SEQ ID NO: 17687 - RNA, 20 nt, Artificial Sequence
  Synthetic
ggugcuacaguucugccaga

SEQ ID NO: 17688 - RNA, 20 nt, Artificial Sequence
  Synthetic
gugcuacaguucugccagag

SEQ ID NO: 17689 - RNA, 20 nt, Artificial Sequence
  Synthetic
ugcuacaguucugccagaga

SEQ ID NO: 17690 - RNA, 20 nt, Artificial Sequence
  Synthetic
gcuacaguucugccagagau

SEQ ID NO: 17691 - RNA, 20 nt, Artificial Sequence
  Synthetic
cuacaguucugccagagauc

SEQ ID NO: 17692 - RNA, 20 nt, Artificial Sequence
  Synthetic
uacaguucugccagagauca

SEQ ID NO: 17693 - RNA, 20 nt, Artificial Sequence
  Synthetic
acaguucugccagagaucag

SEQ ID NO: 17694 - RNA, 20 nt, Artificial Sequence
  Synthetic
caguucugccagagaucagu

SEQ ID NO: 17695 - RNA, 20 nt, Artificial Sequence
  Synthetic
aguucugccagagaucaguu

SEQ ID NO: 17696 - RNA, 20 nt, Artificial Sequence
  Synthetic
guucugccagagaucaguug

SEQ ID NO: 17697 - RNA, 20 nt, Artificial Sequence
  Synthetic
uucugccagagaucaguugc

SEQ ID NO: 17698 - RNA, 20 nt, Artificial Sequence
  Synthetic
ucugccagagaucaguugcg

SEQ ID NO: 17699 - RNA, 20 nt, Artificial Sequence
  Synthetic
cugccagagaucaguugcgu

SEQ ID NO: 17700 - RNA, 20 nt, Artificial Sequence
  Synthetic
ugccagagaucaguugcgug

SEQ ID NO: 17701 - RNA, 20 nt, Artificial Sequence
  Synthetic
gccagagaucaguugcgugu

SEQ ID NO: 17702 - RNA, 20 nt, Artificial Sequence
  Synthetic
ccagagaucaguugcguguc

SEQ ID NO: 17703 - RNA, 20 nt, Artificial Sequence
  Synthetic
cagagaucaguugcgugucc

SEQ ID NO: 17704 - RNA, 20 nt, Artificial Sequence
  Synthetic
agagaucaguugcgugucca

SEQ ID NO: 17705 - RNA, 20 nt, Artificial Sequence
  Synthetic
gagaucaguugcguguccau

SEQ ID NO: 17706 - RNA, 20 nt, Artificial Sequence
  Synthetic
agaucaguugcguguccauu

SEQ ID NO: 17707 - RNA, 20 nt, Artificial Sequence
  Synthetic
gaucaguugcguguccauug

SEQ ID NO: 17708 - RNA, 20 nt, Artificial Sequence
  Synthetic
aucaguugcguguccauugc

SEQ ID NO: 17709 - RNA, 20 nt, Artificial Sequence
  Synthetic
ucaguugcguguccauugcc

SEQ ID NO: 17710 - RNA, 20 nt, Artificial Sequence
  Synthetic
caguugcguguccauugccc

SEQ ID NO: 17711 - RNA, 20 nt, Artificial Sequence
  Synthetic
aguugcguguccauugccca

SEQ ID NO: 17712 - RNA, 20 nt, Artificial Sequence
  Synthetic
guugcguguccauugcccac

SEQ ID NO: 17713 - RNA, 20 nt, Artificial Sequence
  Synthetic
uugcguguccauugcccacg

SEQ ID NO: 17714 - RNA, 20 nt, Artificial Sequence
  Synthetic
ugcguguccauugcccacga

SEQ ID NO: 17715 - RNA, 20 nt, Artificial Sequence
  Synthetic
gcguguccauugcccacgau

SEQ ID NO: 17716 - RNA, 20 nt, Artificial Sequence
  Synthetic
cguguccauugcccacgauc

SEQ ID NO: 17717 - RNA, 20 nt, Artificial Sequence
  Synthetic
guguccauugcccacgaucc

SEQ ID NO: 17718 - RNA, 20 nt, Artificial Sequence
  Synthetic
uguccauugcccacgaucca

SEQ ID NO: 17719 - RNA, 20 nt, Artificial Sequence
  Synthetic
guccauugcccacgauccau

SEQ ID NO: 17720 - RNA, 20 nt, Artificial Sequence
  Synthetic
uccauugcccacgauccauu

SEQ ID NO: 17721 - RNA, 20 nt, Artificial Sequence
  Synthetic
ccauugcccacgauccauug

SEQ ID NO: 17722 - RNA, 20 nt, Artificial Sequence
  Synthetic
cauugcccacgauccauugg

SEQ ID NO: 17723 - RNA, 20 nt, Artificial Sequence
  Synthetic
auugcccacgauccauuggc

SEQ ID NO: 17724 - RNA, 20 nt, Artificial Sequence
  Synthetic
uugcccacgauccauuggcu

SEQ ID NO: 17725 - RNA, 20 nt, Artificial Sequence
  Synthetic
ugcccacgauccauuggcug

SEQ ID NO: 17726 - RNA, 20 nt, Artificial Sequence
  Synthetic
gcccacgauccauuggcuga

SEQ ID NO: 17727 - RNA, 20 nt, Artificial Sequence
  Synthetic
cccacgauccauuggcugac

SEQ ID NO: 17728 - RNA, 20 nt, Artificial Sequence
  Synthetic
ccacgauccauuggcugacg

SEQ ID NO: 17729 - RNA, 20 nt, Artificial Sequence
  Synthetic
cacgauccauuggcugacga

SEQ ID NO: 17730 - RNA, 20 nt, Artificial Sequence
  Synthetic
acgauccauuggcugacgau

SEQ ID NO: 17731 - RNA, 20 nt, Artificial Sequence
  Synthetic
cgauccauuggcugacgauc

SEQ ID NO: 17732 - RNA, 20 nt, Artificial Sequence
  Synthetic
gauccauuggcugacgaucg

SEQ ID NO: 17733 - RNA, 20 nt, Artificial Sequence
  Synthetic
auccauuggcugacgaucgu

SEQ ID NO: 17734 - RNA, 20 nt, Artificial Sequence
  Synthetic
uccauuggcugacgaucgug

SEQ ID NO: 17735 - RNA, 20 nt, Artificial Sequence
  Synthetic
ccauuggcugacgaucgugg

SEQ ID NO: 17736 - RNA, 20 nt, Artificial Sequence
  Synthetic
cauuggcugacgaucgugga

SEQ ID NO: 17737 - RNA, 20 nt, Artificial Sequence
  Synthetic
auuggcugacgaucguggag

SEQ ID NO: 17738 - RNA, 20 nt, Artificial Sequence
  Synthetic
uuggcugacgaucguggaga

SEQ ID NO: 17739 - RNA, 20 nt, Artificial Sequence
  Synthetic
uggcugacgaucguggagac

SEQ ID NO: 17740 - RNA, 20 nt, Artificial Sequence
  Synthetic
ggcugacgaucguggagacg

SEQ ID NO: 17741 - RNA, 20 nt, Artificial Sequence
  Synthetic
gcugacgaucguggagacga

SEQ ID NO: 17742 - RNA, 20 nt, Artificial Sequence
  Synthetic
cugacgaucguggagacgaa

SEQ ID NO: 17743 - RNA, 20 nt, Artificial Sequence
  Synthetic
ugacgaucguggagacgaac

SEQ ID NO: 17744 - RNA, 20 nt, Artificial Sequence
  Synthetic
gacgaucguggagacgaaca

SEQ ID NO: 17745 - RNA, 20 nt, Artificial Sequence
  Synthetic
acgaucguggagacgaacag

SEQ ID NO: 17746 - RNA, 20 nt, Artificial Sequence
  Synthetic
cgaucguggagacgaacagc

SEQ ID NO: 17747 - RNA, 20 nt, Artificial Sequence
  Synthetic
gaucguggagacgaacagca

SEQ ID NO: 17748 - RNA, 20 nt, Artificial Sequence
  Synthetic
aucguggagacgaacagcag

SEQ ID NO: 17749 - RNA, 20 nt, Artificial Sequence
  Synthetic
ucguggagacgaacagcagc

SEQ ID NO: 17750 - RNA, 20 nt, Artificial Sequence
  Synthetic
cguggagacgaacagcagca

SEQ ID NO: 17751 - RNA, 20 nt, Artificial Sequence
  Synthetic
guggagacgaacagcagcac

SEQ ID NO: 17752 - RNA, 20 nt, Artificial Sequence
  Synthetic
uggagacgaacagcagcacc

SEQ ID NO: 17753 - RNA, 20 nt, Artificial Sequence
  Synthetic
ggagacgaacagcagcacca

SEQ ID NO: 17754 - RNA, 20 nt, Artificial Sequence
  Synthetic
gagacgaacagcagcaccag

SEQ ID NO: 17755 - RNA, 20 nt, Artificial Sequence
  Synthetic
agacgaacagcagcaccagc

SEQ ID NO: 17756 - RNA, 20 nt, Artificial Sequence
  Synthetic
gacgaacagcagcaccagca

SEQ ID NO: 17757 - RNA, 20 nt, Artificial Sequence
  Synthetic
acgaacagcagcaccagcac

SEQ ID NO: 17758 - RNA, 20 nt, Artificial Sequence
  Synthetic
cgaacagcagcaccagcacc

SEQ ID NO: 17759 - RNA, 20 nt, Artificial Sequence
  Synthetic
gaacagcagcaccagcaccg

SEQ ID NO: 17760 - RNA, 20 nt, Artificial Sequence
  Synthetic
aacagcagcaccagcaccgc

SEQ ID NO: 17761 - RNA, 20 nt, Artificial Sequence
  Synthetic
acagcagcaccagcaccgcg

SEQ ID NO: 17762 - RNA, 20 nt, Artificial Sequence
  Synthetic
cagcagcaccagcaccgcga

SEQ ID NO: 17763 - RNA, 20 nt, Artificial Sequence
  Synthetic
agcagcaccagcaccgcgac

SEQ ID NO: 17764 - RNA, 20 nt, Artificial Sequence
  Synthetic
gcagcaccagcaccgcgacg

SEQ ID NO: 17765 - RNA, 20 nt, Artificial Sequence
  Synthetic
cagcaccagcaccgcgacgu

SEQ ID NO: 17766 - RNA, 20 nt, Artificial Sequence
  Synthetic
agcaccagcaccgcgacgug

SEQ ID NO: 17767 - RNA, 20 nt, Artificial Sequence
  Synthetic
gcaccagcaccgcgacgugg

SEQ ID NO: 17768 - RNA, 20 nt, Artificial Sequence
  Synthetic
caccagcaccgcgacgugga

SEQ ID NO: 17769 - RNA, 20 nt, Artificial Sequence
  Synthetic
accagcaccgcgacguggag

SEQ ID NO: 17770 - RNA, 20 nt, Artificial Sequence
  Synthetic
ccagcaccgcgacguggagg

SEQ ID NO: 17771 - RNA, 20 nt, Artificial Sequence
  Synthetic
cagcaccgcgacguggagga

SEQ ID NO: 17772 - RNA, 20 nt, Artificial Sequence
  Synthetic
agcaccgcgacguggaggac

SEQ ID NO: 17773 - RNA, 20 nt, Artificial Sequence
  Synthetic
gcaccgcgacguggaggacg

SEQ ID NO: 17774 - RNA, 20 nt, Artificial Sequence
  Synthetic
caccgcgacguggaggacga

SEQ ID NO: 17775 - RNA, 20 nt, Artificial Sequence
  Synthetic
accgcgacguggaggacgau

SEQ ID NO: 17776 - RNA, 20 nt, Artificial Sequence
  Synthetic
ccgcgacguggaggacgaug

SEQ ID NO: 17777 - RNA, 20 nt, Artificial Sequence
  Synthetic
cgcgacguggaggacgauga

SEQ ID NO: 17778 - RNA, 20 nt, Artificial Sequence
  Synthetic
gcgacguggaggacgaugau

SEQ ID NO: 17779 - RNA, 20 nt, Artificial Sequence
  Synthetic
cgacguggaggacgaugaua

SEQ ID NO: 17780 - RNA, 20 nt, Artificial Sequence
  Synthetic
gacguggaggacgaugauac

SEQ ID NO: 17781 - RNA, 20 nt, Artificial Sequence
  Synthetic
acguggaggacgaugauacu

SEQ ID NO: 17782 - RNA, 20 nt, Artificial Sequence
  Synthetic
cguggaggacgaugauacuc

SEQ ID NO: 17783 - RNA, 20 nt, Artificial Sequence
  Synthetic
guggaggacgaugauacuca

SEQ ID NO: 17784 - RNA, 20 nt, Artificial Sequence
  Synthetic
uggaggacgaugauacucag

SEQ ID NO: 17785 - RNA, 20 nt, Artificial Sequence
  Synthetic
ggaggacgaugauacucagc

SEQ ID NO: 17786 - RNA, 20 nt, Artificial Sequence
  Synthetic
gaggacgaugauacucagca

SEQ ID NO: 17787 - RNA, 20 nt, Artificial Sequence
  Synthetic
aggacgaugauacucagcaa

SEQ ID NO: 17788 - RNA, 20 nt, Artificial Sequence
  Synthetic
ggacgaugauacucagcaac

SEQ ID NO: 17789 - RNA, 20 nt, Artificial Sequence
  Synthetic
gacgaugauacucagcaaca

SEQ ID NO: 17790 - RNA, 20 nt, Artificial Sequence
  Synthetic
acgaugauacucagcaacag

SEQ ID NO: 17791 - RNA, 20 nt, Artificial Sequence
  Synthetic
cgaugauacucagcaacagg

SEQ ID NO: 17792 - RNA, 20 nt, Artificial Sequence
  Synthetic
gaugauacucagcaacagga

SEQ ID NO: 17793 - RNA, 20 nt, Artificial Sequence
  Synthetic
augauacucagcaacaggag

SEQ ID NO: 17794 - RNA, 20 nt, Artificial Sequence
  Synthetic
ugauacucagcaacaggagg

SEQ ID NO: 17795 - RNA, 20 nt, Artificial Sequence
  Synthetic
gauacucagcaacaggagga

SEQ ID NO: 17796 - RNA, 20 nt, Artificial Sequence
  Synthetic
auacucagcaacaggaggag

SEQ ID NO: 17797 - RNA, 20 nt, Artificial Sequence
  Synthetic
uacucagcaacaggaggagc

SEQ ID NO: 17798 - RNA, 20 nt, Artificial Sequence
  Synthetic
acucagcaacaggaggagca

SEQ ID NO: 17799 - RNA, 20 nt, Artificial Sequence
  Synthetic
cucagcaacaggaggagcau

SEQ ID NO: 17800 - RNA, 20 nt, Artificial Sequence
  Synthetic
ucagcaacaggaggagcauu

SEQ ID NO: 17801 - RNA, 20 nt, Artificial Sequence
  Synthetic
cagcaacaggaggagcauuc

SEQ ID NO: 17802 - RNA, 20 nt, Artificial Sequence
  Synthetic
agcaacaggaggagcauucu

SEQ ID NO: 17803 - RNA, 20 nt, Artificial Sequence
  Synthetic
gcaacaggaggagcauucug

SEQ ID NO: 17804 - RNA, 20 nt, Artificial Sequence
  Synthetic
caacaggaggagcauucugg

SEQ ID NO: 17805 - RNA, 20 nt, Artificial Sequence
  Synthetic
aacaggaggagcauucuggc

SEQ ID NO: 17806 - RNA, 20 nt, Artificial Sequence
  Synthetic
acaggaggagcauucuggcg

SEQ ID NO: 17807 - RNA, 20 nt, Artificial Sequence
  Synthetic
caggaggagcauucuggcgg

SEQ ID NO: 17808 - RNA, 20 nt, Artificial Sequence
  Synthetic
aggaggagcauucuggcggc

SEQ ID NO: 17809 - RNA, 20 nt, Artificial Sequence
  Synthetic
ggaggagcauucuggcggca

SEQ ID NO: 17810 - RNA, 20 nt, Artificial Sequence
  Synthetic
gaggagcauucuggcggcaa

SEQ ID NO: 17811 - RNA, 20 nt, Artificial Sequence
  Synthetic
aggagcauucuggcggcaag

SEQ ID NO: 17812 - RNA, 20 nt, Artificial Sequence
  Synthetic
ggagcauucuggcggcaagu

SEQ ID NO: 17813 - RNA, 20 nt, Artificial Sequence
  Synthetic
gagcauucuggcggcaaguu

SEQ ID NO: 17814 - RNA, 20 nt, Artificial Sequence
  Synthetic
agcauucuggcggcaaguuc

SEQ ID NO: 17815 - RNA, 20 nt, Artificial Sequence
  Synthetic
gcauucuggcggcaaguucu

SEQ ID NO: 17816 - RNA, 20 nt, Artificial Sequence
  Synthetic
cauucuggcggcaaguucug

SEQ ID NO: 17817 - RNA, 20 nt, Artificial Sequence
  Synthetic
auucuggcggcaaguucugc

SEQ ID NO: 17818 - RNA, 20 nt, Artificial Sequence
  Synthetic
uucuggcggcaaguucugcu

SEQ ID NO: 17819 - RNA, 20 nt, Artificial Sequence
  Synthetic
ucuggcggcaaguucugcuc

SEQ ID NO: 17820 - RNA, 20 nt, Artificial Sequence
  Synthetic
cuggcggcaaguucugcuca

SEQ ID NO: 17821 - RNA, 20 nt, Artificial Sequence
  Synthetic
uggcggcaaguucugcucag

SEQ ID NO: 17822 - RNA, 20 nt, Artificial Sequence
  Synthetic
ggcggcaaguucugcucagc

SEQ ID NO: 17823 - RNA, 20 nt, Artificial Sequence
  Synthetic
gcggcaaguucugcucagcg

SEQ ID NO: 17824 - RNA, 20 nt, Artificial Sequence
  Synthetic
cggcaaguucugcucagcgg

SEQ ID NO: 17825 - RNA, 20 nt, Artificial Sequence
  Synthetic
ggcaaguucugcucagcgga

SEQ ID NO: 17826 - RNA, 20 nt, Artificial Sequence
  Synthetic
gcaaguucugcucagcggag

SEQ ID NO: 17827 - RNA, 20 nt, Artificial Sequence
  Synthetic
caaguucugcucagcggagu

SEQ ID NO: 17828 - RNA, 20 nt, Artificial Sequence
  Synthetic
aaguucugcucagcggaguu

SEQ ID NO: 17829 - RNA, 20 nt, Artificial Sequence
  Synthetic
aguucugcucagcggaguuu

SEQ ID NO: 17830 - RNA, 20 nt, Artificial Sequence
  Synthetic
guucugcucagcggaguuuc

SEQ ID NO: 17831 - RNA, 20 nt, Artificial Sequence
  Synthetic
uucugcucagcggaguuucu

SEQ ID NO: 17832 - RNA, 20 nt, Artificial Sequence
  Synthetic
ucugcucagcggaguuucug

SEQ ID NO: 17833 - RNA, 20 nt, Artificial Sequence
  Synthetic
cugcucagcggaguuucugc

SEQ ID NO: 17834 - RNA, 20 nt, Artificial Sequence
  Synthetic
ugcucagcggaguuucugca

SEQ ID NO: 17835 - RNA, 20 nt, Artificial Sequence
  Synthetic
gcucagcggaguuucugcag

SEQ ID NO: 17836 - RNA, 20 nt, Artificial Sequence
  Synthetic
cucagcggaguuucugcagc

SEQ ID NO: 17837 - RNA, 20 nt, Artificial Sequence
  Synthetic
ucagcggaguuucugcagcc

SEQ ID NO: 17838 - RNA, 20 nt, Artificial Sequence
  Synthetic
cagcggaguuucugcagccc

SEQ ID NO: 17839 - RNA, 20 nt, Artificial Sequence
  Synthetic
agcggaguuucugcagccca

SEQ ID NO: 17840 - RNA, 20 nt, Artificial Sequence
  Synthetic
gcggaguuucugcagcccaa

SEQ ID NO: 17841 - RNA, 20 nt, Artificial Sequence
  Synthetic
cggaguuucugcagcccaaa

SEQ ID NO: 17842 - RNA, 20 nt, Artificial Sequence
  Synthetic
ggaguuucugcagcccaaag

SEQ ID NO: 17843 - RNA, 20 nt, Artificial Sequence
  Synthetic
gaguuucugcagcccaaagg

SEQ ID NO: 17844 - RNA, 20 nt, Artificial Sequence
  Synthetic
aguuucugcagcccaaagga

SEQ ID NO: 17845 - RNA, 20 nt, Artificial Sequence
  Synthetic
guuucugcagcccaaaggaa

SEQ ID NO: 17846 - RNA, 20 nt, Artificial Sequence
  Synthetic
uuucugcagcccaaaggaac

SEQ ID NO: 17847 - RNA, 20 nt, Artificial Sequence
  Synthetic
uucugcagcccaaaggaaca

SEQ ID NO: 17848 - RNA, 20 nt, Artificial Sequence
  Synthetic
ucugcagcccaaaggaacag

SEQ ID NO: 17849 - RNA, 20 nt, Artificial Sequence
  Synthetic
cugcagcccaaaggaacagc

SEQ ID NO: 17850 - RNA, 20 nt, Artificial Sequence
  Synthetic
ugcagcccaaaggaacagcu

SEQ ID NO: 17851 - RNA, 20 nt, Artificial Sequence
  Synthetic
gcagcccaaaggaacagcug

SEQ ID NO: 17852 - RNA, 20 nt, Artificial Sequence
  Synthetic
cagcccaaaggaacagcugu

SEQ ID NO: 17853 - RNA, 20 nt, Artificial Sequence
  Synthetic
agcccaaaggaacagcuguc

SEQ ID NO: 17854 - RNA, 20 nt, Artificial Sequence
  Synthetic
gcccaaaggaacagcugucc

SEQ ID NO: 17855 - RNA, 20 nt, Artificial Sequence
  Synthetic
cccaaaggaacagcuguccc

SEQ ID NO: 17856 - RNA, 20 nt, Artificial Sequence
  Synthetic
ccaaaggaacagcugucccg

SEQ ID NO: 17857 - RNA, 20 nt, Artificial Sequence
  Synthetic
caaaggaacagcugucccga

SEQ ID NO: 17858 - RNA, 20 nt, Artificial Sequence
  Synthetic
aaaggaacagcugucccgau

SEQ ID NO: 17859 - RNA, 20 nt, Artificial Sequence
  Synthetic
aaggaacagcugucccgauc

SEQ ID NO: 17860 - RNA, 20 nt, Artificial Sequence
  Synthetic
aggaacagcugucccgaucc

SEQ ID NO: 17861 - RNA, 20 nt, Artificial Sequence
  Synthetic
ggaacagcugucccgauccu

SEQ ID NO: 17862 - RNA, 20 nt, Artificial Sequence
  Synthetic
gaacagcugucccgauccuc

SEQ ID NO: 17863 - RNA, 20 nt, Artificial Sequence
  Synthetic
aacagcugucccgauccuca

SEQ ID NO: 17864 - RNA, 20 nt, Artificial Sequence
  Synthetic
acagcugucccgauccucag

SEQ ID NO: 17865 - RNA, 20 nt, Artificial Sequence
  Synthetic
cagcugucccgauccucagg

SEQ ID NO: 17866 - RNA, 20 nt, Artificial Sequence
  Synthetic
agcugucccgauccucaggg

SEQ ID NO: 17867 - RNA, 20 nt, Artificial Sequence
  Synthetic
gcugucccgauccucagggu

SEQ ID NO: 17868 - RNA, 20 nt, Artificial Sequence
  Synthetic
cugucccgauccucagggug

SEQ ID NO: 17869 - RNA, 20 nt, Artificial Sequence
  Synthetic
ugucccgauccucagggugg

SEQ ID NO: 17870 - RNA, 20 nt, Artificial Sequence
  Synthetic
gucccgauccucaggguggc

SEQ ID NO: 17871 - RNA, 20 nt, Artificial Sequence
  Synthetic
ucccgauccucaggguggcc

SEQ ID NO: 17872 - RNA, 20 nt, Artificial Sequence
  Synthetic
cccgauccucaggguggccu

SEQ ID NO: 17873 - RNA, 20 nt, Artificial Sequence
  Synthetic
ccgauccucaggguggccuc

SEQ ID NO: 17874 - RNA, 20 nt, Artificial Sequence
  Synthetic
cgauccucaggguggccuca

SEQ ID NO: 17875 - RNA, 20 nt, Artificial Sequence
  Synthetic
gauccucaggguggccucaa

SEQ ID NO: 17876 - RNA, 20 nt, Artificial Sequence
  Synthetic
auccucaggguggccucaaa

SEQ ID NO: 17877 - RNA, 20 nt, Artificial Sequence
  Synthetic
uccucaggguggccucaaac

SEQ ID NO: 17878 - RNA, 20 nt, Artificial Sequence
  Synthetic
ccucaggguggccucaaaca

SEQ ID NO: 17879 - RNA, 20 nt, Artificial Sequence
  Synthetic
cucaggguggccucaaacac

SEQ ID NO: 17880 - RNA, 20 nt, Artificial Sequence
  Synthetic
ucaggguggccucaaacaca

SEQ ID NO: 17881 - RNA, 20 nt, Artificial Sequence
  Synthetic
caggguggccucaaacacaa

SEQ ID NO: 17882 - RNA, 20 nt, Artificial Sequence
  Synthetic
aggguggccucaaacacaaa

SEQ ID NO: 17883 - RNA, 20 nt, Artificial Sequence
  Synthetic
ggguggccucaaacacaaac

SEQ ID NO: 17884 - RNA, 20 nt, Artificial Sequence
  Synthetic
gguggccucaaacacaaacu

SEQ ID NO: 17885 - RNA, 20 nt, Artificial Sequence
  Synthetic
guggccucaaacacaaacuc

SEQ ID NO: 17886 - RNA, 20 nt, Artificial Sequence
  Synthetic
uggccucaaacacaaacucg

SEQ ID NO: 17887 - RNA, 20 nt, Artificial Sequence
  Synthetic
ggccucaaacacaaacucgg

SEQ ID NO: 17888 - RNA, 20 nt, Artificial Sequence
  Synthetic
gccucaaacacaaacucggg

SEQ ID NO: 17889 - RNA, 20 nt, Artificial Sequence
  Synthetic
ccucaaacacaaacucgggu

SEQ ID NO: 17890 - RNA, 20 nt, Artificial Sequence
  Synthetic
cucaaacacaaacucgggug

SEQ ID NO: 17891 - RNA, 20 nt, Artificial Sequence
  Synthetic
ucaaacacaaacucgggugc

SEQ ID NO: 17892 - RNA, 20 nt, Artificial Sequence
  Synthetic
caaacacaaacucgggugcg

SEQ ID NO: 17893 - RNA, 20 nt, Artificial Sequence
  Synthetic
aaacacaaacucgggugcgu

SEQ ID NO: 17894 - RNA, 20 nt, Artificial Sequence
  Synthetic
aacacaaacucgggugcguu

SEQ ID NO: 17895 - RNA, 20 nt, Artificial Sequence
  Synthetic
acacaaacucgggugcguug

SEQ ID NO: 17896 - RNA, 20 nt, Artificial Sequence
  Synthetic
cacaaacucgggugcguugg

SEQ ID NO: 17897 - RNA, 20 nt, Artificial Sequence
  Synthetic
acaaacucgggugcguuggc

SEQ ID NO: 17898 - RNA, 20 nt, Artificial Sequence
  Synthetic
caaacucgggugcguuggcu

SEQ ID NO: 17899 - RNA, 20 nt, Artificial Sequence
  Synthetic
aaacucgggugcguuggcuc

SEQ ID NO: 17900 - RNA, 20 nt, Artificial Sequence
  Synthetic
aacucgggugcguuggcucc

SEQ ID NO: 17901 - RNA, 20 nt, Artificial Sequence
  Synthetic
acucgggugcguuggcuccg

SEQ ID NO: 17902 - RNA, 20 nt, Artificial Sequence
  Synthetic
cucgggugcguuggcuccgc

SEQ ID NO: 17903 - RNA, 20 nt, Artificial Sequence
  Synthetic
ucgggugcguuggcuccgcu

SEQ ID NO: 17904 - RNA, 20 nt, Artificial Sequence
  Synthetic
cgggugcguuggcuccgcug

SEQ ID NO: 17905 - RNA, 20 nt, Artificial Sequence
  Synthetic
gggugcguuggcuccgcugc

SEQ ID NO: 17906 - RNA, 20 nt, Artificial Sequence
  Synthetic
ggugcguuggcuccgcugcu

SEQ ID NO: 17907 - RNA, 20 nt, Artificial Sequence
  Synthetic
gugcguuggcuccgcugcug

SEQ ID NO: 17908 - RNA, 20 nt, Artificial Sequence
  Synthetic
ugcguuggcuccgcugcugg

SEQ ID NO: 17909 - RNA, 20 nt, Artificial Sequence
  Synthetic
gcguuggcuccgcugcuggc

SEQ ID NO: 17910 - RNA, 20 nt, Artificial Sequence
  Synthetic
cguuggcuccgcugcuggcg

SEQ ID NO: 17911 - RNA, 20 nt, Artificial Sequence
  Synthetic
guuggcuccgcugcuggcgc

SEQ ID NO: 17912 - RNA, 20 nt, Artificial Sequence
  Synthetic
uuggcuccgcugcuggcgcc

SEQ ID NO: 17913 - RNA, 20 nt, Artificial Sequence
  Synthetic
uggcuccgcugcuggcgccg

SEQ ID NO: 17914 - RNA, 20 nt, Artificial Sequence
  Synthetic
ggcuccgcugcuggcgccgc

SEQ ID NO: 17915 - RNA, 20 nt, Artificial Sequence
  Synthetic
gcuccgcugcuggcgccgcc

SEQ ID NO: 17916 - RNA, 20 nt, Artificial Sequence
  Synthetic
cuccgcugcuggcgccgcca

SEQ ID NO: 17917 - RNA, 20 nt, Artificial Sequence
  Synthetic
uccgcugcuggcgccgccaa

SEQ ID NO: 17918 - RNA, 20 nt, Artificial Sequence
  Synthetic
ccgcugcuggcgccgccaaa

SEQ ID NO: 17919 - RNA, 20 nt, Artificial Sequence
  Synthetic
cgcugcuggcgccgccaaag

SEQ ID NO: 17920 - RNA, 20 nt, Artificial Sequence
  Synthetic
gcugcuggcgccgccaaagc

SEQ ID NO: 17921 - RNA, 20 nt, Artificial Sequence
  Synthetic
cugcuggcgccgccaaagcu

SEQ ID NO: 17922 - RNA, 20 nt, Artificial Sequence
  Synthetic
ugcuggcgccgccaaagcug

SEQ ID NO: 17923 - RNA, 20 nt, Artificial Sequence
  Synthetic
gcuggcgccgccaaagcugc

SEQ ID NO: 17924 - RNA, 20 nt, Artificial Sequence
  Synthetic
cuggcgccgccaaagcugcg

SEQ ID NO: 17925 - RNA, 20 nt, Artificial Sequence
  Synthetic
uggcgccgccaaagcugcgc

SEQ ID NO: 17926 - RNA, 20 nt, Artificial Sequence
  Synthetic
ggcgccgccaaagcugcgcu

SEQ ID NO: 17927 - RNA, 20 nt, Artificial Sequence
  Synthetic
gcgccgccaaagcugcgcug

SEQ ID NO: 17928 - RNA, 20 nt, Artificial Sequence
  Synthetic
cgccgccaaagcugcgcugc

SEQ ID NO: 17929 - RNA, 20 nt, Artificial Sequence
  Synthetic
gccgccaaagcugcgcugcg

SEQ ID NO: 17930 - RNA, 20 nt, Artificial Sequence
  Synthetic
ccgccaaagcugcgcugcgg

SEQ ID NO: 17931 - RNA, 20 nt, Artificial Sequence
  Synthetic
cgccaaagcugcgcugcggg

SEQ ID NO: 17932 - RNA, 20 nt, Artificial Sequence
  Synthetic
gccaaagcugcgcugcgggg

SEQ ID NO: 17933 - RNA, 20 nt, Artificial Sequence
  Synthetic
ccaaagcugcgcugcggggc

SEQ ID NO: 17934 - RNA, 20 nt, Artificial Sequence
  Synthetic
caaagcugcgcugcggggcu

SEQ ID NO: 17935 - RNA, 20 nt, Artificial Sequence
  Synthetic
aaagcugcgcugcggggcug

SEQ ID NO: 17936 - RNA, 20 nt, Artificial Sequence
  Synthetic
aagcugcgcugcggggcugc

SEQ ID NO: 17937 - RNA, 20 nt, Artificial Sequence
  Synthetic
agcugcgcugcggggcugcg

SEQ ID NO: 17938 - RNA, 20 nt, Artificial Sequence
  Synthetic
gcugcgcugcggggcugcgc

SEQ ID NO: 17939 - RNA, 20 nt, Artificial Sequence
  Synthetic
cugcgcugcggggcugcgcg

SEQ ID NO: 17940 - RNA, 20 nt, Artificial Sequence
  Synthetic
ugcgcugcggggcugcgcgc

SEQ ID NO: 17941 - RNA, 20 nt, Artificial Sequence
  Synthetic
gcgcugcggggcugcgcgcg

SEQ ID NO: 17942 - RNA, 20 nt, Artificial Sequence
  Synthetic
cgcugcggggcugcgcgcgc

SEQ ID NO: 17943 - RNA, 20 nt, Artificial Sequence
  Synthetic
gcugcggggcugcgcgcgcg

SEQ ID NO: 17944 - RNA, 20 nt, Artificial Sequence
  Synthetic
cugcggggcugcgcgcgcgc

SEQ ID NO: 17945 - RNA, 20 nt, Artificial Sequence
  Synthetic
ugcggggcugcgcgcgcgcg

SEQ ID NO: 17946 - RNA, 20 nt, Artificial Sequence
  Synthetic
gcggggcugcgcgcgcgcga

SEQ ID NO: 17947 - RNA, 20 nt, Artificial Sequence
  Synthetic
cggggcugcgcgcgcgcgaa

SEQ ID NO: 17948 - RNA, 20 nt, Artificial Sequence
  Synthetic
ggggcugcgcgcgcgcgaag

SEQ ID NO: 17949 - RNA, 20 nt, Artificial Sequence
  Synthetic
gggcugcgcgcgcgcgaagc

SEQ ID NO: 17950 - RNA, 20 nt, Artificial Sequence
  Synthetic
ggcugcgcgcgcgcgaagca

SEQ ID NO: 17951 - RNA, 20 nt, Artificial Sequence
  Synthetic
gcugcgcgcgcgcgaagcaa

SEQ ID NO: 17952 - RNA, 20 nt, Artificial Sequence
  Synthetic
cugcgcgcgcgcgaagcaag

SEQ ID NO: 17953 - RNA, 20 nt, Artificial Sequence
  Synthetic
ugcgcgcgcgcgaagcaagg

SEQ ID NO: 17954 - RNA, 20 nt, Artificial Sequence
  Synthetic
gcgcgcgcgcgaagcaaggg

SEQ ID NO: 17955 - RNA, 20 nt, Artificial Sequence
  Synthetic
cgcgcgcgcgaagcaagggg

SEQ ID NO: 17956 - RNA, 20 nt, Artificial Sequence
  Synthetic
gcgcgcgcgaagcaaggggg

SEQ ID NO: 17957 - RNA, 20 nt, Artificial Sequence
  Synthetic
cgcgcgcgaagcaagggggc

SEQ ID NO: 17958 - RNA, 21 nt, Artificial Sequence
  Synthetic
gucacccccaggcuggagugc

SEQ ID NO: 17959 - RNA, 21 nt, Artificial Sequence
  Synthetic
ucacccccaggcuggagugca

SEQ ID NO: 17960 - RNA, 21 nt, Artificial Sequence
  Synthetic
cacccccaggcuggagugcag

SEQ ID NO: 17961 - RNA, 21 nt, Artificial Sequence
  Synthetic
acccccaggcuggagugcagu

SEQ ID NO: 17962 - RNA, 21 nt, Artificial Sequence
  Synthetic
cccccaggcuggagugcagug

SEQ ID NO: 17963 - RNA, 21 nt, Artificial Sequence
  Synthetic
ccccaggcuggagugcagugg

SEQ ID NO: 17964 - RNA, 21 nt, Artificial Sequence
  Synthetic
cccaggcuggagugcaguggc

SEQ ID NO: 17965 - RNA, 21 nt, Artificial Sequence
  Synthetic
ccaggcuggagugcaguggca

SEQ ID NO: 17966 - RNA, 21 nt, Artificial Sequence
  Synthetic
caggcuggagugcaguggcau

SEQ ID NO: 17967 - RNA, 21 nt, Artificial Sequence
  Synthetic
aggcuggagugcaguggcaug

SEQ ID NO: 17968 - RNA, 21 nt, Artificial Sequence
  Synthetic
ggcuggagugcaguggcauga

SEQ ID NO: 17969 - RNA, 21 nt, Artificial Sequence
  Synthetic
gcuggagugcaguggcaugau

SEQ ID NO: 17970 - RNA, 21 nt, Artificial Sequence
  Synthetic
cuggagugcaguggcaugauc

SEQ ID NO: 17971 - RNA, 21 nt, Artificial Sequence
  Synthetic
uggagugcaguggcaugaucu

SEQ ID NO: 17972 - RNA, 21 nt, Artificial Sequence
  Synthetic
ggagugcaguggcaugaucuu

SEQ ID NO: 17973 - RNA, 21 nt, Artificial Sequence
  Synthetic
gagugcaguggcaugaucuug

SEQ ID NO: 17974 - RNA, 21 nt, Artificial Sequence
  Synthetic
agugcaguggcaugaucuugg

SEQ ID NO: 17975 - RNA, 21 nt, Artificial Sequence
  Synthetic
gugcaguggcaugaucuuggc

SEQ ID NO: 17976 - RNA, 21 nt, Artificial Sequence
  Synthetic
ugcaguggcaugaucuuggcu

SEQ ID NO: 17977 - RNA, 21 nt, Artificial Sequence
  Synthetic
gcaguggcaugaucuuggcuc

SEQ ID NO: 17978 - RNA, 21 nt, Artificial Sequence
  Synthetic
caguggcaugaucuuggcuca

SEQ ID NO: 17979 - RNA, 21 nt, Artificial Sequence
  Synthetic
aguggcaugaucuuggcucac

SEQ ID NO: 17980 - RNA, 21 nt, Artificial Sequence
  Synthetic
guggcaugaucuuggcucacu

SEQ ID NO: 17981 - RNA, 21 nt, Artificial Sequence
  Synthetic
uggcaugaucuuggcucacug

SEQ ID NO: 17982 - RNA, 21 nt, Artificial Sequence
  Synthetic
ggcaugaucuuggcucacugc

SEQ ID NO: 17983 - RNA, 21 nt, Artificial Sequence
  Synthetic
gcaugaucuuggcucacugca

SEQ ID NO: 17984 - RNA, 21 nt, Artificial Sequence
  Synthetic
caugaucuuggcucacugcaa

SEQ ID NO: 17985 - RNA, 21 nt, Artificial Sequence
  Synthetic
augaucuuggcucacugcaac

SEQ ID NO: 17986 - RNA, 21 nt, Artificial Sequence
  Synthetic
ugaucuuggcucacugcaacc

SEQ ID NO: 17987 - RNA, 21 nt, Artificial Sequence
  Synthetic
gaucuuggcucacugcaaccu

SEQ ID NO: 17988 - RNA, 21 nt, Artificial Sequence
  Synthetic
aucuuggcucacugcaaccuc

SEQ ID NO: 17989 - RNA, 21 nt, Artificial Sequence
  Synthetic
ucuuggcucacugcaaccucc

SEQ ID NO: 17990 - RNA, 21 nt, Artificial Sequence
  Synthetic
cuuggcucacugcaaccucca

SEQ ID NO: 17991 - RNA, 21 nt, Artificial Sequence
  Synthetic
uuggcucacugcaaccuccac

SEQ ID NO: 17992 - RNA, 21 nt, Artificial Sequence
  Synthetic
uggcucacugcaaccuccacc

SEQ ID NO: 17993 - RNA, 21 nt, Artificial Sequence
  Synthetic
ggcucacugcaaccuccaccu

SEQ ID NO: 17994 - RNA, 21 nt, Artificial Sequence
  Synthetic
gcucacugcaaccuccaccuc

SEQ ID NO: 17995 - RNA, 21 nt, Artificial Sequence
  Synthetic
cucacugcaaccuccaccucc

SEQ ID NO: 17996 - RNA, 21 nt, Artificial Sequence
  Synthetic
ucacugcaaccuccaccuccu

SEQ ID NO: 17997 - RNA, 21 nt, Artificial Sequence
  Synthetic
cacugcaaccuccaccuccua

SEQ ID NO: 17998 - RNA, 21 nt, Artificial Sequence
  Synthetic
acugcaaccuccaccuccuag

SEQ ID NO: 17999 - RNA, 21 nt, Artificial Sequence
  Synthetic
cugcaaccuccaccuccuagg

SEQ ID NO: 18000 - RNA, 21 nt, Artificial Sequence
  Synthetic
ugcaaccuccaccuccuaggu

SEQ ID NO: 18001 - RNA, 21 nt, Artificial Sequence
  Synthetic
gcaaccuccaccuccuagguu

SEQ ID NO: 18002 - RNA, 21 nt, Artificial Sequence
  Synthetic
caaccuccaccuccuagguuc

SEQ ID NO: 18003 - RNA, 21 nt, Artificial Sequence
  Synthetic
aaccuccaccuccuagguuca

SEQ ID NO: 18004 - RNA, 21 nt, Artificial Sequence
  Synthetic
accuccaccuccuagguucaa

SEQ ID NO: 18005 - RNA, 21 nt, Artificial Sequence
  Synthetic
ccuccaccuccuagguucaag

SEQ ID NO: 18006 - RNA, 21 nt, Artificial Sequence
  Synthetic
cuccaccuccuagguucaagu

SEQ ID NO: 18007 - RNA, 21 nt, Artificial Sequence
  Synthetic
uccaccuccuagguucaagug

SEQ ID NO: 18008 - RNA, 21 nt, Artificial Sequence
  Synthetic
ccaccuccuagguucaaguga

SEQ ID NO: 18009 - RNA, 21 nt, Artificial Sequence
  Synthetic
caccuccuagguucaagugau

SEQ ID NO: 18010 - RNA, 21 nt, Artificial Sequence
  Synthetic
accuccuagguucaagugauu

SEQ ID NO: 18011 - RNA, 21 nt, Artificial Sequence
  Synthetic
ccuccuagguucaagugauuc

SEQ ID NO: 18012 - RNA, 21 nt, Artificial Sequence
  Synthetic
cuccuagguucaagugauucu

SEQ ID NO: 18013 - RNA, 21 nt, Artificial Sequence
  Synthetic
uccuagguucaagugauucuu

SEQ ID NO: 18014 - RNA, 21 nt, Artificial Sequence
  Synthetic
ccuagguucaagugauucuuc

SEQ ID NO: 18015 - RNA, 21 nt, Artificial Sequence
  Synthetic
cuagguucaagugauucuucu

SEQ ID NO: 18016 - RNA, 21 nt, Artificial Sequence
  Synthetic
uagguucaagugauucuucuc

SEQ ID NO: 18017 - RNA, 21 nt, Artificial Sequence
  Synthetic
agguucaagugauucuucucu

SEQ ID NO: 18018 - RNA, 21 nt, Artificial Sequence
  Synthetic
gguucaagugauucuucucug

SEQ ID NO: 18019 - RNA, 21 nt, Artificial Sequence
  Synthetic
guucaagugauucuucucugc

SEQ ID NO: 18020 - RNA, 21 nt, Artificial Sequence
  Synthetic
uucaagugauucuucucugcc

SEQ ID NO: 18021 - RNA, 21 nt, Artificial Sequence
  Synthetic
ucaagugauucuucucugccu

SEQ ID NO: 18022 - RNA, 21 nt, Artificial Sequence
  Synthetic
caagugauucuucucugccuc

SEQ ID NO: 18023 - RNA, 21 nt, Artificial Sequence
  Synthetic
aagugauucuucucugccuca

SEQ ID NO: 18024 - RNA, 21 nt, Artificial Sequence
  Synthetic
agugauucuucucugccucag

SEQ ID NO: 18025 - RNA, 21 nt, Artificial Sequence
  Synthetic
gugauucuucucugccucagu

SEQ ID NO: 18026 - RNA, 21 nt, Artificial Sequence
  Synthetic
ugauucuucucugccucaguu

SEQ ID NO: 18027 - RNA, 21 nt, Artificial Sequence
  Synthetic
gauucuucucugccucaguuu

SEQ ID NO: 18028 - RNA, 21 nt, Artificial Sequence
  Synthetic
auucuucucugccucaguuuc

SEQ ID NO: 18029 - RNA, 21 nt, Artificial Sequence
  Synthetic
uucuucucugccucaguuucc

SEQ ID NO: 18030 - RNA, 21 nt, Artificial Sequence
  Synthetic
ucuucucugccucaguuuccc

SEQ ID NO: 18031 - RNA, 21 nt, Artificial Sequence
  Synthetic
cuucucugccucaguuuccca

SEQ ID NO: 18032 - RNA, 21 nt, Artificial Sequence
  Synthetic
uucucugccucaguuucccaa

SEQ ID NO: 18033 - RNA, 21 nt, Artificial Sequence
  Synthetic
ucucugccucaguuucccaag

SEQ ID NO: 18034 - RNA, 21 nt, Artificial Sequence
  Synthetic
cucugccucaguuucccaagu

SEQ ID NO: 18035 - RNA, 21 nt, Artificial Sequence
  Synthetic
ucugccucaguuucccaagua

SEQ ID NO: 18036 - RNA, 21 nt, Artificial Sequence
  Synthetic
cugccucaguuucccaaguag

SEQ ID NO: 18037 - RNA, 21 nt, Artificial Sequence
  Synthetic
ugccucaguuucccaaguagc

SEQ ID NO: 18038 - RNA, 21 nt, Artificial Sequence
  Synthetic
gccucaguuucccaaguagcu

SEQ ID NO: 18039 - RNA, 21 nt, Artificial Sequence
  Synthetic
ccucaguuucccaaguagcug

SEQ ID NO: 18040 - RNA, 21 nt, Artificial Sequence
  Synthetic
cucaguuucccaaguagcugg

SEQ ID NO: 18041 - RNA, 21 nt, Artificial Sequence
  Synthetic
ucaguuucccaaguagcuggg

SEQ ID NO: 18042 - RNA, 21 nt, Artificial Sequence
  Synthetic
caguuucccaaguagcuggga

SEQ ID NO: 18043 - RNA, 21 nt, Artificial Sequence
  Synthetic
aguuucccaaguagcugggac

SEQ ID NO: 18044 - RNA, 21 nt, Artificial Sequence
  Synthetic
guuucccaaguagcugggacu

SEQ ID NO: 18045 - RNA, 21 nt, Artificial Sequence
  Synthetic
uuucccaaguagcugggacua

SEQ ID NO: 18046 - RNA, 21 nt, Artificial Sequence
  Synthetic
uucccaaguagcugggacuac

SEQ ID NO: 18047 - RNA, 21 nt, Artificial Sequence
  Synthetic
ucccaaguagcugggacuaca

SEQ ID NO: 18048 - RNA, 21 nt, Artificial Sequence
  Synthetic
cccaaguagcugggacuacag

SEQ ID NO: 18049 - RNA, 21 nt, Artificial Sequence
  Synthetic
ccaaguagcugggacuacagg

SEQ ID NO: 18050 - RNA, 21 nt, Artificial Sequence
  Synthetic
caaguagcugggacuacaggc

SEQ ID NO: 18051 - RNA, 21 nt, Artificial Sequence
  Synthetic
aaguagcugggacuacaggca

SEQ ID NO: 18052 - RNA, 21 nt, Artificial Sequence
  Synthetic
aguagcugggacuacaggcac

SEQ ID NO: 18053 - RNA, 21 nt, Artificial Sequence
  Synthetic
guagcugggacuacaggcacg

SEQ ID NO: 18054 - RNA, 21 nt, Artificial Sequence
  Synthetic
uagcugggacuacaggcacgc

SEQ ID NO: 18055 - RNA, 21 nt, Artificial Sequence
  Synthetic
agcugggacuacaggcacgca

SEQ ID NO: 18056 - RNA, 21 nt, Artificial Sequence
  Synthetic
gcugggacuacaggcacgcac

SEQ ID NO: 18057 - RNA, 21 nt, Artificial Sequence
  Synthetic
cugggacuacaggcacgcacc

SEQ ID NO: 18058 - RNA, 21 nt, Artificial Sequence
  Synthetic
ugggacuacaggcacgcacca

SEQ ID NO: 18059 - RNA, 21 nt, Artificial Sequence
  Synthetic
gggacuacaggcacgcaccac

SEQ ID NO: 18060 - RNA, 21 nt, Artificial Sequence
  Synthetic
ggacuacaggcacgcaccacc

SEQ ID NO: 18061 - RNA, 21 nt, Artificial Sequence
  Synthetic
gacuacaggcacgcaccacca

SEQ ID NO: 18062 - RNA, 21 nt, Artificial Sequence
  Synthetic
acuacaggcacgcaccaccac

SEQ ID NO: 18063 - RNA, 21 nt, Artificial Sequence
  Synthetic
cuacaggcacgcaccaccacg

SEQ ID NO: 18064 - RNA, 21 nt, Artificial Sequence
  Synthetic
uacaggcacgcaccaccacgc

SEQ ID NO: 18065 - RNA, 21 nt, Artificial Sequence
  Synthetic
acaggcacgcaccaccacgcc

SEQ ID NO: 18066 - RNA, 21 nt, Artificial Sequence
  Synthetic
caggcacgcaccaccacgccu

SEQ ID NO: 18067 - RNA, 21 nt, Artificial Sequence
  Synthetic
aggcacgcaccaccacgccug

SEQ ID NO: 18068 - RNA, 21 nt, Artificial Sequence
  Synthetic
ggcacgcaccaccacgccugg

SEQ ID NO: 18069 - RNA, 21 nt, Artificial Sequence
  Synthetic
gcacgcaccaccacgccuggc

SEQ ID NO: 18070 - RNA, 21 nt, Artificial Sequence
  Synthetic
cacgcaccaccacgccuggcu

SEQ ID NO: 18071 - RNA, 21 nt, Artificial Sequence
  Synthetic
acgcaccaccacgccuggcua

SEQ ID NO: 18072 - RNA, 21 nt, Artificial Sequence
  Synthetic
cgcaccaccacgccuggcuau

SEQ ID NO: 18073 - RNA, 21 nt, Artificial Sequence
  Synthetic
gcaccaccacgccuggcuauu

SEQ ID NO: 18074 - RNA, 21 nt, Artificial Sequence
  Synthetic
caccaccacgccuggcuauuu

SEQ ID NO: 18075 - RNA, 21 nt, Artificial Sequence
  Synthetic
accaccacgccuggcuauuuu

SEQ ID NO: 18076 - RNA, 21 nt, Artificial Sequence
  Synthetic
ccaccacgccuggcuauuuuu

SEQ ID NO: 18077 - RNA, 21 nt, Artificial Sequence
  Synthetic
caccacgccuggcuauuuuuu

SEQ ID NO: 18078 - RNA, 21 nt, Artificial Sequence
  Synthetic
accacgccuggcuauuuuuuu

SEQ ID NO: 18079 - RNA, 21 nt, Artificial Sequence
  Synthetic
ccacgccuggcuauuuuuuua

SEQ ID NO: 18080 - RNA, 21 nt, Artificial Sequence
  Synthetic
cacgccuggcuauuuuuuuau

SEQ ID NO: 18081 - RNA, 21 nt, Artificial Sequence
  Synthetic
acgccuggcuauuuuuuuauu

SEQ ID NO: 18082 - RNA, 21 nt, Artificial Sequence
  Synthetic
cgccuggcuauuuuuuuauuu

SEQ ID NO: 18083 - RNA, 21 nt, Artificial Sequence
  Synthetic
gccuggcuauuuuuuuauuuu

SEQ ID NO: 18084 - RNA, 21 nt, Artificial Sequence
  Synthetic
ccuggcuauuuuuuuauuuuu

SEQ ID NO: 18085 - RNA, 21 nt, Artificial Sequence
  Synthetic
cuggcuauuuuuuuauuuuua

SEQ ID NO: 18086 - RNA, 21 nt, Artificial Sequence
  Synthetic
uggcuauuuuuuuauuuuuau

SEQ ID NO: 18087 - RNA, 21 nt, Artificial Sequence
  Synthetic
ggcuauuuuuuuauuuuuauu

SEQ ID NO: 18088 - RNA, 21 nt, Artificial Sequence
  Synthetic
gcuauuuuuuuauuuuuauuu

SEQ ID NO: 18089 - RNA, 21 nt, Artificial Sequence
  Synthetic
cuauuuuuuuauuuuuauuuu

SEQ ID NO: 18090 - RNA, 21 nt, Artificial Sequence
  Synthetic
uauuuuuuuauuuuuauuuuu

SEQ ID NO: 18091 - RNA, 21 nt, Artificial Sequence
  Synthetic
auuuuuuuauuuuuauuuuua

SEQ ID NO: 18092 - RNA, 21 nt, Artificial Sequence
  Synthetic
uuuuuuuauuuuuauuuuuag

SEQ ID NO: 18093 - RNA, 21 nt, Artificial Sequence
  Synthetic
uuuuuuauuuuuauuuuuagu

SEQ ID NO: 18094 - RNA, 21 nt, Artificial Sequence
  Synthetic
uuuuuauuuuuauuuuuagua

SEQ ID NO: 18095 - RNA, 21 nt, Artificial Sequence
  Synthetic
uuuuauuuuuauuuuuaguag

SEQ ID NO: 18096 - RNA, 21 nt, Artificial Sequence
  Synthetic
uuuauuuuuauuuuuaguaga

SEQ ID NO: 18097 - RNA, 21 nt, Artificial Sequence
  Synthetic
uuauuuuuauuuuuaguagag

SEQ ID NO: 18098 - RNA, 21 nt, Artificial Sequence
  Synthetic
uauuuuuauuuuuaguagaga

SEQ ID NO: 18099 - RNA, 21 nt, Artificial Sequence
  Synthetic
auuuuuauuuuuaguagagac

SEQ ID NO: 18100 - RNA, 21 nt, Artificial Sequence
  Synthetic
uuuuuauuuuuaguagagaca

SEQ ID NO: 18101 - RNA, 21 nt, Artificial Sequence
  Synthetic
uuuuauuuuuaguagagacag

SEQ ID NO: 18102 - RNA, 21 nt, Artificial Sequence
  Synthetic
uuuauuuuuaguagagacagg

SEQ ID NO: 18103 - RNA, 21 nt, Artificial Sequence
  Synthetic
uuauuuuuaguagagacaggg

SEQ ID NO: 18104 - RNA, 21 nt, Artificial Sequence
  Synthetic
uauuuuuaguagagacagggu

SEQ ID NO: 18105 - RNA, 21 nt, Artificial Sequence
  Synthetic
auuuuuaguagagacaggguu

SEQ ID NO: 18106 - RNA, 21 nt, Artificial Sequence
  Synthetic
uuuuuaguagagacaggguuu

SEQ ID NO: 18107 - RNA, 21 nt, Artificial Sequence
  Synthetic
uuuuaguagagacaggguuuc

SEQ ID NO: 18108 - RNA, 21 nt, Artificial Sequence
  Synthetic
uuuaguagagacaggguuuca

SEQ ID NO: 18109 - RNA, 21 nt, Artificial Sequence
  Synthetic
uuaguagagacaggguuucac

SEQ ID NO: 18110 - RNA, 21 nt, Artificial Sequence
  Synthetic
uaguagagacaggguuucacc

SEQ ID NO: 18111 - RNA, 21 nt, Artificial Sequence
  Synthetic
aguagagacaggguuucacca

SEQ ID NO: 18112 - RNA, 21 nt, Artificial Sequence
  Synthetic
guagagacaggguuucaccau

SEQ ID NO: 18113 - RNA, 21 nt, Artificial Sequence
  Synthetic
uagagacaggguuucaccaug

SEQ ID NO: 18114 - RNA, 21 nt, Artificial Sequence
  Synthetic
agagacaggguuucaccaugu

SEQ ID NO: 18115 - RNA, 21 nt, Artificial Sequence
  Synthetic
gagacaggguuucaccauguu

SEQ ID NO: 18116 - RNA, 21 nt, Artificial Sequence
  Synthetic
agacaggguuucaccauguug

SEQ ID NO: 18117 - RNA, 21 nt, Artificial Sequence
  Synthetic
gacaggguuucaccauguugg

SEQ ID NO: 18118 - RNA, 21 nt, Artificial Sequence
  Synthetic
acaggguuucaccauguuggc

SEQ ID NO: 18119 - RNA, 21 nt, Artificial Sequence
  Synthetic
caggguuucaccauguuggcc

SEQ ID NO: 18120 - RNA, 21 nt, Artificial Sequence
  Synthetic
aggguuucaccauguuggccg

SEQ ID NO: 18121 - RNA, 21 nt, Artificial Sequence
  Synthetic
ggguuucaccauguuggccgg

SEQ ID NO: 18122 - RNA, 21 nt, Artificial Sequence
  Synthetic
gguuucaccauguuggccggg

SEQ ID NO: 18123 - RNA, 21 nt, Artificial Sequence
  Synthetic
guuucaccauguuggccgggc

SEQ ID NO: 18124 - RNA, 21 nt, Artificial Sequence
  Synthetic
uuucaccauguuggccgggcu

SEQ ID NO: 18125 - RNA, 21 nt, Artificial Sequence
  Synthetic
uucaccauguuggccgggcug

SEQ ID NO: 18126 - RNA, 21 nt, Artificial Sequence
  Synthetic
ucaccauguuggccgggcugg

SEQ ID NO: 18127 - RNA, 21 nt, Artificial Sequence
  Synthetic
caccauguuggccgggcuggu

SEQ ID NO: 18128 - RNA, 21 nt, Artificial Sequence
  Synthetic
accauguuggccgggcugguc

SEQ ID NO: 18129 - RNA, 21 nt, Artificial Sequence
  Synthetic
ccauguuggccgggcuggucu

SEQ ID NO: 18130 - RNA, 21 nt, Artificial Sequence
  Synthetic
cauguuggccgggcuggucuu

SEQ ID NO: 18131 - RNA, 21 nt, Artificial Sequence
  Synthetic
auguuggccgggcuggucuug

SEQ ID NO: 18132 - RNA, 21 nt, Artificial Sequence
  Synthetic
uguuggccgggcuggucuuga

SEQ ID NO: 18133 - RNA, 21 nt, Artificial Sequence
  Synthetic
guuggccgggcuggucuugaa

SEQ ID NO: 18134 - RNA, 21 nt, Artificial Sequence
  Synthetic
uuggccgggcuggucuugaac

SEQ ID NO: 18135 - RNA, 21 nt, Artificial Sequence
  Synthetic
uggccgggcuggucuugaacu

SEQ ID NO: 18136 - RNA, 21 nt, Artificial Sequence
  Synthetic
ggccgggcuggucuugaacuc

SEQ ID NO: 18137 - RNA, 21 nt, Artificial Sequence
  Synthetic
gccgggcuggucuugaacucc

SEQ ID NO: 18138 - RNA, 21 nt, Artificial Sequence
  Synthetic
ccgggcuggucuugaacuccu

SEQ ID NO: 18139 - RNA, 21 nt, Artificial Sequence
  Synthetic
cgggcuggucuugaacuccug

SEQ ID NO: 18140 - RNA, 21 nt, Artificial Sequence
  Synthetic
gggcuggucuugaacuccuga

SEQ ID NO: 18141 - RNA, 21 nt, Artificial Sequence
  Synthetic
ggcuggucuugaacuccugac

SEQ ID NO: 18142 - RNA, 21 nt, Artificial Sequence
  Synthetic
gcuggucuugaacuccugacc

SEQ ID NO: 18143 - RNA, 21 nt, Artificial Sequence
  Synthetic
cuggucuugaacuccugaccu

SEQ ID NO: 18144 - RNA, 21 nt, Artificial Sequence
  Synthetic
uggucuugaacuccugaccuc

SEQ ID NO: 18145 - RNA, 21 nt, Artificial Sequence
  Synthetic
ggucuugaacuccugaccuca

SEQ ID NO: 18146 - RNA, 21 nt, Artificial Sequence
  Synthetic
gucuugaacuccugaccucaa

SEQ ID NO: 18147 - RNA, 21 nt, Artificial Sequence
  Synthetic
ucuugaacuccugaccucaag

SEQ ID NO: 18148 - RNA, 21 nt, Artificial Sequence
  Synthetic
cuugaacuccugaccucaagu

SEQ ID NO: 18149 - RNA, 21 nt, Artificial Sequence
  Synthetic
uugaacuccugaccucaagug

SEQ ID NO: 18150 - RNA, 21 nt, Artificial Sequence
  Synthetic
ugaacuccugaccucaaguga

SEQ ID NO: 18151 - RNA, 21 nt, Artificial Sequence
  Synthetic
gaacuccugaccucaagugau

SEQ ID NO: 18152 - RNA, 21 nt, Artificial Sequence
  Synthetic
aacuccugaccucaagugauc

SEQ ID NO: 18153 - RNA, 21 nt, Artificial Sequence
  Synthetic
acuccugaccucaagugaucu

SEQ ID NO: 18154 - RNA, 21 nt, Artificial Sequence
  Synthetic
cuccugaccucaagugaucug

SEQ ID NO: 18155 - RNA, 21 nt, Artificial Sequence
  Synthetic
uccugaccucaagugaucugc

SEQ ID NO: 18156 - RNA, 21 nt, Artificial Sequence
  Synthetic
ccugaccucaagugaucugcc

SEQ ID NO: 18157 - RNA, 21 nt, Artificial Sequence
  Synthetic
cugaccucaagugaucugccc

SEQ ID NO: 18158 - RNA, 21 nt, Artificial Sequence
  Synthetic
ugaccucaagugaucugccca

SEQ ID NO: 18159 - RNA, 21 nt, Artificial Sequence
  Synthetic
gaccucaagugaucugcccac

SEQ ID NO: 18160 - RNA, 21 nt, Artificial Sequence
  Synthetic
accucaagugaucugcccacc

SEQ ID NO: 18161 - RNA, 21 nt, Artificial Sequence
  Synthetic
ccucaagugaucugcccaccu

SEQ ID NO: 18162 - RNA, 21 nt, Artificial Sequence
  Synthetic
cucaagugaucugcccaccuc

SEQ ID NO: 18163 - RNA, 21 nt, Artificial Sequence
  Synthetic
ucaagugaucugcccaccuca

SEQ ID NO: 18164 - RNA, 21 nt, Artificial Sequence
  Synthetic
caagugaucugcccaccucag

SEQ ID NO: 18165 - RNA, 21 nt, Artificial Sequence
  Synthetic
aagugaucugcccaccucagc

SEQ ID NO: 18166 - RNA, 21 nt, Artificial Sequence
  Synthetic
agugaucugcccaccucagcc

SEQ ID NO: 18167 - RNA, 21 nt, Artificial Sequence
  Synthetic
gugaucugcccaccucagccu

SEQ ID NO: 18168 - RNA, 21 nt, Artificial Sequence
  Synthetic
ugaucugcccaccucagccuc

SEQ ID NO: 18169 - RNA, 21 nt, Artificial Sequence
  Synthetic
gaucugcccaccucagccucc

SEQ ID NO: 18170 - RNA, 21 nt, Artificial Sequence
  Synthetic
aucugcccaccucagccuccc

SEQ ID NO: 18171 - RNA, 21 nt, Artificial Sequence
  Synthetic
ucugcccaccucagccuccca

SEQ ID NO: 18172 - RNA, 21 nt, Artificial Sequence
  Synthetic
cugcccaccucagccucccaa

SEQ ID NO: 18173 - RNA, 21 nt, Artificial Sequence
  Synthetic
ugcccaccucagccucccaaa

SEQ ID NO: 18174 - RNA, 21 nt, Artificial Sequence
  Synthetic
gcccaccucagccucccaaag

SEQ ID NO: 18175 - RNA, 21 nt, Artificial Sequence
  Synthetic
cccaccucagccucccaaagu

SEQ ID NO: 18176 - RNA, 21 nt, Artificial Sequence
  Synthetic
ccaccucagccucccaaagug

SEQ ID NO: 18177 - RNA, 21 nt, Artificial Sequence
  Synthetic
caccucagccucccaaagugc

SEQ ID NO: 18178 - RNA, 21 nt, Artificial Sequence
  Synthetic
accucagccucccaaagugcu

SEQ ID NO: 18179 - RNA, 21 nt, Artificial Sequence
  Synthetic
ccucagccucccaaagugcug

SEQ ID NO: 18180 - RNA, 21 nt, Artificial Sequence
  Synthetic
cucagccucccaaagugcugg

SEQ ID NO: 18181 - RNA, 21 nt, Artificial Sequence
  Synthetic
ucagccucccaaagugcuggg

SEQ ID NO: 18182 - RNA, 21 nt, Artificial Sequence
  Synthetic
cagccucccaaagugcuggga

SEQ ID NO: 18183 - RNA, 21 nt, Artificial Sequence
  Synthetic
agccucccaaagugcugggau

SEQ ID NO: 18184 - RNA, 21 nt, Artificial Sequence
  Synthetic
gccucccaaagugcugggauu

SEQ ID NO: 18185 - RNA, 21 nt, Artificial Sequence
  Synthetic
ccucccaaagugcugggauua

SEQ ID NO: 18186 - RNA, 21 nt, Artificial Sequence
  Synthetic
cucccaaagugcugggauuac

SEQ ID NO: 18187 - RNA, 21 nt, Artificial Sequence
  Synthetic
ucccaaagugcugggauuaca

SEQ ID NO: 18188 - RNA, 21 nt, Artificial Sequence
  Synthetic
cccaaagugcugggauuacag

SEQ ID NO: 18189 - RNA, 21 nt, Artificial Sequence
  Synthetic
ccaaagugcugggauuacagg

SEQ ID NO: 18190 - RNA, 21 nt, Artificial Sequence
  Synthetic
caaagugcugggauuacaggc

SEQ ID NO: 18191 - RNA, 21 nt, Artificial Sequence
  Synthetic
aaagugcugggauuacaggcg

SEQ ID NO: 18192 - RNA, 21 nt, Artificial Sequence
  Synthetic
aagugcugggauuacaggcgu

SEQ ID NO: 18193 - RNA, 21 nt, Artificial Sequence
  Synthetic
agugcugggauuacaggcgug

SEQ ID NO: 18194 - RNA, 21 nt, Artificial Sequence
  Synthetic
gugcugggauuacaggcguga

SEQ ID NO: 18195 - RNA, 21 nt, Artificial Sequence
  Synthetic
ugcugggauuacaggcgugag

SEQ ID NO: 18196 - RNA, 21 nt, Artificial Sequence
  Synthetic
gcugggauuacaggcgugagc

SEQ ID NO: 18197 - RNA, 21 nt, Artificial Sequence
  Synthetic
cugggauuacaggcgugagcc

SEQ ID NO: 18198 - RNA, 21 nt, Artificial Sequence
  Synthetic
ugggauuacaggcgugagcca

SEQ ID NO: 18199 - RNA, 21 nt, Artificial Sequence
  Synthetic
gggauuacaggcgugagccac

SEQ ID NO: 18200 - RNA, 21 nt, Artificial Sequence
  Synthetic
ggauuacaggcgugagccacu

SEQ ID NO: 18201 - RNA, 21 nt, Artificial Sequence
  Synthetic
gauuacaggcgugagccacug

SEQ ID NO: 18202 - RNA, 21 nt, Artificial Sequence
  Synthetic
auuacaggcgugagccacugc

SEQ ID NO: 18203 - RNA, 21 nt, Artificial Sequence
  Synthetic
uuacaggcgugagccacugcg

SEQ ID NO: 18204 - RNA, 21 nt, Artificial Sequence
  Synthetic
uacaggcgugagccacugcgc

SEQ ID NO: 18205 - RNA, 21 nt, Artificial Sequence
  Synthetic
acaggcgugagccacugcgcc

SEQ ID NO: 18206 - RNA, 21 nt, Artificial Sequence
  Synthetic
caggcgugagccacugcgccc

SEQ ID NO: 18207 - RNA, 21 nt, Artificial Sequence
  Synthetic
aggcgugagccacugcgcccc

SEQ ID NO: 18208 - RNA, 21 nt, Artificial Sequence
  Synthetic
ggcgugagccacugcgccccg

SEQ ID NO: 18209 - RNA, 21 nt, Artificial Sequence
  Synthetic
gcgugagccacugcgccccgc

SEQ ID NO: 18210 - RNA, 21 nt, Artificial Sequence
  Synthetic
cgugagccacugcgccccgcc

SEQ ID NO: 18211 - RNA, 21 nt, Artificial Sequence
  Synthetic
gugagccacugcgccccgccc

SEQ ID NO: 18212 - RNA, 21 nt, Artificial Sequence
  Synthetic
ugagccacugcgccccgccca

SEQ ID NO: 18213 - RNA, 21 nt, Artificial Sequence
  Synthetic
gagccacugcgccccgcccac

SEQ ID NO: 18214 - RNA, 21 nt, Artificial Sequence
  Synthetic
agccacugcgccccgcccacu

SEQ ID NO: 18215 - RNA, 21 nt, Artificial Sequence
  Synthetic
gccacugcgccccgcccacug

SEQ ID NO: 18216 - RNA, 21 nt, Artificial Sequence
  Synthetic
ccacugcgccccgcccacugu

SEQ ID NO: 18217 - RNA, 21 nt, Artificial Sequence
  Synthetic
cacugcgccccgcccacuguc

SEQ ID NO: 18218 - RNA, 21 nt, Artificial Sequence
  Synthetic
acugcgccccgcccacugucu

SEQ ID NO: 18219 - RNA, 21 nt, Artificial Sequence
  Synthetic
cugcgccccgcccacugucuu

SEQ ID NO: 18220 - RNA, 21 nt, Artificial Sequence
  Synthetic
ugcgccccgcccacugucuuu

SEQ ID NO: 18221 - RNA, 21 nt, Artificial Sequence
  Synthetic
gcgccccgcccacugucuuuu

SEQ ID NO: 18222 - RNA, 21 nt, Artificial Sequence
  Synthetic
cgccccgcccacugucuuuuu

SEQ ID NO: 18223 - RNA, 21 nt, Artificial Sequence
  Synthetic
gccccgcccacugucuuuuuu

SEQ ID NO: 18224 - RNA, 21 nt, Artificial Sequence
  Synthetic
ccccgcccacugucuuuuuuu

SEQ ID NO: 18225 - RNA, 21 nt, Artificial Sequence
  Synthetic
cccgcccacugucuuuuuuuu

SEQ ID NO: 18226 - RNA, 21 nt, Artificial Sequence
  Synthetic
ccgcccacugucuuuuuuuuu

SEQ ID NO: 18227 - RNA, 21 nt, Artificial Sequence
  Synthetic
cgcccacugucuuuuuuuuuu

SEQ ID NO: 18228 - RNA, 21 nt, Artificial Sequence
  Synthetic
gcccacugucuuuuuuuuuuu

SEQ ID NO: 18229 - RNA, 21 nt, Artificial Sequence
  Synthetic
cccacugucuuuuuuuuuuuu

SEQ ID NO: 18230 - RNA, 21 nt, Artificial Sequence
  Synthetic
ccacugucuuuuuuuuuuuuu

SEQ ID NO: 18231 - RNA, 21 nt, Artificial Sequence
  Synthetic
cacugucuuuuuuuuuuuuuu

SEQ ID NO: 18232 - RNA, 21 nt, Artificial Sequence
  Synthetic
acugucuuuuuuuuuuuuuua

SEQ ID NO: 18233 - RNA, 21 nt, Artificial Sequence
  Synthetic
cugucuuuuuuuuuuuuuuaa

SEQ ID NO: 18234 - RNA, 21 nt, Artificial Sequence
  Synthetic
ugucuuuuuuuuuuuuuuaaa

SEQ ID NO: 18235 - RNA, 21 nt, Artificial Sequence
  Synthetic
gucuuuuuuuuuuuuuuaaag

SEQ ID NO: 18236 - RNA, 21 nt, Artificial Sequence
  Synthetic
ucuuuuuuuuuuuuuuaaagg

SEQ ID NO: 18237 - RNA, 21 nt, Artificial Sequence
  Synthetic
cuuuuuuuuuuuuuuaaagga

SEQ ID NO: 18238 - RNA, 21 nt, Artificial Sequence
  Synthetic
uuuuuuuuuuuuuuaaaggac

SEQ ID NO: 18239 - RNA, 21 nt, Artificial Sequence
  Synthetic
uuuuuuuuuuuuuaaaggacc

SEQ ID NO: 18240 - RNA, 21 nt, Artificial Sequence
  Synthetic
uuuuuuuuuuuuaaaggaccu

SEQ ID NO: 18241 - RNA, 21 nt, Artificial Sequence
  Synthetic
uuuuuuuuuuuaaaggaccuc

SEQ ID NO: 18242 - RNA, 21 nt, Artificial Sequence
  Synthetic
uuuuuuuuuuaaaggaccuca

SEQ ID NO: 18243 - RNA, 21 nt, Artificial Sequence
  Synthetic
uuuuuuuuuaaaggaccucag

SEQ ID NO: 18244 - RNA, 21 nt, Artificial Sequence
  Synthetic
uuuuuuuuaaaggaccucagg

SEQ ID NO: 18245 - RNA, 21 nt, Artificial Sequence
  Synthetic
uuuuuuuaaaggaccucaggu

SEQ ID NO: 18246 - RNA, 21 nt, Artificial Sequence
  Synthetic
uuuuuuaaaggaccucaggug

SEQ ID NO: 18247 - RNA, 21 nt, Artificial Sequence
  Synthetic
uuuuuaaaggaccucagguga

SEQ ID NO: 18248 - RNA, 21 nt, Artificial Sequence
  Synthetic
uuuuaaaggaccucaggugau

SEQ ID NO: 18249 - RNA, 21 nt, Artificial Sequence
  Synthetic
uuuaaaggaccucaggugauu

SEQ ID NO: 18250 - RNA, 21 nt, Artificial Sequence
  Synthetic
uuaaaggaccucaggugauuc

SEQ ID NO: 18251 - RNA, 21 nt, Artificial Sequence
  Synthetic
uaaaggaccucaggugauucu

SEQ ID NO: 18252 - RNA, 21 nt, Artificial Sequence
  Synthetic
aaaggaccucaggugauucug

SEQ ID NO: 18253 - RNA, 21 nt, Artificial Sequence
  Synthetic
aaggaccucaggugauucuga

SEQ ID NO: 18254 - RNA, 21 nt, Artificial Sequence
  Synthetic
aggaccucaggugauucugau

SEQ ID NO: 18255 - RNA, 21 nt, Artificial Sequence
  Synthetic
ggaccucaggugauucugaug

SEQ ID NO: 18256 - RNA, 21 nt, Artificial Sequence
  Synthetic
gaccucaggugauucugaugc

SEQ ID NO: 18257 - RNA, 21 nt, Artificial Sequence
  Synthetic
accucaggugauucugaugca

SEQ ID NO: 18258 - RNA, 21 nt, Artificial Sequence
  Synthetic
ccucaggugauucugaugcac

SEQ ID NO: 18259 - RNA, 21 nt, Artificial Sequence
  Synthetic
cucaggugauucugaugcaca

SEQ ID NO: 18260 - RNA, 21 nt, Artificial Sequence
  Synthetic
ucaggugauucugaugcacag

SEQ ID NO: 18261 - RNA, 21 nt, Artificial Sequence
  Synthetic
caggugauucugaugcacagc

SEQ ID NO: 18262 - RNA, 21 nt, Artificial Sequence
  Synthetic
aggugauucugaugcacagcu

SEQ ID NO: 18263 - RNA, 21 nt, Artificial Sequence
  Synthetic
ggugauucugaugcacagcuc

SEQ ID NO: 18264 - RNA, 21 nt, Artificial Sequence
  Synthetic
gugauucugaugcacagcuca

SEQ ID NO: 18265 - RNA, 21 nt, Artificial Sequence
  Synthetic
ugauucugaugcacagcucag

SEQ ID NO: 18266 - RNA, 21 nt, Artificial Sequence
  Synthetic
gauucugaugcacagcucagg

SEQ ID NO: 18267 - RNA, 21 nt, Artificial Sequence
  Synthetic
auucugaugcacagcucaggu

SEQ ID NO: 18268 - RNA, 21 nt, Artificial Sequence
  Synthetic
uucugaugcacagcucagguu

SEQ ID NO: 18269 - RNA, 21 nt, Artificial Sequence
  Synthetic
ucugaugcacagcucagguug

SEQ ID NO: 18270 - RNA, 21 nt, Artificial Sequence
  Synthetic
cugaugcacagcucagguuga

SEQ ID NO: 18271 - RNA, 21 nt, Artificial Sequence
  Synthetic
ugaugcacagcucagguugaa

SEQ ID NO: 18272 - RNA, 21 nt, Artificial Sequence
  Synthetic
gaugcacagcucagguugaaa

SEQ ID NO: 18273 - RNA, 21 nt, Artificial Sequence
  Synthetic
augcacagcucagguugaaag

SEQ ID NO: 18274 - RNA, 21 nt, Artificial Sequence
  Synthetic
ugcacagcucagguugaaagc

SEQ ID NO: 18275 - RNA, 21 nt, Artificial Sequence
  Synthetic
gcacagcucagguugaaagca

SEQ ID NO: 18276 - RNA, 21 nt, Artificial Sequence
  Synthetic
cacagcucagguugaaagcac

SEQ ID NO: 18277 - RNA, 21 nt, Artificial Sequence
  Synthetic
acagcucagguugaaagcacu

SEQ ID NO: 18278 - RNA, 21 nt, Artificial Sequence
  Synthetic
cagcucagguugaaagcacug

SEQ ID NO: 18279 - RNA, 21 nt, Artificial Sequence
  Synthetic
agcucagguugaaagcacuga

SEQ ID NO: 18280 - RNA, 21 nt, Artificial Sequence
  Synthetic
gcucagguugaaagcacugaa

SEQ ID NO: 18281 - RNA, 21 nt, Artificial Sequence
  Synthetic
cucagguugaaagcacugaac

SEQ ID NO: 18282 - RNA, 21 nt, Artificial Sequence
  Synthetic
ucagguugaaagcacugaacu

SEQ ID NO: 18283 - RNA, 21 nt, Artificial Sequence
  Synthetic
cagguugaaagcacugaacua

SEQ ID NO: 18284 - RNA, 21 nt, Artificial Sequence
  Synthetic
agguugaaagcacugaacuaa

SEQ ID NO: 18285 - RNA, 21 nt, Artificial Sequence
  Synthetic
gguugaaagcacugaacuaaa

SEQ ID NO: 18286 - RNA, 21 nt, Artificial Sequence
  Synthetic
guugaaagcacugaacuaaag

SEQ ID NO: 18287 - RNA, 21 nt, Artificial Sequence
  Synthetic
uugaaagcacugaacuaaagg

SEQ ID NO: 18288 - RNA, 21 nt, Artificial Sequence
  Synthetic
ugaaagcacugaacuaaagga

SEQ ID NO: 18289 - RNA, 21 nt, Artificial Sequence
  Synthetic
gaaagcacugaacuaaaggaa

SEQ ID NO: 18290 - RNA, 21 nt, Artificial Sequence
  Synthetic
aaagcacugaacuaaaggaag

SEQ ID NO: 18291 - RNA, 21 nt, Artificial Sequence
  Synthetic
aagcacugaacuaaaggaagg

SEQ ID NO: 18292 - RNA, 21 nt, Artificial Sequence
  Synthetic
agcacugaacuaaaggaagga

SEQ ID NO: 18293 - RNA, 21 nt, Artificial Sequence
  Synthetic
gcacugaacuaaaggaaggag

SEQ ID NO: 18294 - RNA, 21 nt, Artificial Sequence
  Synthetic
cacugaacuaaaggaaggagc

SEQ ID NO: 18295 - RNA, 21 nt, Artificial Sequence
  Synthetic
acugaacuaaaggaaggagcc

SEQ ID NO: 18296 - RNA, 21 nt, Artificial Sequence
  Synthetic
cugaacuaaaggaaggagccu

SEQ ID NO: 18297 - RNA, 21 nt, Artificial Sequence
  Synthetic
ugaacuaaaggaaggagccuu

SEQ ID NO: 18298 - RNA, 21 nt, Artificial Sequence
  Synthetic
gaacuaaaggaaggagccuuu

SEQ ID NO: 18299 - RNA, 21 nt, Artificial Sequence
  Synthetic
aacuaaaggaaggagccuuuu

SEQ ID NO: 18300 - RNA, 21 nt, Artificial Sequence
  Synthetic
acuaaaggaaggagccuuuug

SEQ ID NO: 18301 - RNA, 21 nt, Artificial Sequence
  Synthetic
cuaaaggaaggagccuuuuga

SEQ ID NO: 18302 - RNA, 21 nt, Artificial Sequence
  Synthetic
uaaaggaaggagccuuuugau

SEQ ID NO: 18303 - RNA, 21 nt, Artificial Sequence
  Synthetic
aaaggaaggagccuuuugaua

SEQ ID NO: 18304 - RNA, 21 nt, Artificial Sequence
  Synthetic
aaggaaggagccuuuugauau

SEQ ID NO: 18305 - RNA, 21 nt, Artificial Sequence
  Synthetic
aggaaggagccuuuugauaug

SEQ ID NO: 18306 - RNA, 21 nt, Artificial Sequence
  Synthetic
ggaaggagccuuuugauaugc

SEQ ID NO: 18307 - RNA, 21 nt, Artificial Sequence
  Synthetic
gaaggagccuuuugauaugca

SEQ ID NO: 18308 - RNA, 21 nt, Artificial Sequence
  Synthetic
aaggagccuuuugauaugcau

SEQ ID NO: 18309 - RNA, 21 nt, Artificial Sequence
  Synthetic
aggagccuuuugauaugcauu

SEQ ID NO: 18310 - RNA, 21 nt, Artificial Sequence
  Synthetic
ggagccuuuugauaugcauuc

SEQ ID NO: 18311 - RNA, 21 nt, Artificial Sequence
  Synthetic
gagccuuuugauaugcauuca

SEQ ID NO: 18312 - RNA, 21 nt, Artificial Sequence
  Synthetic
agccuuuugauaugcauucag

SEQ ID NO: 18313 - RNA, 21 nt, Artificial Sequence
  Synthetic
gccuuuugauaugcauucagg

SEQ ID NO: 18314 - RNA, 21 nt, Artificial Sequence
  Synthetic
ccuuuugauaugcauucagga

SEQ ID NO: 18315 - RNA, 21 nt, Artificial Sequence
  Synthetic
cuuuugauaugcauucaggaa

SEQ ID NO: 18316 - RNA, 21 nt, Artificial Sequence
  Synthetic
uuuugauaugcauucaggaag

SEQ ID NO: 18317 - RNA, 21 nt, Artificial Sequence
  Synthetic
uuugauaugcauucaggaagc

SEQ ID NO: 18318 - RNA, 21 nt, Artificial Sequence
  Synthetic
uugauaugcauucaggaagca

SEQ ID NO: 18319 - RNA, 21 nt, Artificial Sequence
  Synthetic
ugauaugcauucaggaagcag

SEQ ID NO: 18320 - RNA, 21 nt, Artificial Sequence
  Synthetic
gauaugcauucaggaagcagc

SEQ ID NO: 18321 - RNA, 21 nt, Artificial Sequence
  Synthetic
auaugcauucaggaagcagcc

SEQ ID NO: 18322 - RNA, 21 nt, Artificial Sequence
  Synthetic
uaugcauucaggaagcagcca

SEQ ID NO: 18323 - RNA, 21 nt, Artificial Sequence
  Synthetic
augcauucaggaagcagccaa

SEQ ID NO: 18324 - RNA, 21 nt, Artificial Sequence
  Synthetic
ugcauucaggaagcagccaac

SEQ ID NO: 18325 - RNA, 21 nt, Artificial Sequence
  Synthetic
gcauucaggaagcagccaacc

SEQ ID NO: 18326 - RNA, 21 nt, Artificial Sequence
  Synthetic
cauucaggaagcagccaaccu

SEQ ID NO: 18327 - RNA, 21 nt, Artificial Sequence
  Synthetic
auucaggaagcagccaaccua

SEQ ID NO: 18328 - RNA, 21 nt, Artificial Sequence
  Synthetic
uucaggaagcagccaaccuaa

SEQ ID NO: 18329 - RNA, 21 nt, Artificial Sequence
  Synthetic
ucaggaagcagccaaccuaau

SEQ ID NO: 18330 - RNA, 21 nt, Artificial Sequence
  Synthetic
caggaagcagccaaccuaaug

SEQ ID NO: 18331 - RNA, 21 nt, Artificial Sequence
  Synthetic
aggaagcagccaaccuaaugc

SEQ ID NO: 18332 - RNA, 21 nt, Artificial Sequence
  Synthetic
ggaagcagccaaccuaaugca

SEQ ID NO: 18333 - RNA, 21 nt, Artificial Sequence
  Synthetic
gaagcagccaaccuaaugcaa

SEQ ID NO: 18334 - RNA, 21 nt, Artificial Sequence
  Synthetic
aagcagccaaccuaaugcaau

SEQ ID NO: 18335 - RNA, 21 nt, Artificial Sequence
  Synthetic
agcagccaaccuaaugcaauc

SEQ ID NO: 18336 - RNA, 21 nt, Artificial Sequence
  Synthetic
gcagccaaccuaaugcaauca

SEQ ID NO: 18337 - RNA, 21 nt, Artificial Sequence
  Synthetic
cagccaaccuaaugcaaucaa

SEQ ID NO: 18338 - RNA, 21 nt, Artificial Sequence
  Synthetic
agccaaccuaaugcaaucaag

SEQ ID NO: 18339 - RNA, 21 nt, Artificial Sequence
  Synthetic
gccaaccuaaugcaaucaaga

SEQ ID NO: 18340 - RNA, 21 nt, Artificial Sequence
  Synthetic
ccaaccuaaugcaaucaagaa

SEQ ID NO: 18341 - RNA, 21 nt, Artificial Sequence
  Synthetic
caaccuaaugcaaucaagaag

SEQ ID NO: 18342 - RNA, 21 nt, Artificial Sequence
  Synthetic
aaccuaaugcaaucaagaaga

SEQ ID NO: 18343 - RNA, 21 nt, Artificial Sequence
  Synthetic
accuaaugcaaucaagaagag

SEQ ID NO: 18344 - RNA, 21 nt, Artificial Sequence
  Synthetic
ccuaaugcaaucaagaagaga

SEQ ID NO: 18345 - RNA, 21 nt, Artificial Sequence
  Synthetic
cuaaugcaaucaagaagagau

SEQ ID NO: 18346 - RNA, 21 nt, Artificial Sequence
  Synthetic
uaaugcaaucaagaagagaua

SEQ ID NO: 18347 - RNA, 21 nt, Artificial Sequence
  Synthetic
aaugcaaucaagaagagauag

SEQ ID NO: 18348 - RNA, 21 nt, Artificial Sequence
  Synthetic
augcaaucaagaagagauagu

SEQ ID NO: 18349 - RNA, 21 nt, Artificial Sequence
  Synthetic
ugcaaucaagaagagauaguu

SEQ ID NO: 18350 - RNA, 21 nt, Artificial Sequence
  Synthetic
gcaaucaagaagagauaguuc

SEQ ID NO: 18351 - RNA, 21 nt, Artificial Sequence
  Synthetic
caaucaagaagagauaguucc

SEQ ID NO: 18352 - RNA, 21 nt, Artificial Sequence
  Synthetic
aaucaagaagagauaguuccu

SEQ ID NO: 18353 - RNA, 21 nt, Artificial Sequence
  Synthetic
aucaagaagagauaguuccua

SEQ ID NO: 18354 - RNA, 21 nt, Artificial Sequence
  Synthetic
ucaagaagagauaguuccuaa

SEQ ID NO: 18355 - RNA, 21 nt, Artificial Sequence
  Synthetic
caagaagagauaguuccuaac

SEQ ID NO: 18356 - RNA, 21 nt, Artificial Sequence
  Synthetic
aagaagagauaguuccuaacu

SEQ ID NO: 18357 - RNA, 21 nt, Artificial Sequence
  Synthetic
agaagagauaguuccuaacug

SEQ ID NO: 18358 - RNA, 21 nt, Artificial Sequence
  Synthetic
gaagagauaguuccuaacugu

SEQ ID NO: 18359 - RNA, 21 nt, Artificial Sequence
  Synthetic
aagagauaguuccuaacuguc

SEQ ID NO: 18360 - RNA, 21 nt, Artificial Sequence
  Synthetic
agagauaguuccuaacuguca

SEQ ID NO: 18361 - RNA, 21 nt, Artificial Sequence
  Synthetic
gagauaguuccuaacugucag

SEQ ID NO: 18362 - RNA, 21 nt, Artificial Sequence
  Synthetic
agauaguuccuaacugucagc

SEQ ID NO: 18363 - RNA, 21 nt, Artificial Sequence
  Synthetic
gauaguuccuaacugucagcc

SEQ ID NO: 18364 - RNA, 21 nt, Artificial Sequence
  Synthetic
auaguuccuaacugucagccu

SEQ ID NO: 18365 - RNA, 21 nt, Artificial Sequence
  Synthetic
uaguuccuaacugucagccuu

SEQ ID NO: 18366 - RNA, 21 nt, Artificial Sequence
  Synthetic
aguuccuaacugucagccuug

SEQ ID NO: 18367 - RNA, 21 nt, Artificial Sequence
  Synthetic
guuccuaacugucagccuugu

SEQ ID NO: 18368 - RNA, 21 nt, Artificial Sequence
  Synthetic
uuccuaacugucagccuugug

SEQ ID NO: 18369 - RNA, 21 nt, Artificial Sequence
  Synthetic
uccuaacugucagccuugugg

SEQ ID NO: 18370 - RNA, 21 nt, Artificial Sequence
  Synthetic
ccuaacugucagccuuguggc

SEQ ID NO: 18371 - RNA, 21 nt, Artificial Sequence
  Synthetic
cuaacugucagccuuguggcu

SEQ ID NO: 18372 - RNA, 21 nt, Artificial Sequence
  Synthetic
uaacugucagccuuguggcua

SEQ ID NO: 18373 - RNA, 21 nt, Artificial Sequence
  Synthetic
aacugucagccuuguggcuaa

SEQ ID NO: 18374 - RNA, 21 nt, Artificial Sequence
  Synthetic
acugucagccuuguggcuaag

SEQ ID NO: 18375 - RNA, 21 nt, Artificial Sequence
  Synthetic
cugucagccuuguggcuaagu

SEQ ID NO: 18376 - RNA, 21 nt, Artificial Sequence
  Synthetic
ugucagccuuguggcuaagug

SEQ ID NO: 18377 - RNA, 21 nt, Artificial Sequence
  Synthetic
gucagccuuguggcuaaguga

SEQ ID NO: 18378 - RNA, 21 nt, Artificial Sequence
  Synthetic
ucagccuuguggcuaagugag

SEQ ID NO: 18379 - RNA, 21 nt, Artificial Sequence
  Synthetic
cagccuuguggcuaagugagg

SEQ ID NO: 18380 - RNA, 21 nt, Artificial Sequence
  Synthetic
agccuuguggcuaagugagga

SEQ ID NO: 18381 - RNA, 21 nt, Artificial Sequence
  Synthetic
gccuuguggcuaagugaggaa

SEQ ID NO: 18382 - RNA, 21 nt, Artificial Sequence
  Synthetic
ccuuguggcuaagugaggaag

SEQ ID NO: 18383 - RNA, 21 nt, Artificial Sequence
  Synthetic
cuuguggcuaagugaggaaga

SEQ ID NO: 18384 - RNA, 21 nt, Artificial Sequence
  Synthetic
uuguggcuaagugaggaagag

SEQ ID NO: 18385 - RNA, 21 nt, Artificial Sequence
  Synthetic
uguggcuaagugaggaagaga

SEQ ID NO: 18386 - RNA, 21 nt, Artificial Sequence
  Synthetic
guggcuaagugaggaagagau

SEQ ID NO: 18387 - RNA, 21 nt, Artificial Sequence
  Synthetic
uggcuaagugaggaagagaua

SEQ ID NO: 18388 - RNA, 21 nt, Artificial Sequence
  Synthetic
ggcuaagugaggaagagauaa

SEQ ID NO: 18389 - RNA, 21 nt, Artificial Sequence
  Synthetic
gcuaagugaggaagagauaau

SEQ ID NO: 18390 - RNA, 21 nt, Artificial Sequence
  Synthetic
cuaagugaggaagagauaauu

SEQ ID NO: 18391 - RNA, 21 nt, Artificial Sequence
  Synthetic
uaagugaggaagagauaauuu

SEQ ID NO: 18392 - RNA, 21 nt, Artificial Sequence
  Synthetic
aagugaggaagagauaauuug

SEQ ID NO: 18393 - RNA, 21 nt, Artificial Sequence
  Synthetic
agugaggaagagauaauuugg

SEQ ID NO: 18394 - RNA, 21 nt, Artificial Sequence
  Synthetic
gugaggaagagauaauuuggc

SEQ ID NO: 18395 - RNA, 21 nt, Artificial Sequence
  Synthetic
ugaggaagagauaauuuggca

SEQ ID NO: 18396 - RNA, 21 nt, Artificial Sequence
  Synthetic
gaggaagagauaauuuggcaa

SEQ ID NO: 18397 - RNA, 21 nt, Artificial Sequence
  Synthetic
aggaagagauaauuuggcaaa

SEQ ID NO: 18398 - RNA, 21 nt, Artificial Sequence
  Synthetic
ggaagagauaauuuggcaaac

SEQ ID NO: 18399 - RNA, 21 nt, Artificial Sequence
  Synthetic
gaagagauaauuuggcaaacc

SEQ ID NO: 18400 - RNA, 21 nt, Artificial Sequence
  Synthetic
aagagauaauuuggcaaacca

SEQ ID NO: 18401 - RNA, 21 nt, Artificial Sequence
  Synthetic
agagauaauuuggcaaaccau

SEQ ID NO: 18402 - RNA, 21 nt, Artificial Sequence
  Synthetic
gagauaauuuggcaaaccaug

SEQ ID NO: 18403 - RNA, 21 nt, Artificial Sequence
  Synthetic
agauaauuuggcaaaccaugg

SEQ ID NO: 18404 - RNA, 21 nt, Artificial Sequence
  Synthetic
gauaauuuggcaaaccaugga

SEQ ID NO: 18405 - RNA, 21 nt, Artificial Sequence
  Synthetic
auaauuuggcaaaccauggag

SEQ ID NO: 18406 - RNA, 21 nt, Artificial Sequence
  Synthetic
uaauuuggcaaaccauggaga

SEQ ID NO: 18407 - RNA, 21 nt, Artificial Sequence
  Synthetic
aauuuggcaaaccauggagac

SEQ ID NO: 18408 - RNA, 21 nt, Artificial Sequence
  Synthetic
auuuggcaaaccauggagacc

SEQ ID NO: 18409 - RNA, 21 nt, Artificial Sequence
  Synthetic
uuuggcaaaccauggagaccc

SEQ ID NO: 18410 - RNA, 21 nt, Artificial Sequence
  Synthetic
uuggcaaaccauggagacccc

SEQ ID NO: 18411 - RNA, 21 nt, Artificial Sequence
  Synthetic
uggcaaaccauggagacccca

SEQ ID NO: 18412 - RNA, 21 nt, Artificial Sequence
  Synthetic
ggcaaaccauggagaccccac

SEQ ID NO: 18413 - RNA, 21 nt, Artificial Sequence
  Synthetic
gcaaaccauggagaccccaca

SEQ ID NO: 18414 - RNA, 21 nt, Artificial Sequence
  Synthetic
caaaccauggagaccccacac

SEQ ID NO: 18415 - RNA, 21 nt, Artificial Sequence
  Synthetic
aaaccauggagaccccacaca

SEQ ID NO: 18416 - RNA, 21 nt, Artificial Sequence
  Synthetic
aaccauggagaccccacacaa

SEQ ID NO: 18417 - RNA, 21 nt, Artificial Sequence
  Synthetic
accauggagaccccacacaac

SEQ ID NO: 18418 - RNA, 21 nt, Artificial Sequence
  Synthetic
ccauggagaccccacacaaca

SEQ ID NO: 18419 - RNA, 21 nt, Artificial Sequence
  Synthetic
cauggagaccccacacaacac

SEQ ID NO: 18420 - RNA, 21 nt, Artificial Sequence
  Synthetic
auggagaccccacacaacaca

SEQ ID NO: 18421 - RNA, 21 nt, Artificial Sequence
  Synthetic
uggagaccccacacaacacac

SEQ ID NO: 18422 - RNA, 21 nt, Artificial Sequence
  Synthetic
ggagaccccacacaacacaca

SEQ ID NO: 18423 - RNA, 21 nt, Artificial Sequence
  Synthetic
gagaccccacacaacacacag

SEQ ID NO: 18424 - RNA, 21 nt, Artificial Sequence
  Synthetic
agaccccacacaacacacaga

SEQ ID NO: 18425 - RNA, 21 nt, Artificial Sequence
  Synthetic
gaccccacacaacacacagag

SEQ ID NO: 18426 - RNA, 21 nt, Artificial Sequence
  Synthetic
accccacacaacacacagagc

SEQ ID NO: 18427 - RNA, 21 nt, Artificial Sequence
  Synthetic
ccccacacaacacacagagcu

SEQ ID NO: 18428 - RNA, 21 nt, Artificial Sequence
  Synthetic
cccacacaacacacagagcug

SEQ ID NO: 18429 - RNA, 21 nt, Artificial Sequence
  Synthetic
ccacacaacacacagagcugu

SEQ ID NO: 18430 - RNA, 21 nt, Artificial Sequence
  Synthetic
cacacaacacacagagcugua

SEQ ID NO: 18431 - RNA, 21 nt, Artificial Sequence
  Synthetic
acacaacacacagagcuguaa

SEQ ID NO: 18432 - RNA, 21 nt, Artificial Sequence
  Synthetic
cacaacacacagagcuguaau

SEQ ID NO: 18433 - RNA, 21 nt, Artificial Sequence
  Synthetic
acaacacacagagcuguaauc

SEQ ID NO: 18434 - RNA, 21 nt, Artificial Sequence
  Synthetic
caacacacagagcuguaaucu

SEQ ID NO: 18435 - RNA, 21 nt, Artificial Sequence
  Synthetic
aacacacagagcuguaaucua

SEQ ID NO: 18436 - RNA, 21 nt, Artificial Sequence
  Synthetic
acacacagagcuguaaucuag

SEQ ID NO: 18437 - RNA, 21 nt, Artificial Sequence
  Synthetic
cacacagagcuguaaucuaga

SEQ ID NO: 18438 - RNA, 21 nt, Artificial Sequence
  Synthetic
acacagagcuguaaucuagag

SEQ ID NO: 18439 - RNA, 21 nt, Artificial Sequence
  Synthetic
cacagagcuguaaucuagagc

SEQ ID NO: 18440 - RNA, 21 nt, Artificial Sequence
  Synthetic
acagagcuguaaucuagagca

SEQ ID NO: 18441 - RNA, 21 nt, Artificial Sequence
  Synthetic
cagagcuguaaucuagagcaa

SEQ ID NO: 18442 - RNA, 21 nt, Artificial Sequence
  Synthetic
agagcuguaaucuagagcaag

SEQ ID NO: 18443 - RNA, 21 nt, Artificial Sequence
  Synthetic
gagcuguaaucuagagcaagg

SEQ ID NO: 18444 - RNA, 21 nt, Artificial Sequence
  Synthetic
agcuguaaucuagagcaagga

SEQ ID NO: 18445 - RNA, 21 nt, Artificial Sequence
  Synthetic
gcuguaaucuagagcaaggag

SEQ ID NO: 18446 - RNA, 21 nt, Artificial Sequence
  Synthetic
cuguaaucuagagcaaggaga

SEQ ID NO: 18447 - RNA, 21 nt, Artificial Sequence
  Synthetic
uguaaucuagagcaaggagac

SEQ ID NO: 18448 - RNA, 21 nt, Artificial Sequence
  Synthetic
guaaucuagagcaaggagaca

SEQ ID NO: 18449 - RNA, 21 nt, Artificial Sequence
  Synthetic
uaaucuagagcaaggagacag

SEQ ID NO: 18450 - RNA, 21 nt, Artificial Sequence
  Synthetic
aaucuagagcaaggagacaga

SEQ ID NO: 18451 - RNA, 21 nt, Artificial Sequence
  Synthetic
aucuagagcaaggagacagac

SEQ ID NO: 18452 - RNA, 21 nt, Artificial Sequence
  Synthetic
ucuagagcaaggagacagaca

SEQ ID NO: 18453 - RNA, 21 nt, Artificial Sequence
  Synthetic
cuagagcaaggagacagacaa

SEQ ID NO: 18454 - RNA, 21 nt, Artificial Sequence
  Synthetic
uagagcaaggagacagacaac

SEQ ID NO: 18455 - RNA, 21 nt, Artificial Sequence
  Synthetic
agagcaaggagacagacaacu

SEQ ID NO: 18456 - RNA, 21 nt, Artificial Sequence
  Synthetic
gagcaaggagacagacaacuc

SEQ ID NO: 18457 - RNA, 21 nt, Artificial Sequence
  Synthetic
agcaaggagacagacaacucc

SEQ ID NO: 18458 - RNA, 21 nt, Artificial Sequence
  Synthetic
gcaaggagacagacaacuccc

SEQ ID NO: 18459 - RNA, 21 nt, Artificial Sequence
  Synthetic
caaggagacagacaacuccca

SEQ ID NO: 18460 - RNA, 21 nt, Artificial Sequence
  Synthetic
aaggagacagacaacucccaa

SEQ ID NO: 18461 - RNA, 21 nt, Artificial Sequence
  Synthetic
aggagacagacaacucccaaa

SEQ ID NO: 18462 - RNA, 21 nt, Artificial Sequence
  Synthetic
ggagacagacaacucccaaac

SEQ ID NO: 18463 - RNA, 21 nt, Artificial Sequence
  Synthetic
gagacagacaacucccaaacc

SEQ ID NO: 18464 - RNA, 21 nt, Artificial Sequence
  Synthetic
agacagacaacucccaaaccu

SEQ ID NO: 18465 - RNA, 21 nt, Artificial Sequence
  Synthetic
gacagacaacucccaaaccua

SEQ ID NO: 18466 - RNA, 21 nt, Artificial Sequence
  Synthetic
acagacaacucccaaaccuac

SEQ ID NO: 18467 - RNA, 21 nt, Artificial Sequence
  Synthetic
cagacaacucccaaaccuaca

SEQ ID NO: 18468 - RNA, 21 nt, Artificial Sequence
  Synthetic
agacaacucccaaaccuacag

SEQ ID NO: 18469 - RNA, 21 nt, Artificial Sequence
  Synthetic
gacaacucccaaaccuacagu

SEQ ID NO: 18470 - RNA, 21 nt, Artificial Sequence
  Synthetic
acaacucccaaaccuacaguc

SEQ ID NO: 18471 - RNA, 21 nt, Artificial Sequence
  Synthetic
caacucccaaaccuacaguca

SEQ ID NO: 18472 - RNA, 21 nt, Artificial Sequence
  Synthetic
aacucccaaaccuacagucag

SEQ ID NO: 18473 - RNA, 21 nt, Artificial Sequence
  Synthetic
acucccaaaccuacagucagc

SEQ ID NO: 18474 - RNA, 21 nt, Artificial Sequence
  Synthetic
cucccaaaccuacagucagcu

SEQ ID NO: 18475 - RNA, 21 nt, Artificial Sequence
  Synthetic
ucccaaaccuacagucagcuc

SEQ ID NO: 18476 - RNA, 21 nt, Artificial Sequence
  Synthetic
cccaaaccuacagucagcucc

SEQ ID NO: 18477 - RNA, 21 nt, Artificial Sequence
  Synthetic
ccaaaccuacagucagcucca

SEQ ID NO: 18478 - RNA, 21 nt, Artificial Sequence
  Synthetic
caaaccuacagucagcuccaa

SEQ ID NO: 18479 - RNA, 21 nt, Artificial Sequence
  Synthetic
aaaccuacagucagcuccaag

SEQ ID NO: 18480 - RNA, 21 nt, Artificial Sequence
  Synthetic
aaccuacagucagcuccaaga

SEQ ID NO: 18481 - RNA, 21 nt, Artificial Sequence
  Synthetic
accuacagucagcuccaagag

SEQ ID NO: 18482 - RNA, 21 nt, Artificial Sequence
  Synthetic
ccuacagucagcuccaagagc

SEQ ID NO: 18483 - RNA, 21 nt, Artificial Sequence
  Synthetic
cuacagucagcuccaagagcc

SEQ ID NO: 18484 - RNA, 21 nt, Artificial Sequence
  Synthetic
uacagucagcuccaagagccc

SEQ ID NO: 18485 - RNA, 21 nt, Artificial Sequence
  Synthetic
acagucagcuccaagagcccu

SEQ ID NO: 18486 - RNA, 21 nt, Artificial Sequence
  Synthetic
cagucagcuccaagagcccua

SEQ ID NO: 18487 - RNA, 21 nt, Artificial Sequence
  Synthetic
agucagcuccaagagcccuag

SEQ ID NO: 18488 - RNA, 21 nt, Artificial Sequence
  Synthetic
gucagcuccaagagcccuagc

SEQ ID NO: 18489 - RNA, 21 nt, Artificial Sequence
  Synthetic
ucagcuccaagagcccuagca

SEQ ID NO: 18490 - RNA, 21 nt, Artificial Sequence
  Synthetic
cagcuccaagagcccuagcac

SEQ ID NO: 18491 - RNA, 21 nt, Artificial Sequence
  Synthetic
agcuccaagagcccuagcacc

SEQ ID NO: 18492 - RNA, 21 nt, Artificial Sequence
  Synthetic
gcuccaagagcccuagcaccu

SEQ ID NO: 18493 - RNA, 21 nt, Artificial Sequence
  Synthetic
cuccaagagcccuagcaccuu

SEQ ID NO: 18494 - RNA, 21 nt, Artificial Sequence
  Synthetic
uccaagagcccuagcaccuuu

SEQ ID NO: 18495 - RNA, 21 nt, Artificial Sequence
  Synthetic
ccaagagcccuagcaccuuuc

SEQ ID NO: 18496 - RNA, 21 nt, Artificial Sequence
  Synthetic
caagagcccuagcaccuuuca

SEQ ID NO: 18497 - RNA, 21 nt, Artificial Sequence
  Synthetic
aagagcccuagcaccuuucau

SEQ ID NO: 18498 - RNA, 21 nt, Artificial Sequence
  Synthetic
agagcccuagcaccuuucaug

SEQ ID NO: 18499 - RNA, 21 nt, Artificial Sequence
  Synthetic
gagcccuagcaccuuucaugu

SEQ ID NO: 18500 - RNA, 21 nt, Artificial Sequence
  Synthetic
agcccuagcaccuuucaugug

SEQ ID NO: 18501 - RNA, 21 nt, Artificial Sequence
  Synthetic
gcccuagcaccuuucaugugc

SEQ ID NO: 18502 - RNA, 21 nt, Artificial Sequence
  Synthetic
cccuagcaccuuucaugugcu

SEQ ID NO: 18503 - RNA, 21 nt, Artificial Sequence
  Synthetic
ccuagcaccuuucaugugcuu

SEQ ID NO: 18504 - RNA, 21 nt, Artificial Sequence
  Synthetic
cuagcaccuuucaugugcuuu

SEQ ID NO: 18505 - RNA, 21 nt, Artificial Sequence
  Synthetic
uagcaccuuucaugugcuuuu

SEQ ID NO: 18506 - RNA, 21 nt, Artificial Sequence
  Synthetic
agcaccuuucaugugcuuuuc

SEQ ID NO: 18507 - RNA, 21 nt, Artificial Sequence
  Synthetic
gcaccuuucaugugcuuuucc

SEQ ID NO: 18508 - RNA, 21 nt, Artificial Sequence
  Synthetic
caccuuucaugugcuuuuccu

SEQ ID NO: 18509 - RNA, 21 nt, Artificial Sequence
  Synthetic
accuuucaugugcuuuuccug

SEQ ID NO: 18510 - RNA, 21 nt, Artificial Sequence
  Synthetic
ccuuucaugugcuuuuccuga

SEQ ID NO: 18511 - RNA, 21 nt, Artificial Sequence
  Synthetic
cuuucaugugcuuuuccugaa

SEQ ID NO: 18512 - RNA, 21 nt, Artificial Sequence
  Synthetic
uuucaugugcuuuuccugaaa

SEQ ID NO: 18513 - RNA, 21 nt, Artificial Sequence
  Synthetic
uucaugugcuuuuccugaaag

SEQ ID NO: 18514 - RNA, 21 nt, Artificial Sequence
  Synthetic
ucaugugcuuuuccugaaagc

SEQ ID NO: 18515 - RNA, 21 nt, Artificial Sequence
  Synthetic
caugugcuuuuccugaaagcu

SEQ ID NO: 18516 - RNA, 21 nt, Artificial Sequence
  Synthetic
augugcuuuuccugaaagcug

SEQ ID NO: 18517 - RNA, 21 nt, Artificial Sequence
  Synthetic
ugugcuuuuccugaaagcuga

SEQ ID NO: 18518 - RNA, 21 nt, Artificial Sequence
  Synthetic
gugcuuuuccugaaagcugau

SEQ ID NO: 18519 - RNA, 21 nt, Artificial Sequence
  Synthetic
ugcuuuuccugaaagcugaug

SEQ ID NO: 18520 - RNA, 21 nt, Artificial Sequence
  Synthetic
gcuuuuccugaaagcugaugu

SEQ ID NO: 18521 - RNA, 21 nt, Artificial Sequence
  Synthetic
cuuuuccugaaagcugaugug

SEQ ID NO: 18522 - RNA, 21 nt, Artificial Sequence
  Synthetic
uuuuccugaaagcugaugugu

SEQ ID NO: 18523 - RNA, 21 nt, Artificial Sequence
  Synthetic
uuuccugaaagcugaugugug

SEQ ID NO: 18524 - RNA, 21 nt, Artificial Sequence
  Synthetic
uuccugaaagcugaugugugc

SEQ ID NO: 18525 - RNA, 21 nt, Artificial Sequence
  Synthetic
uccugaaagcugaugugugcc

SEQ ID NO: 18526 - RNA, 21 nt, Artificial Sequence
  Synthetic
ccugaaagcugaugugugcca

SEQ ID NO: 18527 - RNA, 21 nt, Artificial Sequence
  Synthetic
cugaaagcugaugugugccau

SEQ ID NO: 18528 - RNA, 21 nt, Artificial Sequence
  Synthetic
ugaaagcugaugugugccauc

SEQ ID NO: 18529 - RNA, 21 nt, Artificial Sequence
  Synthetic
gaaagcugaugugugccaucc

SEQ ID NO: 18530 - RNA, 21 nt, Artificial Sequence
  Synthetic
aaagcugaugugugccaucca

SEQ ID NO: 18531 - RNA, 21 nt, Artificial Sequence
  Synthetic
aagcugaugugugccauccau

SEQ ID NO: 18532 - RNA, 21 nt, Artificial Sequence
  Synthetic
agcugaugugugccauccaua

SEQ ID NO: 18533 - RNA, 21 nt, Artificial Sequence
  Synthetic
gcugaugugugccauccauaa

SEQ ID NO: 18534 - RNA, 21 nt, Artificial Sequence
  Synthetic
cugaugugugccauccauaaa

SEQ ID NO: 18535 - RNA, 21 nt, Artificial Sequence
  Synthetic
ugaugugugccauccauaaag

SEQ ID NO: 18536 - RNA, 21 nt, Artificial Sequence
  Synthetic
gaugugugccauccauaaaga

SEQ ID NO: 18537 - RNA, 21 nt, Artificial Sequence
  Synthetic
augugugccauccauaaagau

SEQ ID NO: 18538 - RNA, 21 nt, Artificial Sequence
  Synthetic
ugugugccauccauaaagauc

SEQ ID NO: 18539 - RNA, 21 nt, Artificial Sequence
  Synthetic
gugugccauccauaaagauca

SEQ ID NO: 18540 - RNA, 21 nt, Artificial Sequence
  Synthetic
ugugccauccauaaagaucac

SEQ ID NO: 18541 - RNA, 21 nt, Artificial Sequence
  Synthetic
gugccauccauaaagaucaca

SEQ ID NO: 18542 - RNA, 21 nt, Artificial Sequence
  Synthetic
ugccauccauaaagaucacag

SEQ ID NO: 18543 - RNA, 21 nt, Artificial Sequence
  Synthetic
gccauccauaaagaucacagc

SEQ ID NO: 18544 - RNA, 21 nt, Artificial Sequence
  Synthetic
ccauccauaaagaucacagcu

SEQ ID NO: 18545 - RNA, 21 nt, Artificial Sequence
  Synthetic
cauccauaaagaucacagcug

SEQ ID NO: 18546 - RNA, 21 nt, Artificial Sequence
  Synthetic
auccauaaagaucacagcugg

SEQ ID NO: 18547 - RNA, 21 nt, Artificial Sequence
  Synthetic
uccauaaagaucacagcuggg

SEQ ID NO: 18548 - RNA, 21 nt, Artificial Sequence
  Synthetic
ccauaaagaucacagcugggc

SEQ ID NO: 18549 - RNA, 21 nt, Artificial Sequence
  Synthetic
cauaaagaucacagcugggcc

SEQ ID NO: 18550 - RNA, 21 nt, Artificial Sequence
  Synthetic
auaaagaucacagcugggccc

SEQ ID NO: 18551 - RNA, 21 nt, Artificial Sequence
  Synthetic
uaaagaucacagcugggccca

SEQ ID NO: 18552 - RNA, 21 nt, Artificial Sequence
  Synthetic
aaagaucacagcugggcccac

SEQ ID NO: 18553 - RNA, 21 nt, Artificial Sequence
  Synthetic
aagaucacagcugggcccacc

SEQ ID NO: 18554 - RNA, 21 nt, Artificial Sequence
  Synthetic
agaucacagcugggcccacca

SEQ ID NO: 18555 - RNA, 21 nt, Artificial Sequence
  Synthetic
gaucacagcugggcccaccaa

SEQ ID NO: 18556 - RNA, 21 nt, Artificial Sequence
  Synthetic
aucacagcugggcccaccaag

SEQ ID NO: 18557 - RNA, 21 nt, Artificial Sequence
  Synthetic
ucacagcugggcccaccaaga

SEQ ID NO: 18558 - RNA, 21 nt, Artificial Sequence
  Synthetic
cacagcugggcccaccaagag

SEQ ID NO: 18559 - RNA, 21 nt, Artificial Sequence
  Synthetic
acagcugggcccaccaagagg

SEQ ID NO: 18560 - RNA, 21 nt, Artificial Sequence
  Synthetic
cagcugggcccaccaagagga

SEQ ID NO: 18561 - RNA, 21 nt, Artificial Sequence
  Synthetic
agcugggcccaccaagaggaa

SEQ ID NO: 18562 - RNA, 21 nt, Artificial Sequence
  Synthetic
gcugggcccaccaagaggaag

SEQ ID NO: 18563 - RNA, 21 nt, Artificial Sequence
  Synthetic
cugggcccaccaagaggaagc

SEQ ID NO: 18564 - RNA, 21 nt, Artificial Sequence
  Synthetic
ugggcccaccaagaggaagcu

SEQ ID NO: 18565 - RNA, 21 nt, Artificial Sequence
  Synthetic
gggcccaccaagaggaagcug

SEQ ID NO: 18566 - RNA, 21 nt, Artificial Sequence
  Synthetic
ggcccaccaagaggaagcugu

SEQ ID NO: 18567 - RNA, 21 nt, Artificial Sequence
  Synthetic
gcccaccaagaggaagcugug

SEQ ID NO: 18568 - RNA, 21 nt, Artificial Sequence
  Synthetic
cccaccaagaggaagcugugc

SEQ ID NO: 18569 - RNA, 21 nt, Artificial Sequence
  Synthetic
ccaccaagaggaagcugugca

SEQ ID NO: 18570 - RNA, 21 nt, Artificial Sequence
  Synthetic
caccaagaggaagcugugcag

SEQ ID NO: 18571 - RNA, 21 nt, Artificial Sequence
  Synthetic
accaagaggaagcugugcaga

SEQ ID NO: 18572 - RNA, 21 nt, Artificial Sequence
  Synthetic
ccaagaggaagcugugcagag

SEQ ID NO: 18573 - RNA, 21 nt, Artificial Sequence
  Synthetic
caagaggaagcugugcagaga

SEQ ID NO: 18574 - RNA, 21 nt, Artificial Sequence
  Synthetic
aagaggaagcugugcagagau

SEQ ID NO: 18575 - RNA, 21 nt, Artificial Sequence
  Synthetic
agaggaagcugugcagagaua

SEQ ID NO: 18576 - RNA, 21 nt, Artificial Sequence
  Synthetic
gaggaagcugugcagagauaa

SEQ ID NO: 18577 - RNA, 21 nt, Artificial Sequence
  Synthetic
aggaagcugugcagagauaau

SEQ ID NO: 18578 - RNA, 21 nt, Artificial Sequence
  Synthetic
ggaagcugugcagagauaaug

SEQ ID NO: 18579 - RNA, 21 nt, Artificial Sequence
  Synthetic
gaagcugugcagagauaaugc

SEQ ID NO: 18580 - RNA, 21 nt, Artificial Sequence
  Synthetic
aagcugugcagagauaaugca

SEQ ID NO: 18581 - RNA, 21 nt, Artificial Sequence
  Synthetic
agcugugcagagauaaugcag

SEQ ID NO: 18582 - RNA, 21 nt, Artificial Sequence
  Synthetic
gcugugcagagauaaugcagc

SEQ ID NO: 18583 - RNA, 21 nt, Artificial Sequence
  Synthetic
cugugcagagauaaugcagcc

SEQ ID NO: 18584 - RNA, 21 nt, Artificial Sequence
  Synthetic
ugugcagagauaaugcagccc

SEQ ID NO: 18585 - RNA, 21 nt, Artificial Sequence
  Synthetic
gugcagagauaaugcagcccu

SEQ ID NO: 18586 - RNA, 21 nt, Artificial Sequence
  Synthetic
ugcagagauaaugcagcccuc

SEQ ID NO: 18587 - RNA, 21 nt, Artificial Sequence
  Synthetic
gcagagauaaugcagcccuca

SEQ ID NO: 18588 - RNA, 21 nt, Artificial Sequence
  Synthetic
cagagauaaugcagcccucac

SEQ ID NO: 18589 - RNA, 21 nt, Artificial Sequence
  Synthetic
agagauaaugcagcccucaca

SEQ ID NO: 18590 - RNA, 21 nt, Artificial Sequence
  Synthetic
gagauaaugcagcccucacag

SEQ ID NO: 18591 - RNA, 21 nt, Artificial Sequence
  Synthetic
agauaaugcagcccucacagc

SEQ ID NO: 18592 - RNA, 21 nt, Artificial Sequence
  Synthetic
gauaaugcagcccucacagcc

SEQ ID NO: 18593 - RNA, 21 nt, Artificial Sequence
  Synthetic
auaaugcagcccucacagcca

SEQ ID NO: 18594 - RNA, 21 nt, Artificial Sequence
  Synthetic
uaaugcagcccucacagccac

SEQ ID NO: 18595 - RNA, 21 nt, Artificial Sequence
  Synthetic
aaugcagcccucacagccacu

SEQ ID NO: 18596 - RNA, 21 nt, Artificial Sequence
  Synthetic
augcagcccucacagccacuu

SEQ ID NO: 18597 - RNA, 21 nt, Artificial Sequence
  Synthetic
ugcagcccucacagccacuuc

SEQ ID NO: 18598 - RNA, 21 nt, Artificial Sequence
  Synthetic
gcagcccucacagccacuucc

SEQ ID NO: 18599 - RNA, 21 nt, Artificial Sequence
  Synthetic
cagcccucacagccacuuccg

SEQ ID NO: 18600 - RNA, 21 nt, Artificial Sequence
  Synthetic
agcccucacagccacuuccgg

SEQ ID NO: 18601 - RNA, 21 nt, Artificial Sequence
  Synthetic
gcccucacagccacuuccgga

SEQ ID NO: 18602 - RNA, 21 nt, Artificial Sequence
  Synthetic
cccucacagccacuuccggag

SEQ ID NO: 18603 - RNA, 21 nt, Artificial Sequence
  Synthetic
ccucacagccacuuccggaga

SEQ ID NO: 18604 - RNA, 21 nt, Artificial Sequence
  Synthetic
cucacagccacuuccggagac

SEQ ID NO: 18605 - RNA, 21 nt, Artificial Sequence
  Synthetic
ucacagccacuuccggagacu

SEQ ID NO: 18606 - RNA, 21 nt, Artificial Sequence
  Synthetic
cacagccacuuccggagacua

SEQ ID NO: 18607 - RNA, 21 nt, Artificial Sequence
  Synthetic
acagccacuuccggagacuac

SEQ ID NO: 18608 - RNA, 21 nt, Artificial Sequence
  Synthetic
cagccacuuccggagacuaca

SEQ ID NO: 18609 - RNA, 21 nt, Artificial Sequence
  Synthetic
agccacuuccggagacuacac

SEQ ID NO: 18610 - RNA, 21 nt, Artificial Sequence
  Synthetic
gccacuuccggagacuacaca

SEQ ID NO: 18611 - RNA, 21 nt, Artificial Sequence
  Synthetic
ccacuuccggagacuacacag

SEQ ID NO: 18612 - RNA, 21 nt, Artificial Sequence
  Synthetic
cacuuccggagacuacacaga

SEQ ID NO: 18613 - RNA, 21 nt, Artificial Sequence
  Synthetic
acuuccggagacuacacagag

SEQ ID NO: 18614 - RNA, 21 nt, Artificial Sequence
  Synthetic
cuuccggagacuacacagaga

SEQ ID NO: 18615 - RNA, 21 nt, Artificial Sequence
  Synthetic
uuccggagacuacacagagau

SEQ ID NO: 18616 - RNA, 21 nt, Artificial Sequence
  Synthetic
uccggagacuacacagagauu

SEQ ID NO: 18617 - RNA, 21 nt, Artificial Sequence
  Synthetic
ccggagacuacacagagauuc

SEQ ID NO: 18618 - RNA, 21 nt, Artificial Sequence
  Synthetic
cggagacuacacagagauucu

SEQ ID NO: 18619 - RNA, 21 nt, Artificial Sequence
  Synthetic
ggagacuacacagagauucua

SEQ ID NO: 18620 - RNA, 21 nt, Artificial Sequence
  Synthetic
gagacuacacagagauucuag

SEQ ID NO: 18621 - RNA, 21 nt, Artificial Sequence
  Synthetic
agacuacacagagauucuagu

SEQ ID NO: 18622 - RNA, 21 nt, Artificial Sequence
  Synthetic
gacuacacagagauucuagug

SEQ ID NO: 18623 - RNA, 21 nt, Artificial Sequence
  Synthetic
acuacacagagauucuagugg

SEQ ID NO: 18624 - RNA, 21 nt, Artificial Sequence
  Synthetic
cuacacagagauucuaguggu

SEQ ID NO: 18625 - RNA, 21 nt, Artificial Sequence
  Synthetic
uacacagagauucuagugguu

SEQ ID NO: 18626 - RNA, 21 nt, Artificial Sequence
  Synthetic
acacagagauucuagugguuu

SEQ ID NO: 18627 - RNA, 21 nt, Artificial Sequence
  Synthetic
cacagagauucuagugguuuc

SEQ ID NO: 18628 - RNA, 21 nt, Artificial Sequence
  Synthetic
acagagauucuagugguuucc

SEQ ID NO: 18629 - RNA, 21 nt, Artificial Sequence
  Synthetic
cagagauucuagugguuucca

SEQ ID NO: 18630 - RNA, 21 nt, Artificial Sequence
  Synthetic
agagauucuagugguuuccac

SEQ ID NO: 18631 - RNA, 21 nt, Artificial Sequence
  Synthetic
gagauucuagugguuuccacu

SEQ ID NO: 18632 - RNA, 21 nt, Artificial Sequence
  Synthetic
agauucuagugguuuccacuu

SEQ ID NO: 18633 - RNA, 21 nt, Artificial Sequence
  Synthetic
gauucuagugguuuccacuua

SEQ ID NO: 18634 - RNA, 21 nt, Artificial Sequence
  Synthetic
auucuagugguuuccacuuaa

SEQ ID NO: 18635 - RNA, 21 nt, Artificial Sequence
  Synthetic
uucuagugguuuccacuuaaa

SEQ ID NO: 18636 - RNA, 21 nt, Artificial Sequence
  Synthetic
ucuagugguuuccacuuaaaa

SEQ ID NO: 18637 - RNA, 21 nt, Artificial Sequence
  Synthetic
cuagugguuuccacuuaaaac

SEQ ID NO: 18638 - RNA, 21 nt, Artificial Sequence
  Synthetic
uagugguuuccacuuaaaacg

SEQ ID NO: 18639 - RNA, 21 nt, Artificial Sequence
  Synthetic
agugguuuccacuuaaaacgc

SEQ ID NO: 18640 - RNA, 21 nt, Artificial Sequence
  Synthetic
gugguuuccacuuaaaacgcu

SEQ ID NO: 18641 - RNA, 21 nt, Artificial Sequence
  Synthetic
ugguuuccacuuaaaacgcuc

SEQ ID NO: 18642 - RNA, 21 nt, Artificial Sequence
  Synthetic
gguuuccacuuaaaacgcucc

SEQ ID NO: 18643 - RNA, 21 nt, Artificial Sequence
  Synthetic
guuuccacuuaaaacgcucca

SEQ ID NO: 18644 - RNA, 21 nt, Artificial Sequence
  Synthetic
uuuccacuuaaaacgcuccag

SEQ ID NO: 18645 - RNA, 21 nt, Artificial Sequence
  Synthetic
uuccacuuaaaacgcuccagu

SEQ ID NO: 18646 - RNA, 21 nt, Artificial Sequence
  Synthetic
uccacuuaaaacgcuccagug

SEQ ID NO: 18647 - RNA, 21 nt, Artificial Sequence
  Synthetic
ccacuuaaaacgcuccagugc

SEQ ID NO: 18648 - RNA, 21 nt, Artificial Sequence
  Synthetic
cacuuaaaacgcuccagugca

SEQ ID NO: 18649 - RNA, 21 nt, Artificial Sequence
  Synthetic
acuuaaaacgcuccagugcau

SEQ ID NO: 18650 - RNA, 21 nt, Artificial Sequence
  Synthetic
cuuaaaacgcuccagugcauu

SEQ ID NO: 18651 - RNA, 21 nt, Artificial Sequence
  Synthetic
uuaaaacgcuccagugcauug

SEQ ID NO: 18652 - RNA, 21 nt, Artificial Sequence
  Synthetic
uaaaacgcuccagugcauugg

SEQ ID NO: 18653 - RNA, 21 nt, Artificial Sequence
  Synthetic
aaaacgcuccagugcauugga

SEQ ID NO: 18654 - RNA, 21 nt, Artificial Sequence
  Synthetic
aaacgcuccagugcauuggag

SEQ ID NO: 18655 - RNA, 21 nt, Artificial Sequence
  Synthetic
aacgcuccagugcauuggaga

SEQ ID NO: 18656 - RNA, 21 nt, Artificial Sequence
  Synthetic
acgcuccagugcauuggagag

SEQ ID NO: 18657 - RNA, 21 nt, Artificial Sequence
  Synthetic
cgcuccagugcauuggagagg

SEQ ID NO: 18658 - RNA, 21 nt, Artificial Sequence
  Synthetic
gcuccagugcauuggagaggc

SEQ ID NO: 18659 - RNA, 21 nt, Artificial Sequence
  Synthetic
cuccagugcauuggagaggca

SEQ ID NO: 18660 - RNA, 21 nt, Artificial Sequence
  Synthetic
uccagugcauuggagaggcau

SEQ ID NO: 18661 - RNA, 21 nt, Artificial Sequence
  Synthetic
ccagugcauuggagaggcauu

SEQ ID NO: 18662 - RNA, 21 nt, Artificial Sequence
  Synthetic
cagugcauuggagaggcauuu

SEQ ID NO: 18663 - RNA, 21 nt, Artificial Sequence
  Synthetic
agugcauuggagaggcauuug

SEQ ID NO: 18664 - RNA, 21 nt, Artificial Sequence
  Synthetic
gugcauuggagaggcauuugc

SEQ ID NO: 18665 - RNA, 21 nt, Artificial Sequence
  Synthetic
ugcauuggagaggcauuugcc

SEQ ID NO: 18666 - RNA, 21 nt, Artificial Sequence
  Synthetic
gcauuggagaggcauuugccg

SEQ ID NO: 18667 - RNA, 21 nt, Artificial Sequence
  Synthetic
cauuggagaggcauuugccgg

SEQ ID NO: 18668 - RNA, 21 nt, Artificial Sequence
  Synthetic
auuggagaggcauuugccggg

SEQ ID NO: 18669 - RNA, 21 nt, Artificial Sequence
  Synthetic
uuggagaggcauuugccgggc

SEQ ID NO: 18670 - RNA, 21 nt, Artificial Sequence
  Synthetic
uggagaggcauuugccgggca

SEQ ID NO: 18671 - RNA, 21 nt, Artificial Sequence
  Synthetic
ggagaggcauuugccgggcau

SEQ ID NO: 18672 - RNA, 21 nt, Artificial Sequence
  Synthetic
gagaggcauuugccgggcaug

SEQ ID NO: 18673 - RNA, 21 nt, Artificial Sequence
  Synthetic
agaggcauuugccgggcaugc

SEQ ID NO: 18674 - RNA, 21 nt, Artificial Sequence
  Synthetic
gaggcauuugccgggcaugca

SEQ ID NO: 18675 - RNA, 21 nt, Artificial Sequence
  Synthetic
aggcauuugccgggcaugcac

SEQ ID NO: 18676 - RNA, 21 nt, Artificial Sequence
  Synthetic
ggcauuugccgggcaugcacg

SEQ ID NO: 18677 - RNA, 21 nt, Artificial Sequence
  Synthetic
gcauuugccgggcaugcacgc

SEQ ID NO: 18678 - RNA, 21 nt, Artificial Sequence
  Synthetic
cauuugccgggcaugcacgcu

SEQ ID NO: 18679 - RNA, 21 nt, Artificial Sequence
  Synthetic
auuugccgggcaugcacgcuu

SEQ ID NO: 18680 - RNA, 21 nt, Artificial Sequence
  Synthetic
uuugccgggcaugcacgcuug

SEQ ID NO: 18681 - RNA, 21 nt, Artificial Sequence
  Synthetic
uugccgggcaugcacgcuugu

SEQ ID NO: 18682 - RNA, 21 nt, Artificial Sequence
  Synthetic
ugccgggcaugcacgcuugua

SEQ ID NO: 18683 - RNA, 21 nt, Artificial Sequence
  Synthetic
gccgggcaugcacgcuuguag

SEQ ID NO: 18684 - RNA, 21 nt, Artificial Sequence
  Synthetic
ccgggcaugcacgcuuguaga

SEQ ID NO: 18685 - RNA, 21 nt, Artificial Sequence
  Synthetic
cgggcaugcacgcuuguagau

SEQ ID NO: 18686 - RNA, 21 nt, Artificial Sequence
  Synthetic
gggcaugcacgcuuguagauu

SEQ ID NO: 18687 - RNA, 21 nt, Artificial Sequence
  Synthetic
ggcaugcacgcuuguagauuu

SEQ ID NO: 18688 - RNA, 21 nt, Artificial Sequence
  Synthetic
gcaugcacgcuuguagauuuc

SEQ ID NO: 18689 - RNA, 21 nt, Artificial Sequence
  Synthetic
caugcacgcuuguagauuuca

SEQ ID NO: 18690 - RNA, 21 nt, Artificial Sequence
  Synthetic
augcacgcuuguagauuucac

SEQ ID NO: 18691 - RNA, 21 nt, Artificial Sequence
  Synthetic
ugcacgcuuguagauuucaca

SEQ ID NO: 18692 - RNA, 21 nt, Artificial Sequence
  Synthetic
gcacgcuuguagauuucacau

SEQ ID NO: 18693 - RNA, 21 nt, Artificial Sequence
  Synthetic
cacgcuuguagauuucacauc

SEQ ID NO: 18694 - RNA, 21 nt, Artificial Sequence
  Synthetic
acgcuuguagauuucacaucc

SEQ ID NO: 18695 - RNA, 21 nt, Artificial Sequence
  Synthetic
cgcuuguagauuucacauccc

SEQ ID NO: 18696 - RNA, 21 nt, Artificial Sequence
  Synthetic
gcuuguagauuucacauccca

SEQ ID NO: 18697 - RNA, 21 nt, Artificial Sequence
  Synthetic
cuuguagauuucacaucccau

SEQ ID NO: 18698 - RNA, 21 nt, Artificial Sequence
  Synthetic
uuguagauuucacaucccaug

SEQ ID NO: 18699 - RNA, 21 nt, Artificial Sequence
  Synthetic
uguagauuucacaucccauga

SEQ ID NO: 18700 - RNA, 21 nt, Artificial Sequence
  Synthetic
guagauuucacaucccaugag

SEQ ID NO: 18701 - RNA, 21 nt, Artificial Sequence
  Synthetic
uagauuucacaucccaugagu

SEQ ID NO: 18702 - RNA, 21 nt, Artificial Sequence
  Synthetic
agauuucacaucccaugagug

SEQ ID NO: 18703 - RNA, 21 nt, Artificial Sequence
  Synthetic
gauuucacaucccaugagugu

SEQ ID NO: 18704 - RNA, 21 nt, Artificial Sequence
  Synthetic
auuucacaucccaugagugug

SEQ ID NO: 18705 - RNA, 21 nt, Artificial Sequence
  Synthetic
uuucacaucccaugagugugg

SEQ ID NO: 18706 - RNA, 21 nt, Artificial Sequence
  Synthetic
uucacaucccaugagugugga

SEQ ID NO: 18707 - RNA, 21 nt, Artificial Sequence
  Synthetic
ucacaucccaugaguguggag

SEQ ID NO: 18708 - RNA, 21 nt, Artificial Sequence
  Synthetic
cacaucccaugaguguggagc

SEQ ID NO: 18709 - RNA, 21 nt, Artificial Sequence
  Synthetic
acaucccaugaguguggagcu

SEQ ID NO: 18710 - RNA, 21 nt, Artificial Sequence
  Synthetic
caucccaugaguguggagcua

SEQ ID NO: 18711 - RNA, 21 nt, Artificial Sequence
  Synthetic
aucccaugaguguggagcuac

SEQ ID NO: 18712 - RNA, 21 nt, Artificial Sequence
  Synthetic
ucccaugaguguggagcuacu

SEQ ID NO: 18713 - RNA, 21 nt, Artificial Sequence
  Synthetic
cccaugaguguggagcuacuu

SEQ ID NO: 18714 - RNA, 21 nt, Artificial Sequence
  Synthetic
ccaugaguguggagcuacuuu

SEQ ID NO: 18715 - RNA, 21 nt, Artificial Sequence
  Synthetic
caugaguguggagcuacuuuc

SEQ ID NO: 18716 - RNA, 21 nt, Artificial Sequence
  Synthetic
augaguguggagcuacuuucu

SEQ ID NO: 18717 - RNA, 21 nt, Artificial Sequence
  Synthetic
ugaguguggagcuacuuucuu

SEQ ID NO: 18718 - RNA, 21 nt, Artificial Sequence
  Synthetic
gaguguggagcuacuuucuuc

SEQ ID NO: 18719 - RNA, 21 nt, Artificial Sequence
  Synthetic
aguguggagcuacuuucuucu

SEQ ID NO: 18720 - RNA, 21 nt, Artificial Sequence
  Synthetic
guguggagcuacuuucuucua

SEQ ID NO: 18721 - RNA, 21 nt, Artificial Sequence
  Synthetic
uguggagcuacuuucuucuac

SEQ ID NO: 18722 - RNA, 21 nt, Artificial Sequence
  Synthetic
guggagcuacuuucuucuacc

SEQ ID NO: 18723 - RNA, 21 nt, Artificial Sequence
  Synthetic
uggagcuacuuucuucuaccu

SEQ ID NO: 18724 - RNA, 21 nt, Artificial Sequence
  Synthetic
ggagcuacuuucuucuaccuu

SEQ ID NO: 18725 - RNA, 21 nt, Artificial Sequence
  Synthetic
gagcuacuuucuucuaccuuc

SEQ ID NO: 18726 - RNA, 21 nt, Artificial Sequence
  Synthetic
agcuacuuucuucuaccuucu

SEQ ID NO: 18727 - RNA, 21 nt, Artificial Sequence
  Synthetic
gcuacuuucuucuaccuucug

SEQ ID NO: 18728 - RNA, 21 nt, Artificial Sequence
  Synthetic
cuacuuucuucuaccuucugu

SEQ ID NO: 18729 - RNA, 21 nt, Artificial Sequence
  Synthetic
uacuuucuucuaccuucuguu

SEQ ID NO: 18730 - RNA, 21 nt, Artificial Sequence
  Synthetic
acuuucuucuaccuucuguuu

SEQ ID NO: 18731 - RNA, 21 nt, Artificial Sequence
  Synthetic
cuuucuucuaccuucuguuug

SEQ ID NO: 18732 - RNA, 21 nt, Artificial Sequence
  Synthetic
uuucuucuaccuucuguuugu

SEQ ID NO: 18733 - RNA, 21 nt, Artificial Sequence
  Synthetic
uucuucuaccuucuguuuguc

SEQ ID NO: 18734 - RNA, 21 nt, Artificial Sequence
  Synthetic
ucuucuaccuucuguuuguca

SEQ ID NO: 18735 - RNA, 21 nt, Artificial Sequence
  Synthetic
cuucuaccuucuguuugucag

SEQ ID NO: 18736 - RNA, 21 nt, Artificial Sequence
  Synthetic
uucuaccuucuguuugucagu

SEQ ID NO: 18737 - RNA, 21 nt, Artificial Sequence
  Synthetic
ucuaccuucuguuugucaguu

SEQ ID NO: 18738 - RNA, 21 nt, Artificial Sequence
  Synthetic
cuaccuucuguuugucaguuu

SEQ ID NO: 18739 - RNA, 21 nt, Artificial Sequence
  Synthetic
uaccuucuguuugucaguuuu

SEQ ID NO: 18740 - RNA, 21 nt, Artificial Sequence
  Synthetic
accuucuguuugucaguuuua

SEQ ID NO: 18741 - RNA, 21 nt, Artificial Sequence
  Synthetic
ccuucuguuugucaguuuuag

SEQ ID NO: 18742 - RNA, 21 nt, Artificial Sequence
  Synthetic
cuucuguuugucaguuuuagc

SEQ ID NO: 18743 - RNA, 21 nt, Artificial Sequence
  Synthetic
uucuguuugucaguuuuagcu

SEQ ID NO: 18744 - RNA, 21 nt, Artificial Sequence
  Synthetic
ucuguuugucaguuuuagcuu

SEQ ID NO: 18745 - RNA, 21 nt, Artificial Sequence
  Synthetic
cuguuugucaguuuuagcuuu

SEQ ID NO: 18746 - RNA, 21 nt, Artificial Sequence
  Synthetic
uguuugucaguuuuagcuuuu

SEQ ID NO: 18747 - RNA, 21 nt, Artificial Sequence
  Synthetic
guuugucaguuuuagcuuuuc

SEQ ID NO: 18748 - RNA, 21 nt, Artificial Sequence
  Synthetic
uuugucaguuuuagcuuuucu

SEQ ID NO: 18749 - RNA, 21 nt, Artificial Sequence
  Synthetic
uugucaguuuuagcuuuucug

SEQ ID NO: 18750 - RNA, 21 nt, Artificial Sequence
  Synthetic
ugucaguuuuagcuuuucuga

SEQ ID NO: 18751 - RNA, 21 nt, Artificial Sequence
  Synthetic
gucaguuuuagcuuuucugac

SEQ ID NO: 18752 - RNA, 21 nt, Artificial Sequence
  Synthetic
ucaguuuuagcuuuucugacu

SEQ ID NO: 18753 - RNA, 21 nt, Artificial Sequence
  Synthetic
caguuuuagcuuuucugacua

SEQ ID NO: 18754 - RNA, 21 nt, Artificial Sequence
  Synthetic
aguuuuagcuuuucugacuac

SEQ ID NO: 18755 - RNA, 21 nt, Artificial Sequence
  Synthetic
guuuuagcuuuucugacuacu

SEQ ID NO: 18756 - RNA, 21 nt, Artificial Sequence
  Synthetic
uuuuagcuuuucugacuacuu

SEQ ID NO: 18757 - RNA, 21 nt, Artificial Sequence
  Synthetic
uuuagcuuuucugacuacuuc

SEQ ID NO: 18758 - RNA, 21 nt, Artificial Sequence
  Synthetic
uuagcuuuucugacuacuucc

SEQ ID NO: 18759 - RNA, 21 nt, Artificial Sequence
  Synthetic
uagcuuuucugacuacuuccu

SEQ ID NO: 18760 - RNA, 21 nt, Artificial Sequence
  Synthetic
agcuuuucugacuacuuccuu

SEQ ID NO: 18761 - RNA, 21 nt, Artificial Sequence
  Synthetic
gcuuuucugacuacuuccuug

SEQ ID NO: 18762 - RNA, 21 nt, Artificial Sequence
  Synthetic
cuuuucugacuacuuccuuga

SEQ ID NO: 18763 - RNA, 21 nt, Artificial Sequence
  Synthetic
uuuucugacuacuuccuugau

SEQ ID NO: 18764 - RNA, 21 nt, Artificial Sequence
  Synthetic
uuucugacuacuuccuugaug

SEQ ID NO: 18765 - RNA, 21 nt, Artificial Sequence
  Synthetic
uucugacuacuuccuugaugu

SEQ ID NO: 18766 - RNA, 21 nt, Artificial Sequence
  Synthetic
ucugacuacuuccuugauguu

SEQ ID NO: 18767 - RNA, 21 nt, Artificial Sequence
  Synthetic
cugacuacuuccuugauguua

SEQ ID NO: 18768 - RNA, 21 nt, Artificial Sequence
  Synthetic
ugacuacuuccuugauguuaa

SEQ ID NO: 18769 - RNA, 21 nt, Artificial Sequence
  Synthetic
gacuacuuccuugauguuaag

SEQ ID NO: 18770 - RNA, 21 nt, Artificial Sequence
  Synthetic
acuacuuccuugauguuaagu

SEQ ID NO: 18771 - RNA, 21 nt, Artificial Sequence
  Synthetic
cuacuuccuugauguuaaguu

SEQ ID NO: 18772 - RNA, 21 nt, Artificial Sequence
  Synthetic
uacuuccuugauguuaaguug

SEQ ID NO: 18773 - RNA, 21 nt, Artificial Sequence
  Synthetic
acuuccuugauguuaaguugu

SEQ ID NO: 18774 - RNA, 21 nt, Artificial Sequence
  Synthetic
cuuccuugauguuaaguuguc

SEQ ID NO: 18775 - RNA, 21 nt, Artificial Sequence
  Synthetic
uuccuugauguuaaguuguca

SEQ ID NO: 18776 - RNA, 21 nt, Artificial Sequence
  Synthetic
uccuugauguuaaguugucac

SEQ ID NO: 18777 - RNA, 21 nt, Artificial Sequence
  Synthetic
ccuugauguuaaguugucacu

SEQ ID NO: 18778 - RNA, 21 nt, Artificial Sequence
  Synthetic
cuugauguuaaguugucacuu

SEQ ID NO: 18779 - RNA, 21 nt, Artificial Sequence
  Synthetic
uugauguuaaguugucacuug

SEQ ID NO: 18780 - RNA, 21 nt, Artificial Sequence
  Synthetic
ugauguuaaguugucacuugc

SEQ ID NO: 18781 - RNA, 21 nt, Artificial Sequence
  Synthetic
gauguuaaguugucacuugcc

SEQ ID NO: 18782 - RNA, 21 nt, Artificial Sequence
  Synthetic
auguuaaguugucacuugcca

SEQ ID NO: 18783 - RNA, 21 nt, Artificial Sequence
  Synthetic
uguuaaguugucacuugccag

SEQ ID NO: 18784 - RNA, 21 nt, Artificial Sequence
  Synthetic
guuaaguugucacuugccagg

SEQ ID NO: 18785 - RNA, 21 nt, Artificial Sequence
  Synthetic
uuaaguugucacuugccaggu

SEQ ID NO: 18786 - RNA, 21 nt, Artificial Sequence
  Synthetic
uaaguugucacuugccagguu

SEQ ID NO: 18787 - RNA, 21 nt, Artificial Sequence
  Synthetic
aaguugucacuugccagguuu

SEQ ID NO: 18788 - RNA, 21 nt, Artificial Sequence
  Synthetic
aguugucacuugccagguuuu

SEQ ID NO: 18789 - RNA, 21 nt, Artificial Sequence
  Synthetic
guugucacuugccagguuuuc

SEQ ID NO: 18790 - RNA, 21 nt, Artificial Sequence
  Synthetic
uugucacuugccagguuuucc

SEQ ID NO: 18791 - RNA, 21 nt, Artificial Sequence
  Synthetic
ugucacuugccagguuuuccc

SEQ ID NO: 18792 - RNA, 21 nt, Artificial Sequence
  Synthetic
gucacuugccagguuuuccca

SEQ ID NO: 18793 - RNA, 21 nt, Artificial Sequence
  Synthetic
ucacuugccagguuuucccaa

SEQ ID NO: 18794 - RNA, 21 nt, Artificial Sequence
  Synthetic
cacuugccagguuuucccaaa

SEQ ID NO: 18795 - RNA, 21 nt, Artificial Sequence
  Synthetic
acuugccagguuuucccaaaa

SEQ ID NO: 18796 - RNA, 21 nt, Artificial Sequence
  Synthetic
cuugccagguuuucccaaaac

SEQ ID NO: 18797 - RNA, 21 nt, Artificial Sequence
  Synthetic
uugccagguuuucccaaaacg

SEQ ID NO: 18798 - RNA, 21 nt, Artificial Sequence
  Synthetic
ugccagguuuucccaaaacgu

SEQ ID NO: 18799 - RNA, 21 nt, Artificial Sequence
  Synthetic
gccagguuuucccaaaacgug

SEQ ID NO: 18800 - RNA, 21 nt, Artificial Sequence
  Synthetic
ccagguuuucccaaaacgugg

SEQ ID NO: 18801 - RNA, 21 nt, Artificial Sequence
  Synthetic
cagguuuucccaaaacguggg

SEQ ID NO: 18802 - RNA, 21 nt, Artificial Sequence
  Synthetic
agguuuucccaaaacgugggu

SEQ ID NO: 18803 - RNA, 21 nt, Artificial Sequence
  Synthetic
gguuuucccaaaacguggguu

SEQ ID NO: 18804 - RNA, 21 nt, Artificial Sequence
  Synthetic
guuuucccaaaacguggguuu

SEQ ID NO: 18805 - RNA, 21 nt, Artificial Sequence
  Synthetic
uuuucccaaaacguggguuuc

SEQ ID NO: 18806 - RNA, 21 nt, Artificial Sequence
  Synthetic
uuucccaaaacguggguuucu

SEQ ID NO: 18807 - RNA, 21 nt, Artificial Sequence
  Synthetic
uucccaaaacguggguuucuc

SEQ ID NO: 18808 - RNA, 21 nt, Artificial Sequence
  Synthetic
ucccaaaacguggguuucuca

SEQ ID NO: 18809 - RNA, 21 nt, Artificial Sequence
  Synthetic
cccaaaacguggguuucucau

SEQ ID NO: 18810 - RNA, 21 nt, Artificial Sequence
  Synthetic
ccaaaacguggguuucucauc

SEQ ID NO: 18811 - RNA, 21 nt, Artificial Sequence
  Synthetic
caaaacguggguuucucaucu

SEQ ID NO: 18812 - RNA, 21 nt, Artificial Sequence
  Synthetic
aaaacguggguuucucaucuc

SEQ ID NO: 18813 - RNA, 21 nt, Artificial Sequence
  Synthetic
aaacguggguuucucaucucc

SEQ ID NO: 18814 - RNA, 21 nt, Artificial Sequence
  Synthetic
aacguggguuucucaucucca

SEQ ID NO: 18815 - RNA, 21 nt, Artificial Sequence
  Synthetic
acguggguuucucaucuccaa

SEQ ID NO: 18816 - RNA, 21 nt, Artificial Sequence
  Synthetic
cguggguuucucaucuccaac

SEQ ID NO: 18817 - RNA, 21 nt, Artificial Sequence
  Synthetic
guggguuucucaucuccaaca

SEQ ID NO: 18818 - RNA, 21 nt, Artificial Sequence
  Synthetic
uggguuucucaucuccaacaa

SEQ ID NO: 18819 - RNA, 21 nt, Artificial Sequence
  Synthetic
ggguuucucaucuccaacaac

SEQ ID NO: 18820 - RNA, 21 nt, Artificial Sequence
  Synthetic
gguuucucaucuccaacaacc

SEQ ID NO: 18821 - RNA, 21 nt, Artificial Sequence
  Synthetic
guuucucaucuccaacaaccc

SEQ ID NO: 18822 - RNA, 21 nt, Artificial Sequence
  Synthetic
uuucucaucuccaacaacccu

SEQ ID NO: 18823 - RNA, 21 nt, Artificial Sequence
  Synthetic
uucucaucuccaacaacccua

SEQ ID NO: 18824 - RNA, 21 nt, Artificial Sequence
  Synthetic
ucucaucuccaacaacccuaa

SEQ ID NO: 18825 - RNA, 21 nt, Artificial Sequence
  Synthetic
cucaucuccaacaacccuaau

SEQ ID NO: 18826 - RNA, 21 nt, Artificial Sequence
  Synthetic
ucaucuccaacaacccuaauc

SEQ ID NO: 18827 - RNA, 21 nt, Artificial Sequence
  Synthetic
caucuccaacaacccuaaucu

SEQ ID NO: 18828 - RNA, 21 nt, Artificial Sequence
  Synthetic
aucuccaacaacccuaaucua

SEQ ID NO: 18829 - RNA, 21 nt, Artificial Sequence
  Synthetic
ucuccaacaacccuaaucuac

SEQ ID NO: 18830 - RNA, 21 nt, Artificial Sequence
  Synthetic
cuccaacaacccuaaucuacu

SEQ ID NO: 18831 - RNA, 21 nt, Artificial Sequence
  Synthetic
uccaacaacccuaaucuacuu

SEQ ID NO: 18832 - RNA, 21 nt, Artificial Sequence
  Synthetic
ccaacaacccuaaucuacuua

SEQ ID NO: 18833 - RNA, 21 nt, Artificial Sequence
  Synthetic
caacaacccuaaucuacuuag

SEQ ID NO: 18834 - RNA, 21 nt, Artificial Sequence
  Synthetic
aacaacccuaaucuacuuagc

SEQ ID NO: 18835 - RNA, 21 nt, Artificial Sequence
  Synthetic
acaacccuaaucuacuuagcu

SEQ ID NO: 18836 - RNA, 21 nt, Artificial Sequence
  Synthetic
caacccuaaucuacuuagcuc

SEQ ID NO: 18837 - RNA, 21 nt, Artificial Sequence
  Synthetic
aacccuaaucuacuuagcucu

SEQ ID NO: 18838 - RNA, 21 nt, Artificial Sequence
  Synthetic
acccuaaucuacuuagcucuc

SEQ ID NO: 18839 - RNA, 21 nt, Artificial Sequence
  Synthetic
cccuaaucuacuuagcucucu

SEQ ID NO: 18840 - RNA, 21 nt, Artificial Sequence
  Synthetic
ccuaaucuacuuagcucucua

SEQ ID NO: 18841 - RNA, 21 nt, Artificial Sequence
  Synthetic
cuaaucuacuuagcucucuaa

SEQ ID NO: 18842 - RNA, 21 nt, Artificial Sequence
  Synthetic
uaaucuacuuagcucucuaau

SEQ ID NO: 18843 - RNA, 21 nt, Artificial Sequence
  Synthetic
aaucuacuuagcucucuaauu

SEQ ID NO: 18844 - RNA, 21 nt, Artificial Sequence
  Synthetic
aucuacuuagcucucuaauua

SEQ ID NO: 18845 - RNA, 21 nt, Artificial Sequence
  Synthetic
ucuacuuagcucucuaauuac

SEQ ID NO: 18846 - RNA, 21 nt, Artificial Sequence
  Synthetic
cuacuuagcucucuaauuacu

SEQ ID NO: 18847 - RNA, 21 nt, Artificial Sequence
  Synthetic
uacuuagcucucuaauuacua

SEQ ID NO: 18848 - RNA, 21 nt, Artificial Sequence
  Synthetic
acuuagcucucuaauuacuaa

SEQ ID NO: 18849 - RNA, 21 nt, Artificial Sequence
  Synthetic
cuuagcucucuaauuacuaac

SEQ ID NO: 18850 - RNA, 21 nt, Artificial Sequence
  Synthetic
uuagcucucuaauuacuaacu

SEQ ID NO: 18851 - RNA, 21 nt, Artificial Sequence
  Synthetic
uagcucucuaauuacuaacuu

SEQ ID NO: 18852 - RNA, 21 nt, Artificial Sequence
  Synthetic
agcucucuaauuacuaacuuc

SEQ ID NO: 18853 - RNA, 21 nt, Artificial Sequence
  Synthetic
gcucucuaauuacuaacuucu

SEQ ID NO: 18854 - RNA, 21 nt, Artificial Sequence
  Synthetic
cucucuaauuacuaacuucuu

SEQ ID NO: 18855 - RNA, 21 nt, Artificial Sequence
  Synthetic
ucucuaauuacuaacuucuua

SEQ ID NO: 18856 - RNA, 21 nt, Artificial Sequence
  Synthetic
cucuaauuacuaacuucuuac

SEQ ID NO: 18857 - RNA, 21 nt, Artificial Sequence
  Synthetic
ucuaauuacuaacuucuuacu

SEQ ID NO: 18858 - RNA, 21 nt, Artificial Sequence
  Synthetic
cuaauuacuaacuucuuacua

SEQ ID NO: 18859 - RNA, 21 nt, Artificial Sequence
  Synthetic
uaauuacuaacuucuuacuag

SEQ ID NO: 18860 - RNA, 21 nt, Artificial Sequence
  Synthetic
aauuacuaacuucuuacuagu

SEQ ID NO: 18861 - RNA, 21 nt, Artificial Sequence
  Synthetic
auuacuaacuucuuacuaguc

SEQ ID NO: 18862 - RNA, 21 nt, Artificial Sequence
  Synthetic
uuacuaacuucuuacuagucu

SEQ ID NO: 18863 - RNA, 21 nt, Artificial Sequence
  Synthetic
uacuaacuucuuacuagucug

SEQ ID NO: 18864 - RNA, 21 nt, Artificial Sequence
  Synthetic
acuaacuucuuacuagucugu

SEQ ID NO: 18865 - RNA, 21 nt, Artificial Sequence
  Synthetic
cuaacuucuuacuagucugug

SEQ ID NO: 18866 - RNA, 21 nt, Artificial Sequence
  Synthetic
uaacuucuuacuagucuguga

SEQ ID NO: 18867 - RNA, 21 nt, Artificial Sequence
  Synthetic
aacuucuuacuagucugugag

SEQ ID NO: 18868 - RNA, 21 nt, Artificial Sequence
  Synthetic
acuucuuacuagucugugagu

SEQ ID NO: 18869 - RNA, 21 nt, Artificial Sequence
  Synthetic
cuucuuacuagucugugaguc

SEQ ID NO: 18870 - RNA, 21 nt, Artificial Sequence
  Synthetic
uucuuacuagucugugaguca

SEQ ID NO: 18871 - RNA, 21 nt, Artificial Sequence
  Synthetic
ucuuacuagucugugagucag

SEQ ID NO: 18872 - RNA, 21 nt, Artificial Sequence
  Synthetic
cuuacuagucugugagucaga

SEQ ID NO: 18873 - RNA, 21 nt, Artificial Sequence
  Synthetic
uuacuagucugugagucagaa

SEQ ID NO: 18874 - RNA, 21 nt, Artificial Sequence
  Synthetic
uacuagucugugagucagaaa

SEQ ID NO: 18875 - RNA, 21 nt, Artificial Sequence
  Synthetic
acuagucugugagucagaaaa

SEQ ID NO: 18876 - RNA, 21 nt, Artificial Sequence
  Synthetic
cuagucugugagucagaaaac

SEQ ID NO: 18877 - RNA, 21 nt, Artificial Sequence
  Synthetic
uagucugugagucagaaaacc

SEQ ID NO: 18878 - RNA, 21 nt, Artificial Sequence
  Synthetic
agucugugagucagaaaacca

SEQ ID NO: 18879 - RNA, 21 nt, Artificial Sequence
  Synthetic
gucugugagucagaaaaccac

SEQ ID NO: 18880 - RNA, 21 nt, Artificial Sequence
  Synthetic
ucugugagucagaaaaccaca

SEQ ID NO: 18881 - RNA, 21 nt, Artificial Sequence
  Synthetic
cugugagucagaaaaccacau

SEQ ID NO: 18882 - RNA, 21 nt, Artificial Sequence
  Synthetic
ugugagucagaaaaccacaug

SEQ ID NO: 18883 - RNA, 21 nt, Artificial Sequence
  Synthetic
gugagucagaaaaccacauga

SEQ ID NO: 18884 - RNA, 21 nt, Artificial Sequence
  Synthetic
ugagucagaaaaccacaugac

SEQ ID NO: 18885 - RNA, 21 nt, Artificial Sequence
  Synthetic
gagucagaaaaccacaugaca

SEQ ID NO: 18886 - RNA, 21 nt, Artificial Sequence
  Synthetic
agucagaaaaccacaugacaa

SEQ ID NO: 18887 - RNA, 21 nt, Artificial Sequence
  Synthetic
gucagaaaaccacaugacaaa

SEQ ID NO: 18888 - RNA, 21 nt, Artificial Sequence
  Synthetic
ucagaaaaccacaugacaaaa

SEQ ID NO: 18889 - RNA, 21 nt, Artificial Sequence
  Synthetic
cagaaaaccacaugacaaaau

SEQ ID NO: 18890 - RNA, 21 nt, Artificial Sequence
  Synthetic
agaaaaccacaugacaaaauu

SEQ ID NO: 18891 - RNA, 21 nt, Artificial Sequence
  Synthetic
gaaaaccacaugacaaaauug

SEQ ID NO: 18892 - RNA, 21 nt, Artificial Sequence
  Synthetic
aaaaccacaugacaaaauuga

SEQ ID NO: 18893 - RNA, 21 nt, Artificial Sequence
  Synthetic
aaaccacaugacaaaauugac

SEQ ID NO: 18894 - RNA, 21 nt, Artificial Sequence
  Synthetic
aaccacaugacaaaauugacu

SEQ ID NO: 18895 - RNA, 21 nt, Artificial Sequence
  Synthetic
accacaugacaaaauugacuu

SEQ ID NO: 18896 - RNA, 21 nt, Artificial Sequence
  Synthetic
ccacaugacaaaauugacuua

SEQ ID NO: 18897 - RNA, 21 nt, Artificial Sequence
  Synthetic
cacaugacaaaauugacuuag

SEQ ID NO: 18898 - RNA, 21 nt, Artificial Sequence
  Synthetic
acaugacaaaauugacuuaga

SEQ ID NO: 18899 - RNA, 21 nt, Artificial Sequence
  Synthetic
caugacaaaauugacuuagaa

SEQ ID NO: 18900 - RNA, 21 nt, Artificial Sequence
  Synthetic
augacaaaauugacuuagaac

SEQ ID NO: 18901 - RNA, 21 nt, Artificial Sequence
  Synthetic
ugacaaaauugacuuagaacu

SEQ ID NO: 18902 - RNA, 21 nt, Artificial Sequence
  Synthetic
gacaaaauugacuuagaacug

SEQ ID NO: 18903 - RNA, 21 nt, Artificial Sequence
  Synthetic
acaaaauugacuuagaacugu

SEQ ID NO: 18904 - RNA, 21 nt, Artificial Sequence
  Synthetic
caaaauugacuuagaacuguc

SEQ ID NO: 18905 - RNA, 21 nt, Artificial Sequence
  Synthetic
aaaauugacuuagaacuguca

SEQ ID NO: 18906 - RNA, 21 nt, Artificial Sequence
  Synthetic
aaauugacuuagaacugucac

SEQ ID NO: 18907 - RNA, 21 nt, Artificial Sequence
  Synthetic
aauugacuuagaacugucaca

SEQ ID NO: 18908 - RNA, 21 nt, Artificial Sequence
  Synthetic
auugacuuagaacugucacac

SEQ ID NO: 18909 - RNA, 21 nt, Artificial Sequence
  Synthetic
uugacuuagaacugucacacg

SEQ ID NO: 18910 - RNA, 21 nt, Artificial Sequence
  Synthetic
ugacuuagaacugucacacga

SEQ ID NO: 18911 - RNA, 21 nt, Artificial Sequence
  Synthetic
gacuuagaacugucacacgau

SEQ ID NO: 18912 - RNA, 21 nt, Artificial Sequence
  Synthetic
acuuagaacugucacacgaua

SEQ ID NO: 18913 - RNA, 21 nt, Artificial Sequence
  Synthetic
cuuagaacugucacacgauaa

SEQ ID NO: 18914 - RNA, 21 nt, Artificial Sequence
  Synthetic
uuagaacugucacacgauaag

SEQ ID NO: 18915 - RNA, 21 nt, Artificial Sequence
  Synthetic
uagaacugucacacgauaagg

SEQ ID NO: 18916 - RNA, 21 nt, Artificial Sequence
  Synthetic
agaacugucacacgauaaggg

SEQ ID NO: 18917 - RNA, 21 nt, Artificial Sequence
  Synthetic
gaacugucacacgauaaggga

SEQ ID NO: 18918 - RNA, 21 nt, Artificial Sequence
  Synthetic
aacugucacacgauaagggaa

SEQ ID NO: 18919 - RNA, 21 nt, Artificial Sequence
  Synthetic
acugucacacgauaagggaac

SEQ ID NO: 18920 - RNA, 21 nt, Artificial Sequence
  Synthetic
cugucacacgauaagggaacc

SEQ ID NO: 18921 - RNA, 21 nt, Artificial Sequence
  Synthetic
ugucacacgauaagggaacca

SEQ ID NO: 18922 - RNA, 21 nt, Artificial Sequence
  Synthetic
gucacacgauaagggaaccag

SEQ ID NO: 18923 - RNA, 21 nt, Artificial Sequence
  Synthetic
ucacacgauaagggaaccagg

SEQ ID NO: 18924 - RNA, 21 nt, Artificial Sequence
  Synthetic
cacacgauaagggaaccagga

SEQ ID NO: 18925 - RNA, 21 nt, Artificial Sequence
  Synthetic
acacgauaagggaaccaggaa

SEQ ID NO: 18926 - RNA, 21 nt, Artificial Sequence
  Synthetic
cacgauaagggaaccaggaac

SEQ ID NO: 18927 - RNA, 21 nt, Artificial Sequence
  Synthetic
acgauaagggaaccaggaacu

SEQ ID NO: 18928 - RNA, 21 nt, Artificial Sequence
  Synthetic
cgauaagggaaccaggaacuc

SEQ ID NO: 18929 - RNA, 21 nt, Artificial Sequence
  Synthetic
gauaagggaaccaggaacucu

SEQ ID NO: 18930 - RNA, 21 nt, Artificial Sequence
  Synthetic
auaagggaaccaggaacucuc

SEQ ID NO: 18931 - RNA, 21 nt, Artificial Sequence
  Synthetic
uaagggaaccaggaacucucc

SEQ ID NO: 18932 - RNA, 21 nt, Artificial Sequence
  Synthetic
aagggaaccaggaacucucca

SEQ ID NO: 18933 - RNA, 21 nt, Artificial Sequence
  Synthetic
agggaaccaggaacucuccaa

SEQ ID NO: 18934 - RNA, 21 nt, Artificial Sequence
  Synthetic
gggaaccaggaacucuccaaa

SEQ ID NO: 18935 - RNA, 21 nt, Artificial Sequence
  Synthetic
ggaaccaggaacucuccaaau

SEQ ID NO: 18936 - RNA, 21 nt, Artificial Sequence
  Synthetic
gaaccaggaacucuccaaaua

SEQ ID NO: 18937 - RNA, 21 nt, Artificial Sequence
  Synthetic
aaccaggaacucuccaaauag

SEQ ID NO: 18938 - RNA, 21 nt, Artificial Sequence
  Synthetic
accaggaacucuccaaauaga

SEQ ID NO: 18939 - RNA, 21 nt, Artificial Sequence
  Synthetic
ccaggaacucuccaaauagag

SEQ ID NO: 18940 - RNA, 21 nt, Artificial Sequence
  Synthetic
caggaacucuccaaauagagu

SEQ ID NO: 18941 - RNA, 21 nt, Artificial Sequence
  Synthetic
aggaacucuccaaauagaguu

SEQ ID NO: 18942 - RNA, 21 nt, Artificial Sequence
  Synthetic
ggaacucuccaaauagaguuc

SEQ ID NO: 18943 - RNA, 21 nt, Artificial Sequence
  Synthetic
gaacucuccaaauagaguucc

SEQ ID NO: 18944 - RNA, 21 nt, Artificial Sequence
  Synthetic
aacucuccaaauagaguuccu

SEQ ID NO: 18945 - RNA, 21 nt, Artificial Sequence
  Synthetic
acucuccaaauagaguuccua

SEQ ID NO: 18946 - RNA, 21 nt, Artificial Sequence
  Synthetic
cucuccaaauagaguuccuaa

SEQ ID NO: 18947 - RNA, 21 nt, Artificial Sequence
  Synthetic
ucuccaaauagaguuccuaac

SEQ ID NO: 18948 - RNA, 21 nt, Artificial Sequence
  Synthetic
cuccaaauagaguuccuaacu

SEQ ID NO: 18949 - RNA, 21 nt, Artificial Sequence
  Synthetic
uccaaauagaguuccuaacuc

SEQ ID NO: 18950 - RNA, 21 nt, Artificial Sequence
  Synthetic
ccaaauagaguuccuaacucu

SEQ ID NO: 18951 - RNA, 21 nt, Artificial Sequence
  Synthetic
caaauagaguuccuaacucuu

SEQ ID NO: 18952 - RNA, 21 nt, Artificial Sequence
  Synthetic
aaauagaguuccuaacucuuu

SEQ ID NO: 18953 - RNA, 21 nt, Artificial Sequence
  Synthetic
aauagaguuccuaacucuuuc

SEQ ID NO: 18954 - RNA, 21 nt, Artificial Sequence
  Synthetic
auagaguuccuaacucuuuca

SEQ ID NO: 18955 - RNA, 21 nt, Artificial Sequence
  Synthetic
uagaguuccuaacucuuucag

SEQ ID NO: 18956 - RNA, 21 nt, Artificial Sequence
  Synthetic
agaguuccuaacucuuucagu

SEQ ID NO: 18957 - RNA, 21 nt, Artificial Sequence
  Synthetic
gaguuccuaacucuuucaguu

SEQ ID NO: 18958 - RNA, 21 nt, Artificial Sequence
  Synthetic
aguuccuaacucuuucaguuc

SEQ ID NO: 18959 - RNA, 21 nt, Artificial Sequence
  Synthetic
guuccuaacucuuucaguucu

SEQ ID NO: 18960 - RNA, 21 nt, Artificial Sequence
  Synthetic
uuccuaacucuuucaguucuc

SEQ ID NO: 18961 - RNA, 21 nt, Artificial Sequence
  Synthetic
uccuaacucuuucaguucuca

SEQ ID NO: 18962 - RNA, 21 nt, Artificial Sequence
  Synthetic
ccuaacucuuucaguucucag

SEQ ID NO: 18963 - RNA, 21 nt, Artificial Sequence
  Synthetic
cuaacucuuucaguucucaga

SEQ ID NO: 18964 - RNA, 21 nt, Artificial Sequence
  Synthetic
uaacucuuucaguucucagaa

SEQ ID NO: 18965 - RNA, 21 nt, Artificial Sequence
  Synthetic
aacucuuucaguucucagaau

SEQ ID NO: 18966 - RNA, 21 nt, Artificial Sequence
  Synthetic
acucuuucaguucucagaauu

SEQ ID NO: 18967 - RNA, 21 nt, Artificial Sequence
  Synthetic
cucuuucaguucucagaauua

SEQ ID NO: 18968 - RNA, 21 nt, Artificial Sequence
  Synthetic
ucuuucaguucucagaauuag

SEQ ID NO: 18969 - RNA, 21 nt, Artificial Sequence
  Synthetic
cuuucaguucucagaauuagu

SEQ ID NO: 18970 - RNA, 21 nt, Artificial Sequence
  Synthetic
uuucaguucucagaauuagug

SEQ ID NO: 18971 - RNA, 21 nt, Artificial Sequence
  Synthetic
uucaguucucagaauuagugg

SEQ ID NO: 18972 - RNA, 21 nt, Artificial Sequence
  Synthetic
ucaguucucagaauuagugga

SEQ ID NO: 18973 - RNA, 21 nt, Artificial Sequence
  Synthetic
caguucucagaauuaguggaa

SEQ ID NO: 18974 - RNA, 21 nt, Artificial Sequence
  Synthetic
aguucucagaauuaguggaaa

SEQ ID NO: 18975 - RNA, 21 nt, Artificial Sequence
  Synthetic
guucucagaauuaguggaaag

SEQ ID NO: 18976 - RNA, 21 nt, Artificial Sequence
  Synthetic
uucucagaauuaguggaaaga

SEQ ID NO: 18977 - RNA, 21 nt, Artificial Sequence
  Synthetic
ucucagaauuaguggaaagau

SEQ ID NO: 18978 - RNA, 21 nt, Artificial Sequence
  Synthetic
cucagaauuaguggaaagauc

SEQ ID NO: 18979 - RNA, 21 nt, Artificial Sequence
  Synthetic
ucagaauuaguggaaagaucc

SEQ ID NO: 18980 - RNA, 21 nt, Artificial Sequence
  Synthetic
cagaauuaguggaaagauccu

SEQ ID NO: 18981 - RNA, 21 nt, Artificial Sequence
  Synthetic
agaauuaguggaaagauccug

SEQ ID NO: 18982 - RNA, 21 nt, Artificial Sequence
  Synthetic
gaauuaguggaaagauccugc

SEQ ID NO: 18983 - RNA, 21 nt, Artificial Sequence
  Synthetic
aauuaguggaaagauccugca

SEQ ID NO: 18984 - RNA, 21 nt, Artificial Sequence
  Synthetic
auuaguggaaagauccugcag

SEQ ID NO: 18985 - RNA, 21 nt, Artificial Sequence
  Synthetic
uuaguggaaagauccugcagc

SEQ ID NO: 18986 - RNA, 21 nt, Artificial Sequence
  Synthetic
uaguggaaagauccugcagcc

SEQ ID NO: 18987 - RNA, 21 nt, Artificial Sequence
  Synthetic
aguggaaagauccugcagcca

SEQ ID NO: 18988 - RNA, 21 nt, Artificial Sequence
  Synthetic
guggaaagauccugcagccau

SEQ ID NO: 18989 - RNA, 21 nt, Artificial Sequence
  Synthetic
uggaaagauccugcagccauu

SEQ ID NO: 18990 - RNA, 21 nt, Artificial Sequence
  Synthetic
ggaaagauccugcagccauuu

SEQ ID NO: 18991 - RNA, 21 nt, Artificial Sequence
  Synthetic
gaaagauccugcagccauuuc

SEQ ID NO: 18992 - RNA, 21 nt, Artificial Sequence
  Synthetic
aaagauccugcagccauuucc

SEQ ID NO: 18993 - RNA, 21 nt, Artificial Sequence
  Synthetic
aagauccugcagccauuucca

SEQ ID NO: 18994 - RNA, 21 nt, Artificial Sequence
  Synthetic
agauccugcagccauuuccag

SEQ ID NO: 18995 - RNA, 21 nt, Artificial Sequence
  Synthetic
gauccugcagccauuuccagu

SEQ ID NO: 18996 - RNA, 21 nt, Artificial Sequence
  Synthetic
auccugcagccauuuccagug

SEQ ID NO: 18997 - RNA, 21 nt, Artificial Sequence
  Synthetic
uccugcagccauuuccagugc

SEQ ID NO: 18998 - RNA, 21 nt, Artificial Sequence
  Synthetic
ccugcagccauuuccagugca

SEQ ID NO: 18999 - RNA, 21 nt, Artificial Sequence
  Synthetic
cugcagccauuuccagugcaa

SEQ ID NO: 19000 - RNA, 21 nt, Artificial Sequence
  Synthetic
ugcagccauuuccagugcaac

SEQ ID NO: 19001 - RNA, 21 nt, Artificial Sequence
  Synthetic
gcagccauuuccagugcaaca

SEQ ID NO: 19002 - RNA, 21 nt, Artificial Sequence
  Synthetic
cagccauuuccagugcaacau

SEQ ID NO: 19003 - RNA, 21 nt, Artificial Sequence
  Synthetic
agccauuuccagugcaacauc

SEQ ID NO: 19004 - RNA, 21 nt, Artificial Sequence
  Synthetic
gccauuuccagugcaacaucc

SEQ ID NO: 19005 - RNA, 21 nt, Artificial Sequence
  Synthetic
ccauuuccagugcaacauccu

SEQ ID NO: 19006 - RNA, 21 nt, Artificial Sequence
  Synthetic
cauuuccagugcaacauccua

SEQ ID NO: 19007 - RNA, 21 nt, Artificial Sequence
  Synthetic
auuuccagugcaacauccuag

SEQ ID NO: 19008 - RNA, 21 nt, Artificial Sequence
  Synthetic
uuuccagugcaacauccuaga

SEQ ID NO: 19009 - RNA, 21 nt, Artificial Sequence
  Synthetic
uuccagugcaacauccuagag

SEQ ID NO: 19010 - RNA, 21 nt, Artificial Sequence
  Synthetic
uccagugcaacauccuagaga

SEQ ID NO: 19011 - RNA, 21 nt, Artificial Sequence
  Synthetic
ccagugcaacauccuagagau

SEQ ID NO: 19012 - RNA, 21 nt, Artificial Sequence
  Synthetic
cagugcaacauccuagagauc

SEQ ID NO: 19013 - RNA, 21 nt, Artificial Sequence
  Synthetic
agugcaacauccuagagaucu

SEQ ID NO: 19014 - RNA, 21 nt, Artificial Sequence
  Synthetic
gugcaacauccuagagaucug

SEQ ID NO: 19015 - RNA, 21 nt, Artificial Sequence
  Synthetic
ugcaacauccuagagaucuga

SEQ ID NO: 19016 - RNA, 21 nt, Artificial Sequence
  Synthetic
gcaacauccuagagaucugag

SEQ ID NO: 19017 - RNA, 21 nt, Artificial Sequence
  Synthetic
caacauccuagagaucugagg

SEQ ID NO: 19018 - RNA, 21 nt, Artificial Sequence
  Synthetic
aacauccuagagaucugaggu

SEQ ID NO: 19019 - RNA, 21 nt, Artificial Sequence
  Synthetic
acauccuagagaucugagguu

SEQ ID NO: 19020 - RNA, 21 nt, Artificial Sequence
  Synthetic
cauccuagagaucugagguuc

SEQ ID NO: 19021 - RNA, 21 nt, Artificial Sequence
  Synthetic
auccuagagaucugagguucc

SEQ ID NO: 19022 - RNA, 21 nt, Artificial Sequence
  Synthetic
uccuagagaucugagguuccc

SEQ ID NO: 19023 - RNA, 21 nt, Artificial Sequence
  Synthetic
ccuagagaucugagguucccu

SEQ ID NO: 19024 - RNA, 21 nt, Artificial Sequence
  Synthetic
cuagagaucugagguucccug

SEQ ID NO: 19025 - RNA, 21 nt, Artificial Sequence
  Synthetic
uagagaucugagguucccugg

SEQ ID NO: 19026 - RNA, 21 nt, Artificial Sequence
  Synthetic
agagaucugagguucccugga

SEQ ID NO: 19027 - RNA, 21 nt, Artificial Sequence
  Synthetic
gagaucugagguucccuggag

SEQ ID NO: 19028 - RNA, 21 nt, Artificial Sequence
  Synthetic
agaucugagguucccuggaga

SEQ ID NO: 19029 - RNA, 21 nt, Artificial Sequence
  Synthetic
gaucugagguucccuggagac

SEQ ID NO: 19030 - RNA, 21 nt, Artificial Sequence
  Synthetic
aucugagguucccuggagacc

SEQ ID NO: 19031 - RNA, 21 nt, Artificial Sequence
  Synthetic
ucugagguucccuggagacca

SEQ ID NO: 19032 - RNA, 21 nt, Artificial Sequence
  Synthetic
cugagguucccuggagaccaa

SEQ ID NO: 19033 - RNA, 21 nt, Artificial Sequence
  Synthetic
ugagguucccuggagaccaac

SEQ ID NO: 19034 - RNA, 21 nt, Artificial Sequence
  Synthetic
gagguucccuggagaccaacu

SEQ ID NO: 19035 - RNA, 21 nt, Artificial Sequence
  Synthetic
agguucccuggagaccaacuc

SEQ ID NO: 19036 - RNA, 21 nt, Artificial Sequence
  Synthetic
gguucccuggagaccaacucu

SEQ ID NO: 19037 - RNA, 21 nt, Artificial Sequence
  Synthetic
guucccuggagaccaacucuc

SEQ ID NO: 19038 - RNA, 21 nt, Artificial Sequence
  Synthetic
uucccuggagaccaacucuca

SEQ ID NO: 19039 - RNA, 21 nt, Artificial Sequence
  Synthetic
ucccuggagaccaacucucag

SEQ ID NO: 19040 - RNA, 21 nt, Artificial Sequence
  Synthetic
cccuggagaccaacucucaga

SEQ ID NO: 19041 - RNA, 21 nt, Artificial Sequence
  Synthetic
ccuggagaccaacucucagau

SEQ ID NO: 19042 - RNA, 21 nt, Artificial Sequence
  Synthetic
cuggagaccaacucucagaug

SEQ ID NO: 19043 - RNA, 21 nt, Artificial Sequence
  Synthetic
uggagaccaacucucagauga

SEQ ID NO: 19044 - RNA, 21 nt, Artificial Sequence
  Synthetic
ggagaccaacucucagaugau

SEQ ID NO: 19045 - RNA, 21 nt, Artificial Sequence
  Synthetic
gagaccaacucucagaugauc

SEQ ID NO: 19046 - RNA, 21 nt, Artificial Sequence
  Synthetic
agaccaacucucagaugaucu

SEQ ID NO: 19047 - RNA, 21 nt, Artificial Sequence
  Synthetic
gaccaacucucagaugaucuu

SEQ ID NO: 19048 - RNA, 21 nt, Artificial Sequence
  Synthetic
accaacucucagaugaucuug

SEQ ID NO: 19049 - RNA, 21 nt, Artificial Sequence
  Synthetic
ccaacucucagaugaucuuga

SEQ ID NO: 19050 - RNA, 21 nt, Artificial Sequence
  Synthetic
caacucucagaugaucuugac

SEQ ID NO: 19051 - RNA, 21 nt, Artificial Sequence
  Synthetic
aacucucagaugaucuugacu

SEQ ID NO: 19052 - RNA, 21 nt, Artificial Sequence
  Synthetic
acucucagaugaucuugacug

SEQ ID NO: 19053 - RNA, 21 nt, Artificial Sequence
  Synthetic
cucucagaugaucuugacugg

SEQ ID NO: 19054 - RNA, 21 nt, Artificial Sequence
  Synthetic
ucucagaugaucuugacuggg

SEQ ID NO: 19055 - RNA, 21 nt, Artificial Sequence
  Synthetic
cucagaugaucuugacuggga

SEQ ID NO: 19056 - RNA, 21 nt, Artificial Sequence
  Synthetic
ucagaugaucuugacugggau

SEQ ID NO: 19057 - RNA, 21 nt, Artificial Sequence
  Synthetic
cagaugaucuugacugggauu

SEQ ID NO: 19058 - RNA, 21 nt, Artificial Sequence
  Synthetic
agaugaucuugacugggauua

SEQ ID NO: 19059 - RNA, 21 nt, Artificial Sequence
  Synthetic
gaugaucuugacugggauuaa

SEQ ID NO: 19060 - RNA, 21 nt, Artificial Sequence
  Synthetic
augaucuugacugggauuaac

SEQ ID NO: 19061 - RNA, 21 nt, Artificial Sequence
  Synthetic
ugaucuugacugggauuaaca

SEQ ID NO: 19062 - RNA, 21 nt, Artificial Sequence
  Synthetic
gaucuugacugggauuaacaa

SEQ ID NO: 19063 - RNA, 21 nt, Artificial Sequence
  Synthetic
aucuugacugggauuaacaac

SEQ ID NO: 19064 - RNA, 21 nt, Artificial Sequence
  Synthetic
ucuugacugggauuaacaacg

SEQ ID NO: 19065 - RNA, 21 nt, Artificial Sequence
  Synthetic
cuugacugggauuaacaacgg

SEQ ID NO: 19066 - RNA, 21 nt, Artificial Sequence
  Synthetic
uugacugggauuaacaacgga

SEQ ID NO: 19067 - RNA, 21 nt, Artificial Sequence
  Synthetic
ugacugggauuaacaacggag

SEQ ID NO: 19068 - RNA, 21 nt, Artificial Sequence
  Synthetic
gacugggauuaacaacggagg

SEQ ID NO: 19069 - RNA, 21 nt, Artificial Sequence
  Synthetic
acugggauuaacaacggagga

SEQ ID NO: 19070 - RNA, 21 nt, Artificial Sequence
  Synthetic
cugggauuaacaacggaggac

SEQ ID NO: 19071 - RNA, 21 nt, Artificial Sequence
  Synthetic
ugggauuaacaacggaggaca

SEQ ID NO: 19072 - RNA, 21 nt, Artificial Sequence
  Synthetic
gggauuaacaacggaggacag

SEQ ID NO: 19073 - RNA, 21 nt, Artificial Sequence
  Synthetic
ggauuaacaacggaggacagg

SEQ ID NO: 19074 - RNA, 21 nt, Artificial Sequence
  Synthetic
gauuaacaacggaggacagga

SEQ ID NO: 19075 - RNA, 21 nt, Artificial Sequence
  Synthetic
auuaacaacggaggacaggac

SEQ ID NO: 19076 - RNA, 21 nt, Artificial Sequence
  Synthetic
uuaacaacggaggacaggaca

SEQ ID NO: 19077 - RNA, 21 nt, Artificial Sequence
  Synthetic
uaacaacggaggacaggacac

SEQ ID NO: 19078 - RNA, 21 nt, Artificial Sequence
  Synthetic
aacaacggaggacaggacacu

SEQ ID NO: 19079 - RNA, 21 nt, Artificial Sequence
  Synthetic
acaacggaggacaggacacuc

SEQ ID NO: 19080 - RNA, 21 nt, Artificial Sequence
  Synthetic
caacggaggacaggacacucu

SEQ ID NO: 19081 - RNA, 21 nt, Artificial Sequence
  Synthetic
aacggaggacaggacacucuc

SEQ ID NO: 19082 - RNA, 21 nt, Artificial Sequence
  Synthetic
acggaggacaggacacucuca

SEQ ID NO: 19083 - RNA, 21 nt, Artificial Sequence
  Synthetic
cggaggacaggacacucucag

SEQ ID NO: 19084 - RNA, 21 nt, Artificial Sequence
  Synthetic
ggaggacaggacacucucagg

SEQ ID NO: 19085 - RNA, 21 nt, Artificial Sequence
  Synthetic
gaggacaggacacucucagga

SEQ ID NO: 19086 - RNA, 21 nt, Artificial Sequence
  Synthetic
aggacaggacacucucaggac

SEQ ID NO: 19087 - RNA, 21 nt, Artificial Sequence
  Synthetic
ggacaggacacucucaggacu

SEQ ID NO: 19088 - RNA, 21 nt, Artificial Sequence
  Synthetic
gacaggacacucucaggacuu

SEQ ID NO: 19089 - RNA, 21 nt, Artificial Sequence
  Synthetic
acaggacacucucaggacuua

SEQ ID NO: 19090 - RNA, 21 nt, Artificial Sequence
  Synthetic
caggacacucucaggacuuac

SEQ ID NO: 19091 - RNA, 21 nt, Artificial Sequence
  Synthetic
aggacacucucaggacuuaca

SEQ ID NO: 19092 - RNA, 21 nt, Artificial Sequence
  Synthetic
ggacacucucaggacuuacaa

SEQ ID NO: 19093 - RNA, 21 nt, Artificial Sequence
  Synthetic
gacacucucaggacuuacaaa

SEQ ID NO: 19094 - RNA, 21 nt, Artificial Sequence
  Synthetic
acacucucaggacuuacaaau

SEQ ID NO: 19095 - RNA, 21 nt, Artificial Sequence
  Synthetic
cacucucaggacuuacaaauu

SEQ ID NO: 19096 - RNA, 21 nt, Artificial Sequence
  Synthetic
acucucaggacuuacaaauua

SEQ ID NO: 19097 - RNA, 21 nt, Artificial Sequence
  Synthetic
cucucaggacuuacaaauuac

SEQ ID NO: 19098 - RNA, 21 nt, Artificial Sequence
  Synthetic
ucucaggacuuacaaauuaca

SEQ ID NO: 19099 - RNA, 21 nt, Artificial Sequence
  Synthetic
cucaggacuuacaaauuacaa

SEQ ID NO: 19100 - RNA, 21 nt, Artificial Sequence
  Synthetic
ucaggacuuacaaauuacaac

SEQ ID NO: 19101 - RNA, 21 nt, Artificial Sequence
  Synthetic
caggacuuacaaauuacaacu

SEQ ID NO: 19102 - RNA, 21 nt, Artificial Sequence
  Synthetic
aggacuuacaaauuacaacug

SEQ ID NO: 19103 - RNA, 21 nt, Artificial Sequence
  Synthetic
ggacuuacaaauuacaacugc

SEQ ID NO: 19104 - RNA, 21 nt, Artificial Sequence
  Synthetic
gacuuacaaauuacaacugcu

SEQ ID NO: 19105 - RNA, 21 nt, Artificial Sequence
  Synthetic
acuuacaaauuacaacugcua

SEQ ID NO: 19106 - RNA, 21 nt, Artificial Sequence
  Synthetic
cuuacaaauuacaacugcuau

SEQ ID NO: 19107 - RNA, 21 nt, Artificial Sequence
  Synthetic
uuacaaauuacaacugcuauu

SEQ ID NO: 19108 - RNA, 21 nt, Artificial Sequence
  Synthetic
uacaaauuacaacugcuauua

SEQ ID NO: 19109 - RNA, 21 nt, Artificial Sequence
  Synthetic
acaaauuacaacugcuauuac

SEQ ID NO: 19110 - RNA, 21 nt, Artificial Sequence
  Synthetic
caaauuacaacugcuauuaca

SEQ ID NO: 19111 - RNA, 21 nt, Artificial Sequence
  Synthetic
aaauuacaacugcuauuacag

SEQ ID NO: 19112 - RNA, 21 nt, Artificial Sequence
  Synthetic
aauuacaacugcuauuacagc

SEQ ID NO: 19113 - RNA, 21 nt, Artificial Sequence
  Synthetic
auuacaacugcuauuacagcu

SEQ ID NO: 19114 - RNA, 21 nt, Artificial Sequence
  Synthetic
uuacaacugcuauuacagcuc

SEQ ID NO: 19115 - RNA, 21 nt, Artificial Sequence
  Synthetic
uacaacugcuauuacagcuca

SEQ ID NO: 19116 - RNA, 21 nt, Artificial Sequence
  Synthetic
acaacugcuauuacagcucag

SEQ ID NO: 19117 - RNA, 21 nt, Artificial Sequence
  Synthetic
caacugcuauuacagcucagc

SEQ ID NO: 19118 - RNA, 21 nt, Artificial Sequence
  Synthetic
aacugcuauuacagcucagca

SEQ ID NO: 19119 - RNA, 21 nt, Artificial Sequence
  Synthetic
acugcuauuacagcucagcau

SEQ ID NO: 19120 - RNA, 21 nt, Artificial Sequence
  Synthetic
cugcuauuacagcucagcauu

SEQ ID NO: 19121 - RNA, 21 nt, Artificial Sequence
  Synthetic
ugcuauuacagcucagcauuu

SEQ ID NO: 19122 - RNA, 21 nt, Artificial Sequence
  Synthetic
gcuauuacagcucagcauuuc

SEQ ID NO: 19123 - RNA, 21 nt, Artificial Sequence
  Synthetic
cuauuacagcucagcauuuca

SEQ ID NO: 19124 - RNA, 21 nt, Artificial Sequence
  Synthetic
uauuacagcucagcauuucaa

SEQ ID NO: 19125 - RNA, 21 nt, Artificial Sequence
  Synthetic
auuacagcucagcauuucaaa

SEQ ID NO: 19126 - RNA, 21 nt, Artificial Sequence
  Synthetic
uuacagcucagcauuucaaau

SEQ ID NO: 19127 - RNA, 21 nt, Artificial Sequence
  Synthetic
uacagcucagcauuucaaauu

SEQ ID NO: 19128 - RNA, 21 nt, Artificial Sequence
  Synthetic
acagcucagcauuucaaauuc

SEQ ID NO: 19129 - RNA, 21 nt, Artificial Sequence
  Synthetic
cagcucagcauuucaaauuca

SEQ ID NO: 19130 - RNA, 21 nt, Artificial Sequence
  Synthetic
agcucagcauuucaaauucaa

SEQ ID NO: 19131 - RNA, 21 nt, Artificial Sequence
  Synthetic
gcucagcauuucaaauucaag

SEQ ID NO: 19132 - RNA, 21 nt, Artificial Sequence
  Synthetic
cucagcauuucaaauucaaga

SEQ ID NO: 19133 - RNA, 21 nt, Artificial Sequence
  Synthetic
ucagcauuucaaauucaagau

SEQ ID NO: 19134 - RNA, 21 nt, Artificial Sequence
  Synthetic
cagcauuucaaauucaagaua

SEQ ID NO: 19135 - RNA, 21 nt, Artificial Sequence
  Synthetic
agcauuucaaauucaagauaa

SEQ ID NO: 19136 - RNA, 21 nt, Artificial Sequence
  Synthetic
gcauuucaaauucaagauaau

SEQ ID NO: 19137 - RNA, 21 nt, Artificial Sequence
  Synthetic
cauuucaaauucaagauaauu

SEQ ID NO: 19138 - RNA, 21 nt, Artificial Sequence
  Synthetic
auuucaaauucaagauaauuu

SEQ ID NO: 19139 - RNA, 21 nt, Artificial Sequence
  Synthetic
uuucaaauucaagauaauuuc

SEQ ID NO: 19140 - RNA, 21 nt, Artificial Sequence
  Synthetic
uucaaauucaagauaauuucu

SEQ ID NO: 19141 - RNA, 21 nt, Artificial Sequence
  Synthetic
ucaaauucaagauaauuucuu

SEQ ID NO: 19142 - RNA, 21 nt, Artificial Sequence
  Synthetic
caaauucaagauaauuucuua

SEQ ID NO: 19143 - RNA, 21 nt, Artificial Sequence
  Synthetic
aaauucaagauaauuucuuau

SEQ ID NO: 19144 - RNA, 21 nt, Artificial Sequence
  Synthetic
aauucaagauaauuucuuauu

SEQ ID NO: 19145 - RNA, 21 nt, Artificial Sequence
  Synthetic
auucaagauaauuucuuauuc

SEQ ID NO: 19146 - RNA, 21 nt, Artificial Sequence
  Synthetic
uucaagauaauuucuuauuca

SEQ ID NO: 19147 - RNA, 21 nt, Artificial Sequence
  Synthetic
ucaagauaauuucuuauucaa

SEQ ID NO: 19148 - RNA, 21 nt, Artificial Sequence
  Synthetic
caagauaauuucuuauucaaa

SEQ ID NO: 19149 - RNA, 21 nt, Artificial Sequence
  Synthetic
aagauaauuucuuauucaaau

SEQ ID NO: 19150 - RNA, 21 nt, Artificial Sequence
  Synthetic
agauaauuucuuauucaaaug

SEQ ID NO: 19151 - RNA, 21 nt, Artificial Sequence
  Synthetic
gauaauuucuuauucaaaugu

SEQ ID NO: 19152 - RNA, 21 nt, Artificial Sequence
  Synthetic
auaauuucuuauucaaaugug

SEQ ID NO: 19153 - RNA, 21 nt, Artificial Sequence
  Synthetic
uaauuucuuauucaaaugugg

SEQ ID NO: 19154 - RNA, 21 nt, Artificial Sequence
  Synthetic
aauuucuuauucaaaugugga

SEQ ID NO: 19155 - RNA, 21 nt, Artificial Sequence
  Synthetic
auuucuuauucaaauguggac

SEQ ID NO: 19156 - RNA, 21 nt, Artificial Sequence
  Synthetic
uuucuuauucaaauguggacc

SEQ ID NO: 19157 - RNA, 21 nt, Artificial Sequence
  Synthetic
uucuuauucaaauguggacca

SEQ ID NO: 19158 - RNA, 21 nt, Artificial Sequence
  Synthetic
ucuuauucaaauguggaccaa

SEQ ID NO: 19159 - RNA, 21 nt, Artificial Sequence
  Synthetic
cuuauucaaauguggaccaac

SEQ ID NO: 19160 - RNA, 21 nt, Artificial Sequence
  Synthetic
uuauucaaauguggaccaaca

SEQ ID NO: 19161 - RNA, 21 nt, Artificial Sequence
  Synthetic
uauucaaauguggaccaacag

SEQ ID NO: 19162 - RNA, 21 nt, Artificial Sequence
  Synthetic
auucaaauguggaccaacaga

SEQ ID NO: 19163 - RNA, 21 nt, Artificial Sequence
  Synthetic
uucaaauguggaccaacagau

SEQ ID NO: 19164 - RNA, 21 nt, Artificial Sequence
  Synthetic
ucaaauguggaccaacagaua

SEQ ID NO: 19165 - RNA, 21 nt, Artificial Sequence
  Synthetic
caaauguggaccaacagauaa

SEQ ID NO: 19166 - RNA, 21 nt, Artificial Sequence
  Synthetic
aaauguggaccaacagauaac

SEQ ID NO: 19167 - RNA, 21 nt, Artificial Sequence
  Synthetic
aauguggaccaacagauaacu

SEQ ID NO: 19168 - RNA, 21 nt, Artificial Sequence
  Synthetic
auguggaccaacagauaacug

SEQ ID NO: 19169 - RNA, 21 nt, Artificial Sequence
  Synthetic
uguggaccaacagauaacuga

SEQ ID NO: 19170 - RNA, 21 nt, Artificial Sequence
  Synthetic
guggaccaacagauaacugaa

SEQ ID NO: 19171 - RNA, 21 nt, Artificial Sequence
  Synthetic
uggaccaacagauaacugaaa

SEQ ID NO: 19172 - RNA, 21 nt, Artificial Sequence
  Synthetic
ggaccaacagauaacugaaaa

SEQ ID NO: 19173 - RNA, 21 nt, Artificial Sequence
  Synthetic
gaccaacagauaacugaaaau

SEQ ID NO: 19174 - RNA, 21 nt, Artificial Sequence
  Synthetic
accaacagauaacugaaaauu

SEQ ID NO: 19175 - RNA, 21 nt, Artificial Sequence
  Synthetic
ccaacagauaacugaaaauuc

SEQ ID NO: 19176 - RNA, 21 nt, Artificial Sequence
  Synthetic
caacagauaacugaaaauuca

SEQ ID NO: 19177 - RNA, 21 nt, Artificial Sequence
  Synthetic
aacagauaacugaaaauucag

SEQ ID NO: 19178 - RNA, 21 nt, Artificial Sequence
  Synthetic
acagauaacugaaaauucagu

SEQ ID NO: 19179 - RNA, 21 nt, Artificial Sequence
  Synthetic
cagauaacugaaaauucaguu

SEQ ID NO: 19180 - RNA, 21 nt, Artificial Sequence
  Synthetic
agauaacugaaaauucaguuu

SEQ ID NO: 19181 - RNA, 21 nt, Artificial Sequence
  Synthetic
gauaacugaaaauucaguuuc

SEQ ID NO: 19182 - RNA, 21 nt, Artificial Sequence
  Synthetic
auaacugaaaauucaguuuca

SEQ ID NO: 19183 - RNA, 21 nt, Artificial Sequence
  Synthetic
uaacugaaaauucaguuucau

SEQ ID NO: 19184 - RNA, 21 nt, Artificial Sequence
  Synthetic
aacugaaaauucaguuucaug

SEQ ID NO: 19185 - RNA, 21 nt, Artificial Sequence
  Synthetic
acugaaaauucaguuucauga

SEQ ID NO: 19186 - RNA, 21 nt, Artificial Sequence
  Synthetic
cugaaaauucaguuucaugag

SEQ ID NO: 19187 - RNA, 21 nt, Artificial Sequence
  Synthetic
ugaaaauucaguuucaugaga

SEQ ID NO: 19188 - RNA, 21 nt, Artificial Sequence
  Synthetic
gaaaauucaguuucaugagac

SEQ ID NO: 19189 - RNA, 21 nt, Artificial Sequence
  Synthetic
aaaauucaguuucaugagacg

SEQ ID NO: 19190 - RNA, 21 nt, Artificial Sequence
  Synthetic
aaauucaguuucaugagacgu

SEQ ID NO: 19191 - RNA, 21 nt, Artificial Sequence
  Synthetic
aauucaguuucaugagacgua

SEQ ID NO: 19192 - RNA, 21 nt, Artificial Sequence
  Synthetic
auucaguuucaugagacguaa

SEQ ID NO: 19193 - RNA, 21 nt, Artificial Sequence
  Synthetic
uucaguuucaugagacguaag

SEQ ID NO: 19194 - RNA, 21 nt, Artificial Sequence
  Synthetic
ucaguuucaugagacguaagc

SEQ ID NO: 19195 - RNA, 21 nt, Artificial Sequence
  Synthetic
caguuucaugagacguaagca

SEQ ID NO: 19196 - RNA, 21 nt, Artificial Sequence
  Synthetic
aguuucaugagacguaagcag

SEQ ID NO: 19197 - RNA, 21 nt, Artificial Sequence
  Synthetic
guuucaugagacguaagcagc

SEQ ID NO: 19198 - RNA, 21 nt, Artificial Sequence
  Synthetic
uuucaugagacguaagcagcu

SEQ ID NO: 19199 - RNA, 21 nt, Artificial Sequence
  Synthetic
uucaugagacguaagcagcua

SEQ ID NO: 19200 - RNA, 21 nt, Artificial Sequence
  Synthetic
ucaugagacguaagcagcuag

SEQ ID NO: 19201 - RNA, 21 nt, Artificial Sequence
  Synthetic
caugagacguaagcagcuaga

SEQ ID NO: 19202 - RNA, 21 nt, Artificial Sequence
  Synthetic
augagacguaagcagcuagau

SEQ ID NO: 19203 - RNA, 21 nt, Artificial Sequence
  Synthetic
ugagacguaagcagcuagaug

SEQ ID NO: 19204 - RNA, 21 nt, Artificial Sequence
  Synthetic
gagacguaagcagcuagaugu

SEQ ID NO: 19205 - RNA, 21 nt, Artificial Sequence
  Synthetic
agacguaagcagcuagaugua

SEQ ID NO: 19206 - RNA, 21 nt, Artificial Sequence
  Synthetic
gacguaagcagcuagauguaa

SEQ ID NO: 19207 - RNA, 21 nt, Artificial Sequence
  Synthetic
acguaagcagcuagauguaaa

SEQ ID NO: 19208 - RNA, 21 nt, Artificial Sequence
  Synthetic
cguaagcagcuagauguaaag

SEQ ID NO: 19209 - RNA, 21 nt, Artificial Sequence
  Synthetic
guaagcagcuagauguaaagg

SEQ ID NO: 19210 - RNA, 21 nt, Artificial Sequence
  Synthetic
uaagcagcuagauguaaaggg

SEQ ID NO: 19211 - RNA, 21 nt, Artificial Sequence
  Synthetic
aagcagcuagauguaaagggg

SEQ ID NO: 19212 - RNA, 21 nt, Artificial Sequence
  Synthetic
agcagcuagauguaaagggga

SEQ ID NO: 19213 - RNA, 21 nt, Artificial Sequence
  Synthetic
gcagcuagauguaaaggggau

SEQ ID NO: 19214 - RNA, 21 nt, Artificial Sequence
  Synthetic
cagcuagauguaaaggggaua

SEQ ID NO: 19215 - RNA, 21 nt, Artificial Sequence
  Synthetic
agcuagauguaaaggggauaa

SEQ ID NO: 19216 - RNA, 21 nt, Artificial Sequence
  Synthetic
gcuagauguaaaggggauaaa

SEQ ID NO: 19217 - RNA, 21 nt, Artificial Sequence
  Synthetic
cuagauguaaaggggauaaag

SEQ ID NO: 19218 - RNA, 21 nt, Artificial Sequence
  Synthetic
uagauguaaaggggauaaaga

SEQ ID NO: 19219 - RNA, 21 nt, Artificial Sequence
  Synthetic
agauguaaaggggauaaagag

SEQ ID NO: 19220 - RNA, 21 nt, Artificial Sequence
  Synthetic
gauguaaaggggauaaagagg

SEQ ID NO: 19221 - RNA, 21 nt, Artificial Sequence
  Synthetic
auguaaaggggauaaagagga

SEQ ID NO: 19222 - RNA, 21 nt, Artificial Sequence
  Synthetic
uguaaaggggauaaagaggac

SEQ ID NO: 19223 - RNA, 21 nt, Artificial Sequence
  Synthetic
guaaaggggauaaagaggaca

SEQ ID NO: 19224 - RNA, 21 nt, Artificial Sequence
  Synthetic
uaaaggggauaaagaggacaa

SEQ ID NO: 19225 - RNA, 21 nt, Artificial Sequence
  Synthetic
aaaggggauaaagaggacaaa

SEQ ID NO: 19226 - RNA, 21 nt, Artificial Sequence
  Synthetic
aaggggauaaagaggacaaag

SEQ ID NO: 19227 - RNA, 21 nt, Artificial Sequence
  Synthetic
aggggauaaagaggacaaagu

SEQ ID NO: 19228 - RNA, 21 nt, Artificial Sequence
  Synthetic
ggggauaaagaggacaaaguc

SEQ ID NO: 19229 - RNA, 21 nt, Artificial Sequence
  Synthetic
gggauaaagaggacaaaguca

SEQ ID NO: 19230 - RNA, 21 nt, Artificial Sequence
  Synthetic
ggauaaagaggacaaagucau

SEQ ID NO: 19231 - RNA, 21 nt, Artificial Sequence
  Synthetic
gauaaagaggacaaagucaug

SEQ ID NO: 19232 - RNA, 21 nt, Artificial Sequence
  Synthetic
auaaagaggacaaagucaugc

SEQ ID NO: 19233 - RNA, 21 nt, Artificial Sequence
  Synthetic
uaaagaggacaaagucaugcg

SEQ ID NO: 19234 - RNA, 21 nt, Artificial Sequence
  Synthetic
aaagaggacaaagucaugcgc

SEQ ID NO: 19235 - RNA, 21 nt, Artificial Sequence
  Synthetic
aagaggacaaagucaugcgcu

SEQ ID NO: 19236 - RNA, 21 nt, Artificial Sequence
  Synthetic
agaggacaaagucaugcgcuu

SEQ ID NO: 19237 - RNA, 21 nt, Artificial Sequence
  Synthetic
gaggacaaagucaugcgcuuu

SEQ ID NO: 19238 - RNA, 21 nt, Artificial Sequence
  Synthetic
aggacaaagucaugcgcuuuu

SEQ ID NO: 19239 - RNA, 21 nt, Artificial Sequence
  Synthetic
ggacaaagucaugcgcuuuua

SEQ ID NO: 19240 - RNA, 21 nt, Artificial Sequence
  Synthetic
gacaaagucaugcgcuuuuac

SEQ ID NO: 19241 - RNA, 21 nt, Artificial Sequence
  Synthetic
acaaagucaugcgcuuuuaca

SEQ ID NO: 19242 - RNA, 21 nt, Artificial Sequence
  Synthetic
caaagucaugcgcuuuuacau

SEQ ID NO: 19243 - RNA, 21 nt, Artificial Sequence
  Synthetic
aaagucaugcgcuuuuacauu

SEQ ID NO: 19244 - RNA, 21 nt, Artificial Sequence
  Synthetic
aagucaugcgcuuuuacauuc

SEQ ID NO: 19245 - RNA, 21 nt, Artificial Sequence
  Synthetic
agucaugcgcuuuuacauucg

SEQ ID NO: 19246 - RNA, 21 nt, Artificial Sequence
  Synthetic
gucaugcgcuuuuacauucgg

SEQ ID NO: 19247 - RNA, 21 nt, Artificial Sequence
  Synthetic
ucaugcgcuuuuacauucgga

SEQ ID NO: 19248 - RNA, 21 nt, Artificial Sequence
  Synthetic
caugcgcuuuuacauucggaa

SEQ ID NO: 19249 - RNA, 21 nt, Artificial Sequence
  Synthetic
augcgcuuuuacauucggaau

SEQ ID NO: 19250 - RNA, 21 nt, Artificial Sequence
  Synthetic
ugcgcuuuuacauucggaauu

SEQ ID NO: 19251 - RNA, 21 nt, Artificial Sequence
  Synthetic
gcgcuuuuacauucggaauuc

SEQ ID NO: 19252 - RNA, 21 nt, Artificial Sequence
  Synthetic
cgcuuuuacauucggaauucu

SEQ ID NO: 19253 - RNA, 21 nt, Artificial Sequence
  Synthetic
gcuuuuacauucggaauucug

SEQ ID NO: 19254 - RNA, 21 nt, Artificial Sequence
  Synthetic
cuuuuacauucggaauucugc

SEQ ID NO: 19255 - RNA, 21 nt, Artificial Sequence
  Synthetic
uuuuacauucggaauucugca

SEQ ID NO: 19256 - RNA, 21 nt, Artificial Sequence
  Synthetic
uuuacauucggaauucugcac

SEQ ID NO: 19257 - RNA, 21 nt, Artificial Sequence
  Synthetic
uuacauucggaauucugcacu

SEQ ID NO: 19258 - RNA, 21 nt, Artificial Sequence
  Synthetic
uacauucggaauucugcacuu

SEQ ID NO: 19259 - RNA, 21 nt, Artificial Sequence
  Synthetic
acauucggaauucugcacuuc

SEQ ID NO: 19260 - RNA, 21 nt, Artificial Sequence
  Synthetic
cauucggaauucugcacuucc

SEQ ID NO: 19261 - RNA, 21 nt, Artificial Sequence
  Synthetic
auucggaauucugcacuucca

SEQ ID NO: 19262 - RNA, 21 nt, Artificial Sequence
  Synthetic
uucggaauucugcacuuccag

SEQ ID NO: 19263 - RNA, 21 nt, Artificial Sequence
  Synthetic
ucggaauucugcacuuccagc

SEQ ID NO: 19264 - RNA, 21 nt, Artificial Sequence
  Synthetic
cggaauucugcacuuccagca

SEQ ID NO: 19265 - RNA, 21 nt, Artificial Sequence
  Synthetic
ggaauucugcacuuccagcac

SEQ ID NO: 19266 - RNA, 21 nt, Artificial Sequence
  Synthetic
gaauucugcacuuccagcaca

SEQ ID NO: 19267 - RNA, 21 nt, Artificial Sequence
  Synthetic
aauucugcacuuccagcacag

SEQ ID NO: 19268 - RNA, 21 nt, Artificial Sequence
  Synthetic
auucugcacuuccagcacagu

SEQ ID NO: 19269 - RNA, 21 nt, Artificial Sequence
  Synthetic
uucugcacuuccagcacaguu

SEQ ID NO: 19270 - RNA, 21 nt, Artificial Sequence
  Synthetic
ucugcacuuccagcacaguuc

SEQ ID NO: 19271 - RNA, 21 nt, Artificial Sequence
  Synthetic
cugcacuuccagcacaguucu

SEQ ID NO: 19272 - RNA, 21 nt, Artificial Sequence
  Synthetic
ugcacuuccagcacaguucua

SEQ ID NO: 19273 - RNA, 21 nt, Artificial Sequence
  Synthetic
gcacuuccagcacaguucuaa

SEQ ID NO: 19274 - RNA, 21 nt, Artificial Sequence
  Synthetic
cacuuccagcacaguucuaaa

SEQ ID NO: 19275 - RNA, 21 nt, Artificial Sequence
  Synthetic
acuuccagcacaguucuaaac

SEQ ID NO: 19276 - RNA, 21 nt, Artificial Sequence
  Synthetic
cuuccagcacaguucuaaaca

SEQ ID NO: 19277 - RNA, 21 nt, Artificial Sequence
  Synthetic
uuccagcacaguucuaaacau

SEQ ID NO: 19278 - RNA, 21 nt, Artificial Sequence
  Synthetic
uccagcacaguucuaaacauc

SEQ ID NO: 19279 - RNA, 21 nt, Artificial Sequence
  Synthetic
ccagcacaguucuaaacaucu

SEQ ID NO: 19280 - RNA, 21 nt, Artificial Sequence
  Synthetic
cagcacaguucuaaacaucuu

SEQ ID NO: 19281 - RNA, 21 nt, Artificial Sequence
  Synthetic
agcacaguucuaaacaucuug

SEQ ID NO: 19282 - RNA, 21 nt, Artificial Sequence
  Synthetic
gcacaguucuaaacaucuugu

SEQ ID NO: 19283 - RNA, 21 nt, Artificial Sequence
  Synthetic
cacaguucuaaacaucuugua

SEQ ID NO: 19284 - RNA, 21 nt, Artificial Sequence
  Synthetic
acaguucuaaacaucuuguau

SEQ ID NO: 19285 - RNA, 21 nt, Artificial Sequence
  Synthetic
caguucuaaacaucuuguauu

SEQ ID NO: 19286 - RNA, 21 nt, Artificial Sequence
  Synthetic
aguucuaaacaucuuguauug

SEQ ID NO: 19287 - RNA, 21 nt, Artificial Sequence
  Synthetic
guucuaaacaucuuguauuga

SEQ ID NO: 19288 - RNA, 21 nt, Artificial Sequence
  Synthetic
uucuaaacaucuuguauugac

SEQ ID NO: 19289 - RNA, 21 nt, Artificial Sequence
  Synthetic
ucuaaacaucuuguauugacu

SEQ ID NO: 19290 - RNA, 21 nt, Artificial Sequence
  Synthetic
cuaaacaucuuguauugacuu

SEQ ID NO: 19291 - RNA, 21 nt, Artificial Sequence
  Synthetic
uaaacaucuuguauugacuuu

SEQ ID NO: 19292 - RNA, 21 nt, Artificial Sequence
  Synthetic
aaacaucuuguauugacuuug

SEQ ID NO: 19293 - RNA, 21 nt, Artificial Sequence
  Synthetic
aacaucuuguauugacuuugg

SEQ ID NO: 19294 - RNA, 21 nt, Artificial Sequence
  Synthetic
acaucuuguauugacuuugga

SEQ ID NO: 19295 - RNA, 21 nt, Artificial Sequence
  Synthetic
caucuuguauugacuuuggag

SEQ ID NO: 19296 - RNA, 21 nt, Artificial Sequence
  Synthetic
aucuuguauugacuuuggagg

SEQ ID NO: 19297 - RNA, 21 nt, Artificial Sequence
  Synthetic
ucuuguauugacuuuggagga

SEQ ID NO: 19298 - RNA, 21 nt, Artificial Sequence
  Synthetic
cuuguauugacuuuggaggag

SEQ ID NO: 19299 - RNA, 21 nt, Artificial Sequence
  Synthetic
uuguauugacuuuggaggaga

SEQ ID NO: 19300 - RNA, 21 nt, Artificial Sequence
  Synthetic
uguauugacuuuggaggagaa

SEQ ID NO: 19301 - RNA, 21 nt, Artificial Sequence
  Synthetic
guauugacuuuggaggagaau

SEQ ID NO: 19302 - RNA, 21 nt, Artificial Sequence
  Synthetic
uauugacuuuggaggagaaug

SEQ ID NO: 19303 - RNA, 21 nt, Artificial Sequence
  Synthetic
auugacuuuggaggagaauga

SEQ ID NO: 19304 - RNA, 21 nt, Artificial Sequence
  Synthetic
uugacuuuggaggagaaugaa

SEQ ID NO: 19305 - RNA, 21 nt, Artificial Sequence
  Synthetic
ugacuuuggaggagaaugaaa

SEQ ID NO: 19306 - RNA, 21 nt, Artificial Sequence
  Synthetic
gacuuuggaggagaaugaaaa

SEQ ID NO: 19307 - RNA, 21 nt, Artificial Sequence
  Synthetic
acuuuggaggagaaugaaaau

SEQ ID NO: 19308 - RNA, 21 nt, Artificial Sequence
  Synthetic
cuuuggaggagaaugaaaaua

SEQ ID NO: 19309 - RNA, 21 nt, Artificial Sequence
  Synthetic
uuuggaggagaaugaaaauag

SEQ ID NO: 19310 - RNA, 21 nt, Artificial Sequence
  Synthetic
uuggaggagaaugaaaauagu

SEQ ID NO: 19311 - RNA, 21 nt, Artificial Sequence
  Synthetic
uggaggagaaugaaaauagug

SEQ ID NO: 19312 - RNA, 21 nt, Artificial Sequence
  Synthetic
ggaggagaaugaaaauaguga

SEQ ID NO: 19313 - RNA, 21 nt, Artificial Sequence
  Synthetic
gaggagaaugaaaauagugaa

SEQ ID NO: 19314 - RNA, 21 nt, Artificial Sequence
  Synthetic
aggagaaugaaaauagugaag

SEQ ID NO: 19315 - RNA, 21 nt, Artificial Sequence
  Synthetic
ggagaaugaaaauagugaagc

SEQ ID NO: 19316 - RNA, 21 nt, Artificial Sequence
  Synthetic
gagaaugaaaauagugaagca

SEQ ID NO: 19317 - RNA, 21 nt, Artificial Sequence
  Synthetic
agaaugaaaauagugaagcaa

SEQ ID NO: 19318 - RNA, 21 nt, Artificial Sequence
  Synthetic
gaaugaaaauagugaagcaag

SEQ ID NO: 19319 - RNA, 21 nt, Artificial Sequence
  Synthetic
aaugaaaauagugaagcaaga

SEQ ID NO: 19320 - RNA, 21 nt, Artificial Sequence
  Synthetic
augaaaauagugaagcaagag

SEQ ID NO: 19321 - RNA, 21 nt, Artificial Sequence
  Synthetic
ugaaaauagugaagcaagagu

SEQ ID NO: 19322 - RNA, 21 nt, Artificial Sequence
  Synthetic
gaaaauagugaagcaagagug

SEQ ID NO: 19323 - RNA, 21 nt, Artificial Sequence
  Synthetic
aaaauagugaagcaagagugg

SEQ ID NO: 19324 - RNA, 21 nt, Artificial Sequence
  Synthetic
aaauagugaagcaagagugga

SEQ ID NO: 19325 - RNA, 21 nt, Artificial Sequence
  Synthetic
aauagugaagcaagaguggau

SEQ ID NO: 19326 - RNA, 21 nt, Artificial Sequence
  Synthetic
auagugaagcaagaguggauu

SEQ ID NO: 19327 - RNA, 21 nt, Artificial Sequence
  Synthetic
uagugaagcaagaguggauua

SEQ ID NO: 19328 - RNA, 21 nt, Artificial Sequence
  Synthetic
agugaagcaagaguggauuag

SEQ ID NO: 19329 - RNA, 21 nt, Artificial Sequence
  Synthetic
gugaagcaagaguggauuagu

SEQ ID NO: 19330 - RNA, 21 nt, Artificial Sequence
  Synthetic
ugaagcaagaguggauuagua

SEQ ID NO: 19331 - RNA, 21 nt, Artificial Sequence
  Synthetic
gaagcaagaguggauuaguaa

SEQ ID NO: 19332 - RNA, 21 nt, Artificial Sequence
  Synthetic
aagcaagaguggauuaguaaa

SEQ ID NO: 19333 - RNA, 21 nt, Artificial Sequence
  Synthetic
agcaagaguggauuaguaaau

SEQ ID NO: 19334 - RNA, 21 nt, Artificial Sequence
  Synthetic
gcaagaguggauuaguaaaua

SEQ ID NO: 19335 - RNA, 21 nt, Artificial Sequence
  Synthetic
caagaguggauuaguaaauau

SEQ ID NO: 19336 - RNA, 21 nt, Artificial Sequence
  Synthetic
aagaguggauuaguaaauaua

SEQ ID NO: 19337 - RNA, 21 nt, Artificial Sequence
  Synthetic
agaguggauuaguaaauauac

SEQ ID NO: 19338 - RNA, 21 nt, Artificial Sequence
  Synthetic
gaguggauuaguaaauauacu

SEQ ID NO: 19339 - RNA, 21 nt, Artificial Sequence
  Synthetic
aguggauuaguaaauauacuu

SEQ ID NO: 19340 - RNA, 21 nt, Artificial Sequence
  Synthetic
guggauuaguaaauauacuua

SEQ ID NO: 19341 - RNA, 21 nt, Artificial Sequence
  Synthetic
uggauuaguaaauauacuuaa

SEQ ID NO: 19342 - RNA, 21 nt, Artificial Sequence
  Synthetic
ggauuaguaaauauacuuaaa

SEQ ID NO: 19343 - RNA, 21 nt, Artificial Sequence
  Synthetic
gauuaguaaauauacuuaaau

SEQ ID NO: 19344 - RNA, 21 nt, Artificial Sequence
  Synthetic
auuaguaaauauacuuaaauc

SEQ ID NO: 19345 - RNA, 21 nt, Artificial Sequence
  Synthetic
uuaguaaauauacuuaaaucg

SEQ ID NO: 19346 - RNA, 21 nt, Artificial Sequence
  Synthetic
uaguaaauauacuuaaaucgc

SEQ ID NO: 19347 - RNA, 21 nt, Artificial Sequence
  Synthetic
aguaaauauacuuaaaucgca

SEQ ID NO: 19348 - RNA, 21 nt, Artificial Sequence
  Synthetic
guaaauauacuuaaaucgcaa

SEQ ID NO: 19349 - RNA, 21 nt, Artificial Sequence
  Synthetic
uaaauauacuuaaaucgcaau

SEQ ID NO: 19350 - RNA, 21 nt, Artificial Sequence
  Synthetic
aaauauacuuaaaucgcaaua

SEQ ID NO: 19351 - RNA, 21 nt, Artificial Sequence
  Synthetic
aauauacuuaaaucgcaauac

SEQ ID NO: 19352 - RNA, 21 nt, Artificial Sequence
  Synthetic
auauacuuaaaucgcaauacc

SEQ ID NO: 19353 - RNA, 21 nt, Artificial Sequence
  Synthetic
uauacuuaaaucgcaauaccu

SEQ ID NO: 19354 - RNA, 21 nt, Artificial Sequence
  Synthetic
auacuuaaaucgcaauaccua

SEQ ID NO: 19355 - RNA, 21 nt, Artificial Sequence
  Synthetic
uacuuaaaucgcaauaccuag

SEQ ID NO: 19356 - RNA, 21 nt, Artificial Sequence
  Synthetic
acuuaaaucgcaauaccuagg

SEQ ID NO: 19357 - RNA, 21 nt, Artificial Sequence
  Synthetic
cuuaaaucgcaauaccuagga

SEQ ID NO: 19358 - RNA, 21 nt, Artificial Sequence
  Synthetic
uuaaaucgcaauaccuaggag

SEQ ID NO: 19359 - RNA, 21 nt, Artificial Sequence
  Synthetic
uaaaucgcaauaccuaggaga

SEQ ID NO: 19360 - RNA, 21 nt, Artificial Sequence
  Synthetic
aaaucgcaauaccuaggagaa

SEQ ID NO: 19361 - RNA, 21 nt, Artificial Sequence
  Synthetic
aaucgcaauaccuaggagaag

SEQ ID NO: 19362 - RNA, 21 nt, Artificial Sequence
  Synthetic
aucgcaauaccuaggagaaga

SEQ ID NO: 19363 - RNA, 21 nt, Artificial Sequence
  Synthetic
ucgcaauaccuaggagaagag

SEQ ID NO: 19364 - RNA, 21 nt, Artificial Sequence
  Synthetic
cgcaauaccuaggagaagagu

SEQ ID NO: 19365 - RNA, 21 nt, Artificial Sequence
  Synthetic
gcaauaccuaggagaagagug

SEQ ID NO: 19366 - RNA, 21 nt, Artificial Sequence
  Synthetic
caauaccuaggagaagagugu

SEQ ID NO: 19367 - RNA, 21 nt, Artificial Sequence
  Synthetic
aauaccuaggagaagaguguu

SEQ ID NO: 19368 - RNA, 21 nt, Artificial Sequence
  Synthetic
auaccuaggagaagaguguuu

SEQ ID NO: 19369 - RNA, 21 nt, Artificial Sequence
  Synthetic
uaccuaggagaagaguguuug

SEQ ID NO: 19370 - RNA, 21 nt, Artificial Sequence
  Synthetic
accuaggagaagaguguuugg

SEQ ID NO: 19371 - RNA, 21 nt, Artificial Sequence
  Synthetic
ccuaggagaagaguguuuggc

SEQ ID NO: 19372 - RNA, 21 nt, Artificial Sequence
  Synthetic
cuaggagaagaguguuuggcu

SEQ ID NO: 19373 - RNA, 21 nt, Artificial Sequence
  Synthetic
uaggagaagaguguuuggcug

SEQ ID NO: 19374 - RNA, 21 nt, Artificial Sequence
  Synthetic
aggagaagaguguuuggcuga

SEQ ID NO: 19375 - RNA, 21 nt, Artificial Sequence
  Synthetic
ggagaagaguguuuggcugaa

SEQ ID NO: 19376 - RNA, 21 nt, Artificial Sequence
  Synthetic
gagaagaguguuuggcugaac

SEQ ID NO: 19377 - RNA, 21 nt, Artificial Sequence
  Synthetic
agaagaguguuuggcugaacu

SEQ ID NO: 19378 - RNA, 21 nt, Artificial Sequence
  Synthetic
gaagaguguuuggcugaacug

SEQ ID NO: 19379 - RNA, 21 nt, Artificial Sequence
  Synthetic
aagaguguuuggcugaacuga

SEQ ID NO: 19380 - RNA, 21 nt, Artificial Sequence
  Synthetic
agaguguuuggcugaacugaa

SEQ ID NO: 19381 - RNA, 21 nt, Artificial Sequence
  Synthetic
gaguguuuggcugaacugaaa

SEQ ID NO: 19382 - RNA, 21 nt, Artificial Sequence
  Synthetic
aguguuuggcugaacugaaau

SEQ ID NO: 19383 - RNA, 21 nt, Artificial Sequence
  Synthetic
guguuuggcugaacugaaaua

SEQ ID NO: 19384 - RNA, 21 nt, Artificial Sequence
  Synthetic
uguuuggcugaacugaaauac

SEQ ID NO: 19385 - RNA, 21 nt, Artificial Sequence
  Synthetic
guuuggcugaacugaaauacu

SEQ ID NO: 19386 - RNA, 21 nt, Artificial Sequence
  Synthetic
uuuggcugaacugaaauacuu

SEQ ID NO: 19387 - RNA, 21 nt, Artificial Sequence
  Synthetic
uuggcugaacugaaauacuuu

SEQ ID NO: 19388 - RNA, 21 nt, Artificial Sequence
  Synthetic
uggcugaacugaaauacuuuu

SEQ ID NO: 19389 - RNA, 21 nt, Artificial Sequence
  Synthetic
ggcugaacugaaauacuuuua

SEQ ID NO: 19390 - RNA, 21 nt, Artificial Sequence
  Synthetic
gcugaacugaaauacuuuuaa

SEQ ID NO: 19391 - RNA, 21 nt, Artificial Sequence
  Synthetic
cugaacugaaauacuuuuaac

SEQ ID NO: 19392 - RNA, 21 nt, Artificial Sequence
  Synthetic
ugaacugaaauacuuuuaaca

SEQ ID NO: 19393 - RNA, 21 nt, Artificial Sequence
  Synthetic
gaacugaaauacuuuuaacac

SEQ ID NO: 19394 - RNA, 21 nt, Artificial Sequence
  Synthetic
aacugaaauacuuuuaacaca

SEQ ID NO: 19395 - RNA, 21 nt, Artificial Sequence
  Synthetic
acugaaauacuuuuaacacac

SEQ ID NO: 19396 - RNA, 21 nt, Artificial Sequence
  Synthetic
cugaaauacuuuuaacacaca

SEQ ID NO: 19397 - RNA, 21 nt, Artificial Sequence
  Synthetic
ugaaauacuuuuaacacacag

SEQ ID NO: 19398 - RNA, 21 nt, Artificial Sequence
  Synthetic
gaaauacuuuuaacacacagu

SEQ ID NO: 19399 - RNA, 21 nt, Artificial Sequence
  Synthetic
aaauacuuuuaacacacagug

SEQ ID NO: 19400 - RNA, 21 nt, Artificial Sequence
  Synthetic
aauacuuuuaacacacagugc

SEQ ID NO: 19401 - RNA, 21 nt, Artificial Sequence
  Synthetic
auacuuuuaacacacagugca

SEQ ID NO: 19402 - RNA, 21 nt, Artificial Sequence
  Synthetic
uacuuuuaacacacagugcag

SEQ ID NO: 19403 - RNA, 21 nt, Artificial Sequence
  Synthetic
acuuuuaacacacagugcagu

SEQ ID NO: 19404 - RNA, 21 nt, Artificial Sequence
  Synthetic
cuuuuaacacacagugcaguu

SEQ ID NO: 19405 - RNA, 21 nt, Artificial Sequence
  Synthetic
uuuuaacacacagugcaguua

SEQ ID NO: 19406 - RNA, 21 nt, Artificial Sequence
  Synthetic
uuuaacacacagugcaguuac

SEQ ID NO: 19407 - RNA, 21 nt, Artificial Sequence
  Synthetic
uuaacacacagugcaguuaca

SEQ ID NO: 19408 - RNA, 21 nt, Artificial Sequence
  Synthetic
uaacacacagugcaguuacau

SEQ ID NO: 19409 - RNA, 21 nt, Artificial Sequence
  Synthetic
aacacacagugcaguuacaug

SEQ ID NO: 19410 - RNA, 21 nt, Artificial Sequence
  Synthetic
acacacagugcaguuacauga

SEQ ID NO: 19411 - RNA, 21 nt, Artificial Sequence
  Synthetic
cacacagugcaguuacaugag

SEQ ID NO: 19412 - RNA, 21 nt, Artificial Sequence
  Synthetic
acacagugcaguuacaugagu

SEQ ID NO: 19413 - RNA, 21 nt, Artificial Sequence
  Synthetic
cacagugcaguuacaugagug

SEQ ID NO: 19414 - RNA, 21 nt, Artificial Sequence
  Synthetic
acagugcaguuacaugaguga

SEQ ID NO: 19415 - RNA, 21 nt, Artificial Sequence
  Synthetic
cagugcaguuacaugagugac

SEQ ID NO: 19416 - RNA, 21 nt, Artificial Sequence
  Synthetic
agugcaguuacaugagugacu

SEQ ID NO: 19417 - RNA, 21 nt, Artificial Sequence
  Synthetic
gugcaguuacaugagugacuu

SEQ ID NO: 19418 - RNA, 21 nt, Artificial Sequence
  Synthetic
ugcaguuacaugagugacuua

SEQ ID NO: 19419 - RNA, 21 nt, Artificial Sequence
  Synthetic
gcaguuacaugagugacuuaa

SEQ ID NO: 19420 - RNA, 21 nt, Artificial Sequence
  Synthetic
caguuacaugagugacuuaag

SEQ ID NO: 19421 - RNA, 21 nt, Artificial Sequence
  Synthetic
aguuacaugagugacuuaagg

SEQ ID NO: 19422 - RNA, 21 nt, Artificial Sequence
  Synthetic
guuacaugagugacuuaaggg

SEQ ID NO: 19423 - RNA, 21 nt, Artificial Sequence
  Synthetic
uuacaugagugacuuaagggu

SEQ ID NO: 19424 - RNA, 21 nt, Artificial Sequence
  Synthetic
uacaugagugacuuaaggguu

SEQ ID NO: 19425 - RNA, 21 nt, Artificial Sequence
  Synthetic
acaugagugacuuaaggguuc

SEQ ID NO: 19426 - RNA, 21 nt, Artificial Sequence
  Synthetic
caugagugacuuaaggguucu

SEQ ID NO: 19427 - RNA, 21 nt, Artificial Sequence
  Synthetic
augagugacuuaaggguucuu

SEQ ID NO: 19428 - RNA, 21 nt, Artificial Sequence
  Synthetic
ugagugacuuaaggguucuua

SEQ ID NO: 19429 - RNA, 21 nt, Artificial Sequence
  Synthetic
gagugacuuaaggguucuuau

SEQ ID NO: 19430 - RNA, 21 nt, Artificial Sequence
  Synthetic
agugacuuaaggguucuuauc

SEQ ID NO: 19431 - RNA, 21 nt, Artificial Sequence
  Synthetic
gugacuuaaggguucuuaucu

SEQ ID NO: 19432 - RNA, 21 nt, Artificial Sequence
  Synthetic
ugacuuaaggguucuuaucuc

SEQ ID NO: 19433 - RNA, 21 nt, Artificial Sequence
  Synthetic
gacuuaaggguucuuaucucu

SEQ ID NO: 19434 - RNA, 21 nt, Artificial Sequence
  Synthetic
acuuaaggguucuuaucucug

SEQ ID NO: 19435 - RNA, 21 nt, Artificial Sequence
  Synthetic
cuuaaggguucuuaucucugg

SEQ ID NO: 19436 - RNA, 21 nt, Artificial Sequence
  Synthetic
uuaaggguucuuaucucugga

SEQ ID NO: 19437 - RNA, 21 nt, Artificial Sequence
  Synthetic
uaaggguucuuaucucuggac

SEQ ID NO: 19438 - RNA, 21 nt, Artificial Sequence
  Synthetic
aaggguucuuaucucuggacu

SEQ ID NO: 19439 - RNA, 21 nt, Artificial Sequence
  Synthetic
aggguucuuaucucuggacuu

SEQ ID NO: 19440 - RNA, 21 nt, Artificial Sequence
  Synthetic
ggguucuuaucucuggacuuu

SEQ ID NO: 19441 - RNA, 21 nt, Artificial Sequence
  Synthetic
gguucuuaucucuggacuuug

SEQ ID NO: 19442 - RNA, 21 nt, Artificial Sequence
  Synthetic
guucuuaucucuggacuuuga

SEQ ID NO: 19443 - RNA, 21 nt, Artificial Sequence
  Synthetic
uucuuaucucuggacuuugag

SEQ ID NO: 19444 - RNA, 21 nt, Artificial Sequence
  Synthetic
ucuuaucucuggacuuugagu

SEQ ID NO: 19445 - RNA, 21 nt, Artificial Sequence
  Synthetic
cuuaucucuggacuuugaguu

SEQ ID NO: 19446 - RNA, 21 nt, Artificial Sequence
  Synthetic
uuaucucuggacuuugaguuu

SEQ ID NO: 19447 - RNA, 21 nt, Artificial Sequence
  Synthetic
uaucucuggacuuugaguuuu

SEQ ID NO: 19448 - RNA, 21 nt, Artificial Sequence
  Synthetic
aucucuggacuuugaguuuug

SEQ ID NO: 19449 - RNA, 21 nt, Artificial Sequence
  Synthetic
ucucuggacuuugaguuuugg

SEQ ID NO: 19450 - RNA, 21 nt, Artificial Sequence
  Synthetic
cucuggacuuugaguuuuggc

SEQ ID NO: 19451 - RNA, 21 nt, Artificial Sequence
  Synthetic
ucuggacuuugaguuuuggcc

SEQ ID NO: 19452 - RNA, 21 nt, Artificial Sequence
  Synthetic
cuggacuuugaguuuuggccu

SEQ ID NO: 19453 - RNA, 21 nt, Artificial Sequence
  Synthetic
uggacuuugaguuuuggccua

SEQ ID NO: 19454 - RNA, 21 nt, Artificial Sequence
  Synthetic
ggacuuugaguuuuggccuaa

SEQ ID NO: 19455 - RNA, 21 nt, Artificial Sequence
  Synthetic
gacuuugaguuuuggccuaaa

SEQ ID NO: 19456 - RNA, 21 nt, Artificial Sequence
  Synthetic
acuuugaguuuuggccuaaaa

SEQ ID NO: 19457 - RNA, 21 nt, Artificial Sequence
  Synthetic
cuuugaguuuuggccuaaaau

SEQ ID NO: 19458 - RNA, 21 nt, Artificial Sequence
  Synthetic
uuugaguuuuggccuaaaaug

SEQ ID NO: 19459 - RNA, 21 nt, Artificial Sequence
  Synthetic
uugaguuuuggccuaaaauga

SEQ ID NO: 19460 - RNA, 21 nt, Artificial Sequence
  Synthetic
ugaguuuuggccuaaaaugau

SEQ ID NO: 19461 - RNA, 21 nt, Artificial Sequence
  Synthetic
gaguuuuggccuaaaaugaug

SEQ ID NO: 19462 - RNA, 21 nt, Artificial Sequence
  Synthetic
aguuuuggccuaaaaugaugu

SEQ ID NO: 19463 - RNA, 21 nt, Artificial Sequence
  Synthetic
guuuuggccuaaaaugaugua

SEQ ID NO: 19464 - RNA, 21 nt, Artificial Sequence
  Synthetic
uuuuggccuaaaaugauguaa

SEQ ID NO: 19465 - RNA, 21 nt, Artificial Sequence
  Synthetic
uuuggccuaaaaugauguaau

SEQ ID NO: 19466 - RNA, 21 nt, Artificial Sequence
  Synthetic
uuggccuaaaaugauguaaug

SEQ ID NO: 19467 - RNA, 21 nt, Artificial Sequence
  Synthetic
uggccuaaaaugauguaauga

SEQ ID NO: 19468 - RNA, 21 nt, Artificial Sequence
  Synthetic
ggccuaaaaugauguaaugau

SEQ ID NO: 19469 - RNA, 21 nt, Artificial Sequence
  Synthetic
gccuaaaaugauguaaugaug

SEQ ID NO: 19470 - RNA, 21 nt, Artificial Sequence
  Synthetic
ccuaaaaugauguaaugaugu

SEQ ID NO: 19471 - RNA, 21 nt, Artificial Sequence
  Synthetic
cuaaaaugauguaaugauguu

SEQ ID NO: 19472 - RNA, 21 nt, Artificial Sequence
  Synthetic
uaaaaugauguaaugauguug

SEQ ID NO: 19473 - RNA, 21 nt, Artificial Sequence
  Synthetic
aaaaugauguaaugauguugc

SEQ ID NO: 19474 - RNA, 21 nt, Artificial Sequence
  Synthetic
aaaugauguaaugauguugcu

SEQ ID NO: 19475 - RNA, 21 nt, Artificial Sequence
  Synthetic
aaugauguaaugauguugcua

SEQ ID NO: 19476 - RNA, 21 nt, Artificial Sequence
  Synthetic
augauguaaugauguugcuaa

SEQ ID NO: 19477 - RNA, 21 nt, Artificial Sequence
  Synthetic
ugauguaaugauguugcuaaa

SEQ ID NO: 19478 - RNA, 21 nt, Artificial Sequence
  Synthetic
gauguaaugauguugcuaaaa

SEQ ID NO: 19479 - RNA, 21 nt, Artificial Sequence
  Synthetic
auguaaugauguugcuaaaaa

SEQ ID NO: 19480 - RNA, 21 nt, Artificial Sequence
  Synthetic
uguaaugauguugcuaaaaag

SEQ ID NO: 19481 - RNA, 21 nt, Artificial Sequence
  Synthetic
guaaugauguugcuaaaaaga

SEQ ID NO: 19482 - RNA, 21 nt, Artificial Sequence
  Synthetic
uaaugauguugcuaaaaagac

SEQ ID NO: 19483 - RNA, 21 nt, Artificial Sequence
  Synthetic
aaugauguugcuaaaaagaca

SEQ ID NO: 19484 - RNA, 21 nt, Artificial Sequence
  Synthetic
augauguugcuaaaaagacau

SEQ ID NO: 19485 - RNA, 21 nt, Artificial Sequence
  Synthetic
ugauguugcuaaaaagacauu

SEQ ID NO: 19486 - RNA, 21 nt, Artificial Sequence
  Synthetic
gauguugcuaaaaagacauug

SEQ ID NO: 19487 - RNA, 21 nt, Artificial Sequence
  Synthetic
auguugcuaaaaagacauugu

SEQ ID NO: 19488 - RNA, 21 nt, Artificial Sequence
  Synthetic
uguugcuaaaaagacauuguu

SEQ ID NO: 19489 - RNA, 21 nt, Artificial Sequence
  Synthetic
guugcuaaaaagacauuguua

SEQ ID NO: 19490 - RNA, 21 nt, Artificial Sequence
  Synthetic
uugcuaaaaagacauuguuaa

SEQ ID NO: 19491 - RNA, 21 nt, Artificial Sequence
  Synthetic
ugcuaaaaagacauuguuaaa

SEQ ID NO: 19492 - RNA, 21 nt, Artificial Sequence
  Synthetic
gcuaaaaagacauuguuaaag

SEQ ID NO: 19493 - RNA, 21 nt, Artificial Sequence
  Synthetic
cuaaaaagacauuguuaaaga

SEQ ID NO: 19494 - RNA, 21 nt, Artificial Sequence
  Synthetic
uaaaaagacauuguuaaagaa

SEQ ID NO: 19495 - RNA, 21 nt, Artificial Sequence
  Synthetic
aaaaagacauuguuaaagaac

SEQ ID NO: 19496 - RNA, 21 nt, Artificial Sequence
  Synthetic
aaaagacauuguuaaagaacu

SEQ ID NO: 19497 - RNA, 21 nt, Artificial Sequence
  Synthetic
aaagacauuguuaaagaacuu

SEQ ID NO: 19498 - RNA, 21 nt, Artificial Sequence
  Synthetic
aagacauuguuaaagaacuua

SEQ ID NO: 19499 - RNA, 21 nt, Artificial Sequence
  Synthetic
agacauuguuaaagaacuuaa

SEQ ID NO: 19500 - RNA, 21 nt, Artificial Sequence
  Synthetic
gacauuguuaaagaacuuaaa

SEQ ID NO: 19501 - RNA, 21 nt, Artificial Sequence
  Synthetic
acauuguuaaagaacuuaaag

SEQ ID NO: 19502 - RNA, 21 nt, Artificial Sequence
  Synthetic
cauuguuaaagaacuuaaagc

SEQ ID NO: 19503 - RNA, 21 nt, Artificial Sequence
  Synthetic
auuguuaaagaacuuaaagcc

SEQ ID NO: 19504 - RNA, 21 nt, Artificial Sequence
  Synthetic
uuguuaaagaacuuaaagccg

SEQ ID NO: 19505 - RNA, 21 nt, Artificial Sequence
  Synthetic
uguuaaagaacuuaaagccga

SEQ ID NO: 19506 - RNA, 21 nt, Artificial Sequence
  Synthetic
guuaaagaacuuaaagccgaa

SEQ ID NO: 19507 - RNA, 21 nt, Artificial Sequence
  Synthetic
uuaaagaacuuaaagccgaaa

SEQ ID NO: 19508 - RNA, 21 nt, Artificial Sequence
  Synthetic
uaaagaacuuaaagccgaaac

SEQ ID NO: 19509 - RNA, 21 nt, Artificial Sequence
  Synthetic
aaagaacuuaaagccgaaaca

SEQ ID NO: 19510 - RNA, 21 nt, Artificial Sequence
  Synthetic
aagaacuuaaagccgaaacag

SEQ ID NO: 19511 - RNA, 21 nt, Artificial Sequence
  Synthetic
agaacuuaaagccgaaacagc

SEQ ID NO: 19512 - RNA, 21 nt, Artificial Sequence
  Synthetic
gaacuuaaagccgaaacagcu

SEQ ID NO: 19513 - RNA, 21 nt, Artificial Sequence
  Synthetic
aacuuaaagccgaaacagcuc

SEQ ID NO: 19514 - RNA, 21 nt, Artificial Sequence
  Synthetic
acuuaaagccgaaacagcuca

SEQ ID NO: 19515 - RNA, 21 nt, Artificial Sequence
  Synthetic
cuuaaagccgaaacagcucag

SEQ ID NO: 19516 - RNA, 21 nt, Artificial Sequence
  Synthetic
uuaaagccgaaacagcucagc

SEQ ID NO: 19517 - RNA, 21 nt, Artificial Sequence
  Synthetic
uaaagccgaaacagcucagca

SEQ ID NO: 19518 - RNA, 21 nt, Artificial Sequence
  Synthetic
aaagccgaaacagcucagcag

SEQ ID NO: 19519 - RNA, 21 nt, Artificial Sequence
  Synthetic
aagccgaaacagcucagcagg

SEQ ID NO: 19520 - RNA, 21 nt, Artificial Sequence
  Synthetic
agccgaaacagcucagcagga

SEQ ID NO: 19521 - RNA, 21 nt, Artificial Sequence
  Synthetic
gccgaaacagcucagcaggau

SEQ ID NO: 19522 - RNA, 21 nt, Artificial Sequence
  Synthetic
ccgaaacagcucagcaggaug

SEQ ID NO: 19523 - RNA, 21 nt, Artificial Sequence
  Synthetic
cgaaacagcucagcaggauga

SEQ ID NO: 19524 - RNA, 21 nt, Artificial Sequence
  Synthetic
gaaacagcucagcaggaugaa

SEQ ID NO: 19525 - RNA, 21 nt, Artificial Sequence
  Synthetic
aaacagcucagcaggaugaau

SEQ ID NO: 19526 - RNA, 21 nt, Artificial Sequence
  Synthetic
aacagcucagcaggaugaaug

SEQ ID NO: 19527 - RNA, 21 nt, Artificial Sequence
  Synthetic
acagcucagcaggaugaauga

SEQ ID NO: 19528 - RNA, 21 nt, Artificial Sequence
  Synthetic
cagcucagcaggaugaaugaa

SEQ ID NO: 19529 - RNA, 21 nt, Artificial Sequence
  Synthetic
agcucagcaggaugaaugaag

SEQ ID NO: 19530 - RNA, 21 nt, Artificial Sequence
  Synthetic
gcucagcaggaugaaugaaga

SEQ ID NO: 19531 - RNA, 21 nt, Artificial Sequence
  Synthetic
cucagcaggaugaaugaagau

SEQ ID NO: 19532 - RNA, 21 nt, Artificial Sequence
  Synthetic
ucagcaggaugaaugaagaug

SEQ ID NO: 19533 - RNA, 21 nt, Artificial Sequence
  Synthetic
cagcaggaugaaugaagauga

SEQ ID NO: 19534 - RNA, 21 nt, Artificial Sequence
  Synthetic
agcaggaugaaugaagaugaa

SEQ ID NO: 19535 - RNA, 21 nt, Artificial Sequence
  Synthetic
gcaggaugaaugaagaugaag

SEQ ID NO: 19536 - RNA, 21 nt, Artificial Sequence
  Synthetic
caggaugaaugaagaugaagg

SEQ ID NO: 19537 - RNA, 21 nt, Artificial Sequence
  Synthetic
aggaugaaugaagaugaaggu

SEQ ID NO: 19538 - RNA, 21 nt, Artificial Sequence
  Synthetic
ggaugaaugaagaugaaggua

SEQ ID NO: 19539 - RNA, 21 nt, Artificial Sequence
  Synthetic
gaugaaugaagaugaagguac

SEQ ID NO: 19540 - RNA, 21 nt, Artificial Sequence
  Synthetic
augaaugaagaugaagguacu

SEQ ID NO: 19541 - RNA, 21 nt, Artificial Sequence
  Synthetic
ugaaugaagaugaagguacug

SEQ ID NO: 19542 - RNA, 21 nt, Artificial Sequence
  Synthetic
gaaugaagaugaagguacugg

SEQ ID NO: 19543 - RNA, 21 nt, Artificial Sequence
  Synthetic
aaugaagaugaagguacuggc

SEQ ID NO: 19544 - RNA, 21 nt, Artificial Sequence
  Synthetic
augaagaugaagguacuggcu

SEQ ID NO: 19545 - RNA, 21 nt, Artificial Sequence
  Synthetic
ugaagaugaagguacuggcua

SEQ ID NO: 19546 - RNA, 21 nt, Artificial Sequence
  Synthetic
gaagaugaagguacuggcuau

SEQ ID NO: 19547 - RNA, 21 nt, Artificial Sequence
  Synthetic
aagaugaagguacuggcuauc

SEQ ID NO: 19548 - RNA, 21 nt, Artificial Sequence
  Synthetic
agaugaagguacuggcuaucc

SEQ ID NO: 19549 - RNA, 21 nt, Artificial Sequence
  Synthetic
gaugaagguacuggcuauccc

SEQ ID NO: 19550 - RNA, 21 nt, Artificial Sequence
  Synthetic
augaagguacuggcuauccca

SEQ ID NO: 19551 - RNA, 21 nt, Artificial Sequence
  Synthetic
ugaagguacuggcuaucccaa

SEQ ID NO: 19552 - RNA, 21 nt, Artificial Sequence
  Synthetic
gaagguacuggcuaucccaag

SEQ ID NO: 19553 - RNA, 21 nt, Artificial Sequence
  Synthetic
aagguacuggcuaucccaagg

SEQ ID NO: 19554 - RNA, 21 nt, Artificial Sequence
  Synthetic
agguacuggcuaucccaagga

SEQ ID NO: 19555 - RNA, 21 nt, Artificial Sequence
  Synthetic
gguacuggcuaucccaaggag

SEQ ID NO: 19556 - RNA, 21 nt, Artificial Sequence
  Synthetic
guacuggcuaucccaaggagc

SEQ ID NO: 19557 - RNA, 21 nt, Artificial Sequence
  Synthetic
uacuggcuaucccaaggagcc

SEQ ID NO: 19558 - RNA, 21 nt, Artificial Sequence
  Synthetic
acuggcuaucccaaggagccc

SEQ ID NO: 19559 - RNA, 21 nt, Artificial Sequence
  Synthetic
cuggcuaucccaaggagccca

SEQ ID NO: 19560 - RNA, 21 nt, Artificial Sequence
  Synthetic
uggcuaucccaaggagcccau

SEQ ID NO: 19561 - RNA, 21 nt, Artificial Sequence
  Synthetic
ggcuaucccaaggagcccauu

SEQ ID NO: 19562 - RNA, 21 nt, Artificial Sequence
  Synthetic
gcuaucccaaggagcccauuc

SEQ ID NO: 19563 - RNA, 21 nt, Artificial Sequence
  Synthetic
cuaucccaaggagcccauuca

SEQ ID NO: 19564 - RNA, 21 nt, Artificial Sequence
  Synthetic
uaucccaaggagcccauucaa

SEQ ID NO: 19565 - RNA, 21 nt, Artificial Sequence
  Synthetic
aucccaaggagcccauucaac

SEQ ID NO: 19566 - RNA, 21 nt, Artificial Sequence
  Synthetic
ucccaaggagcccauucaaca

SEQ ID NO: 19567 - RNA, 21 nt, Artificial Sequence
  Synthetic
cccaaggagcccauucaacag

SEQ ID NO: 19568 - RNA, 21 nt, Artificial Sequence
  Synthetic
ccaaggagcccauucaacagc

SEQ ID NO: 19569 - RNA, 21 nt, Artificial Sequence
  Synthetic
caaggagcccauucaacagca

SEQ ID NO: 19570 - RNA, 21 nt, Artificial Sequence
  Synthetic
aaggagcccauucaacagcag

SEQ ID NO: 19571 - RNA, 21 nt, Artificial Sequence
  Synthetic
aggagcccauucaacagcagc

SEQ ID NO: 19572 - RNA, 21 nt, Artificial Sequence
  Synthetic
ggagcccauucaacagcagcu

SEQ ID NO: 19573 - RNA, 21 nt, Artificial Sequence
  Synthetic
gagcccauucaacagcagcuu

SEQ ID NO: 19574 - RNA, 21 nt, Artificial Sequence
  Synthetic
agcccauucaacagcagcuua

SEQ ID NO: 19575 - RNA, 21 nt, Artificial Sequence
  Synthetic
gcccauucaacagcagcuuac

SEQ ID NO: 19576 - RNA, 21 nt, Artificial Sequence
  Synthetic
cccauucaacagcagcuuacc

SEQ ID NO: 19577 - RNA, 21 nt, Artificial Sequence
  Synthetic
ccauucaacagcagcuuaccu

SEQ ID NO: 19578 - RNA, 21 nt, Artificial Sequence
  Synthetic
cauucaacagcagcuuaccuc

SEQ ID NO: 19579 - RNA, 21 nt, Artificial Sequence
  Synthetic
auucaacagcagcuuaccucu

SEQ ID NO: 19580 - RNA, 21 nt, Artificial Sequence
  Synthetic
uucaacagcagcuuaccucuu

SEQ ID NO: 19581 - RNA, 21 nt, Artificial Sequence
  Synthetic
ucaacagcagcuuaccucuuc

SEQ ID NO: 19582 - RNA, 21 nt, Artificial Sequence
  Synthetic
caacagcagcuuaccucuucu

SEQ ID NO: 19583 - RNA, 21 nt, Artificial Sequence
  Synthetic
aacagcagcuuaccucuucuc

SEQ ID NO: 19584 - RNA, 21 nt, Artificial Sequence
  Synthetic
acagcagcuuaccucuucuca

SEQ ID NO: 19585 - RNA, 21 nt, Artificial Sequence
  Synthetic
cagcagcuuaccucuucucag

SEQ ID NO: 19586 - RNA, 21 nt, Artificial Sequence
  Synthetic
agcagcuuaccucuucucagc

SEQ ID NO: 19587 - RNA, 21 nt, Artificial Sequence
  Synthetic
gcagcuuaccucuucucagcu

SEQ ID NO: 19588 - RNA, 21 nt, Artificial Sequence
  Synthetic
cagcuuaccucuucucagcuc

SEQ ID NO: 19589 - RNA, 21 nt, Artificial Sequence
  Synthetic
agcuuaccucuucucagcucc

SEQ ID NO: 19590 - RNA, 21 nt, Artificial Sequence
  Synthetic
gcuuaccucuucucagcucca

SEQ ID NO: 19591 - RNA, 21 nt, Artificial Sequence
  Synthetic
cuuaccucuucucagcuccau

SEQ ID NO: 19592 - RNA, 21 nt, Artificial Sequence
  Synthetic
uuaccucuucucagcuccaua

SEQ ID NO: 19593 - RNA, 21 nt, Artificial Sequence
  Synthetic
uaccucuucucagcuccauau

SEQ ID NO: 19594 - RNA, 21 nt, Artificial Sequence
  Synthetic
accucuucucagcuccauauu

SEQ ID NO: 19595 - RNA, 21 nt, Artificial Sequence
  Synthetic
ccucuucucagcuccauauuu

SEQ ID NO: 19596 - RNA, 21 nt, Artificial Sequence
  Synthetic
cucuucucagcuccauauuuu

SEQ ID NO: 19597 - RNA, 21 nt, Artificial Sequence
  Synthetic
ucuucucagcuccauauuuuc

SEQ ID NO: 19598 - RNA, 21 nt, Artificial Sequence
  Synthetic
cuucucagcuccauauuuuca

SEQ ID NO: 19599 - RNA, 21 nt, Artificial Sequence
  Synthetic
uucucagcuccauauuuucaa

SEQ ID NO: 19600 - RNA, 21 nt, Artificial Sequence
  Synthetic
ucucagcuccauauuuucaau

SEQ ID NO: 19601 - RNA, 21 nt, Artificial Sequence
  Synthetic
cucagcuccauauuuucaaug

SEQ ID NO: 19602 - RNA, 21 nt, Artificial Sequence
  Synthetic
ucagcuccauauuuucaaugu

SEQ ID NO: 19603 - RNA, 21 nt, Artificial Sequence
  Synthetic
cagcuccauauuuucaaugug

SEQ ID NO: 19604 - RNA, 21 nt, Artificial Sequence
  Synthetic
agcuccauauuuucaauguga

SEQ ID NO: 19605 - RNA, 21 nt, Artificial Sequence
  Synthetic
gcuccauauuuucaaugugac

SEQ ID NO: 19606 - RNA, 21 nt, Artificial Sequence
  Synthetic
cuccauauuuucaaugugacu

SEQ ID NO: 19607 - RNA, 21 nt, Artificial Sequence
  Synthetic
uccauauuuucaaugugacug

SEQ ID NO: 19608 - RNA, 21 nt, Artificial Sequence
  Synthetic
ccauauuuucaaugugacugg

SEQ ID NO: 19609 - RNA, 21 nt, Artificial Sequence
  Synthetic
cauauuuucaaugugacuggg

SEQ ID NO: 19610 - RNA, 21 nt, Artificial Sequence
  Synthetic
auauuuucaaugugacugggu

SEQ ID NO: 19611 - RNA, 21 nt, Artificial Sequence
  Synthetic
uauuuucaaugugacuggguc

SEQ ID NO: 19612 - RNA, 21 nt, Artificial Sequence
  Synthetic
auuuucaaugugacugggucu

SEQ ID NO: 19613 - RNA, 21 nt, Artificial Sequence
  Synthetic
uuuucaaugugacugggucuu

SEQ ID NO: 19614 - RNA, 21 nt, Artificial Sequence
  Synthetic
uuucaaugugacugggucuua

SEQ ID NO: 19615 - RNA, 21 nt, Artificial Sequence
  Synthetic
uucaaugugacugggucuuau

SEQ ID NO: 19616 - RNA, 21 nt, Artificial Sequence
  Synthetic
ucaaugugacugggucuuaua

SEQ ID NO: 19617 - RNA, 21 nt, Artificial Sequence
  Synthetic
caaugugacugggucuuauag

SEQ ID NO: 19618 - RNA, 21 nt, Artificial Sequence
  Synthetic
aaugugacugggucuuauagu

SEQ ID NO: 19619 - RNA, 21 nt, Artificial Sequence
  Synthetic
augugacugggucuuauagua

SEQ ID NO: 19620 - RNA, 21 nt, Artificial Sequence
  Synthetic
ugugacugggucuuauaguac

SEQ ID NO: 19621 - RNA, 21 nt, Artificial Sequence
  Synthetic
gugacugggucuuauaguaca

SEQ ID NO: 19622 - RNA, 21 nt, Artificial Sequence
  Synthetic
ugacugggucuuauaguacag

SEQ ID NO: 19623 - RNA, 21 nt, Artificial Sequence
  Synthetic
gacugggucuuauaguacagg

SEQ ID NO: 19624 - RNA, 21 nt, Artificial Sequence
  Synthetic
acugggucuuauaguacaggc

SEQ ID NO: 19625 - RNA, 21 nt, Artificial Sequence
  Synthetic
cugggucuuauaguacaggcu

SEQ ID NO: 19626 - RNA, 21 nt, Artificial Sequence
  Synthetic
ugggucuuauaguacaggcuu

SEQ ID NO: 19627 - RNA, 21 nt, Artificial Sequence
  Synthetic
gggucuuauaguacaggcuug

SEQ ID NO: 19628 - RNA, 21 nt, Artificial Sequence
  Synthetic
ggucuuauaguacaggcuugu

SEQ ID NO: 19629 - RNA, 21 nt, Artificial Sequence
  Synthetic
gucuuauaguacaggcuugua

SEQ ID NO: 19630 - RNA, 21 nt, Artificial Sequence
  Synthetic
ucuuauaguacaggcuuguau

SEQ ID NO: 19631 - RNA, 21 nt, Artificial Sequence
  Synthetic
cuuauaguacaggcuuguauu

SEQ ID NO: 19632 - RNA, 21 nt, Artificial Sequence
  Synthetic
uuauaguacaggcuuguauuc

SEQ ID NO: 19633 - RNA, 21 nt, Artificial Sequence
  Synthetic
uauaguacaggcuuguauuca

SEQ ID NO: 19634 - RNA, 21 nt, Artificial Sequence
  Synthetic
auaguacaggcuuguauucau

SEQ ID NO: 19635 - RNA, 21 nt, Artificial Sequence
  Synthetic
uaguacaggcuuguauucauc

SEQ ID NO: 19636 - RNA, 21 nt, Artificial Sequence
  Synthetic
aguacaggcuuguauucauca

SEQ ID NO: 19637 - RNA, 21 nt, Artificial Sequence
  Synthetic
guacaggcuuguauucaucac

SEQ ID NO: 19638 - RNA, 21 nt, Artificial Sequence
  Synthetic
uacaggcuuguauucaucaca

SEQ ID NO: 19639 - RNA, 21 nt, Artificial Sequence
  Synthetic
acaggcuuguauucaucacag

SEQ ID NO: 19640 - RNA, 21 nt, Artificial Sequence
  Synthetic
caggcuuguauucaucacaga

SEQ ID NO: 19641 - RNA, 21 nt, Artificial Sequence
  Synthetic
aggcuuguauucaucacagau

SEQ ID NO: 19642 - RNA, 21 nt, Artificial Sequence
  Synthetic
ggcuuguauucaucacagaug

SEQ ID NO: 19643 - RNA, 21 nt, Artificial Sequence
  Synthetic
gcuuguauucaucacagaugu

SEQ ID NO: 19644 - RNA, 21 nt, Artificial Sequence
  Synthetic
cuuguauucaucacagauguu

SEQ ID NO: 19645 - RNA, 21 nt, Artificial Sequence
  Synthetic
uuguauucaucacagauguuu

SEQ ID NO: 19646 - RNA, 21 nt, Artificial Sequence
  Synthetic
uguauucaucacagauguuug

SEQ ID NO: 19647 - RNA, 21 nt, Artificial Sequence
  Synthetic
guauucaucacagauguuugg

SEQ ID NO: 19648 - RNA, 21 nt, Artificial Sequence
  Synthetic
uauucaucacagauguuugga

SEQ ID NO: 19649 - RNA, 21 nt, Artificial Sequence
  Synthetic
auucaucacagauguuuggaa

SEQ ID NO: 19650 - RNA, 21 nt, Artificial Sequence
  Synthetic
uucaucacagauguuuggaac

SEQ ID NO: 19651 - RNA, 21 nt, Artificial Sequence
  Synthetic
ucaucacagauguuuggaacu

SEQ ID NO: 19652 - RNA, 21 nt, Artificial Sequence
  Synthetic
caucacagauguuuggaacuu

SEQ ID NO: 19653 - RNA, 21 nt, Artificial Sequence
  Synthetic
aucacagauguuuggaacuuc

SEQ ID NO: 19654 - RNA, 21 nt, Artificial Sequence
  Synthetic
ucacagauguuuggaacuuca

SEQ ID NO: 19655 - RNA, 21 nt, Artificial Sequence
  Synthetic
cacagauguuuggaacuucag

SEQ ID NO: 19656 - RNA, 21 nt, Artificial Sequence
  Synthetic
acagauguuuggaacuucaga

SEQ ID NO: 19657 - RNA, 21 nt, Artificial Sequence
  Synthetic
cagauguuuggaacuucagaa

SEQ ID NO: 19658 - RNA, 21 nt, Artificial Sequence
  Synthetic
agauguuuggaacuucagaau

SEQ ID NO: 19659 - RNA, 21 nt, Artificial Sequence
  Synthetic
gauguuuggaacuucagaaua

SEQ ID NO: 19660 - RNA, 21 nt, Artificial Sequence
  Synthetic
auguuuggaacuucagaauaa

SEQ ID NO: 19661 - RNA, 21 nt, Artificial Sequence
  Synthetic
uguuuggaacuucagaauaau

SEQ ID NO: 19662 - RNA, 21 nt, Artificial Sequence
  Synthetic
guuuggaacuucagaauaaua

SEQ ID NO: 19663 - RNA, 21 nt, Artificial Sequence
  Synthetic
uuuggaacuucagaauaauac

SEQ ID NO: 19664 - RNA, 21 nt, Artificial Sequence
  Synthetic
uuggaacuucagaauaauaca

SEQ ID NO: 19665 - RNA, 21 nt, Artificial Sequence
  Synthetic
uggaacuucagaauaauacau

SEQ ID NO: 19666 - RNA, 21 nt, Artificial Sequence
  Synthetic
ggaacuucagaauaauacaug

SEQ ID NO: 19667 - RNA, 21 nt, Artificial Sequence
  Synthetic
gaacuucagaauaauacaugg

SEQ ID NO: 19668 - RNA, 21 nt, Artificial Sequence
  Synthetic
aacuucagaauaauacauggu

SEQ ID NO: 19669 - RNA, 21 nt, Artificial Sequence
  Synthetic
acuucagaauaauacauggug

SEQ ID NO: 19670 - RNA, 21 nt, Artificial Sequence
  Synthetic
cuucagaauaauacauggugc

SEQ ID NO: 19671 - RNA, 21 nt, Artificial Sequence
  Synthetic
uucagaauaauacauggugca

SEQ ID NO: 19672 - RNA, 21 nt, Artificial Sequence
  Synthetic
ucagaauaauacauggugcaa

SEQ ID NO: 19673 - RNA, 21 nt, Artificial Sequence
  Synthetic
cagaauaauacauggugcaaa

SEQ ID NO: 19674 - RNA, 21 nt, Artificial Sequence
  Synthetic
agaauaauacauggugcaaau

SEQ ID NO: 19675 - RNA, 21 nt, Artificial Sequence
  Synthetic
gaauaauacauggugcaaauu

SEQ ID NO: 19676 - RNA, 21 nt, Artificial Sequence
  Synthetic
aauaauacauggugcaaauuu

SEQ ID NO: 19677 - RNA, 21 nt, Artificial Sequence
  Synthetic
auaauacauggugcaaauuug

SEQ ID NO: 19678 - RNA, 21 nt, Artificial Sequence
  Synthetic
uaauacauggugcaaauuugc

SEQ ID NO: 19679 - RNA, 21 nt, Artificial Sequence
  Synthetic
aauacauggugcaaauuugca

SEQ ID NO: 19680 - RNA, 21 nt, Artificial Sequence
  Synthetic
auacauggugcaaauuugcau

SEQ ID NO: 19681 - RNA, 21 nt, Artificial Sequence
  Synthetic
uacauggugcaaauuugcauu

SEQ ID NO: 19682 - RNA, 21 nt, Artificial Sequence
  Synthetic
acauggugcaaauuugcauuu

SEQ ID NO: 19683 - RNA, 21 nt, Artificial Sequence
  Synthetic
cauggugcaaauuugcauuua

SEQ ID NO: 19684 - RNA, 21 nt, Artificial Sequence
  Synthetic
auggugcaaauuugcauuuac

SEQ ID NO: 19685 - RNA, 21 nt, Artificial Sequence
  Synthetic
uggugcaaauuugcauuuacc

SEQ ID NO: 19686 - RNA, 21 nt, Artificial Sequence
  Synthetic
ggugcaaauuugcauuuaccu

SEQ ID NO: 19687 - RNA, 21 nt, Artificial Sequence
  Synthetic
gugcaaauuugcauuuaccuu

SEQ ID NO: 19688 - RNA, 21 nt, Artificial Sequence
  Synthetic
ugcaaauuugcauuuaccuuc

SEQ ID NO: 19689 - RNA, 21 nt, Artificial Sequence
  Synthetic
gcaaauuugcauuuaccuucc

SEQ ID NO: 19690 - RNA, 21 nt, Artificial Sequence
  Synthetic
caaauuugcauuuaccuucca

SEQ ID NO: 19691 - RNA, 21 nt, Artificial Sequence
  Synthetic
aaauuugcauuuaccuuccau

SEQ ID NO: 19692 - RNA, 21 nt, Artificial Sequence
  Synthetic
aauuugcauuuaccuuccauu

SEQ ID NO: 19693 - RNA, 21 nt, Artificial Sequence
  Synthetic
auuugcauuuaccuuccauug

SEQ ID NO: 19694 - RNA, 21 nt, Artificial Sequence
  Synthetic
uuugcauuuaccuuccauugu

SEQ ID NO: 19695 - RNA, 21 nt, Artificial Sequence
  Synthetic
uugcauuuaccuuccauugua

SEQ ID NO: 19696 - RNA, 21 nt, Artificial Sequence
  Synthetic
ugcauuuaccuuccauuguaa

SEQ ID NO: 19697 - RNA, 21 nt, Artificial Sequence
  Synthetic
gcauuuaccuuccauuguaaa

SEQ ID NO: 19698 - RNA, 21 nt, Artificial Sequence
  Synthetic
cauuuaccuuccauuguaaau

SEQ ID NO: 19699 - RNA, 21 nt, Artificial Sequence
  Synthetic
auuuaccuuccauuguaaauc

SEQ ID NO: 19700 - RNA, 21 nt, Artificial Sequence
  Synthetic
uuuaccuuccauuguaaauca

SEQ ID NO: 19701 - RNA, 21 nt, Artificial Sequence
  Synthetic
uuaccuuccauuguaaaucag

SEQ ID NO: 19702 - RNA, 21 nt, Artificial Sequence
  Synthetic
uaccuuccauuguaaaucagu

SEQ ID NO: 19703 - RNA, 21 nt, Artificial Sequence
  Synthetic
accuuccauuguaaaucaguu

SEQ ID NO: 19704 - RNA, 21 nt, Artificial Sequence
  Synthetic
ccuuccauuguaaaucaguuc

SEQ ID NO: 19705 - RNA, 21 nt, Artificial Sequence
  Synthetic
cuuccauuguaaaucaguucc

SEQ ID NO: 19706 - RNA, 21 nt, Artificial Sequence
  Synthetic
uuccauuguaaaucaguucca

SEQ ID NO: 19707 - RNA, 21 nt, Artificial Sequence
  Synthetic
uccauuguaaaucaguuccaa

SEQ ID NO: 19708 - RNA, 21 nt, Artificial Sequence
  Synthetic
ccauuguaaaucaguuccaau

SEQ ID NO: 19709 - RNA, 21 nt, Artificial Sequence
  Synthetic
cauuguaaaucaguuccaaua

SEQ ID NO: 19710 - RNA, 21 nt, Artificial Sequence
  Synthetic
auuguaaaucaguuccaauaa

SEQ ID NO: 19711 - RNA, 21 nt, Artificial Sequence
  Synthetic
uuguaaaucaguuccaauaaa

SEQ ID NO: 19712 - RNA, 21 nt, Artificial Sequence
  Synthetic
uguaaaucaguuccaauaaaa

SEQ ID NO: 19713 - RNA, 21 nt, Artificial Sequence
  Synthetic
guaaaucaguuccaauaaaag

SEQ ID NO: 19714 - RNA, 21 nt, Artificial Sequence
  Synthetic
uaaaucaguuccaauaaaaga

SEQ ID NO: 19715 - RNA, 21 nt, Artificial Sequence
  Synthetic
aaaucaguuccaauaaaagau

SEQ ID NO: 19716 - RNA, 21 nt, Artificial Sequence
  Synthetic
aaucaguuccaauaaaagaua

SEQ ID NO: 19717 - RNA, 21 nt, Artificial Sequence
  Synthetic
aucaguuccaauaaaagauaa

SEQ ID NO: 19718 - RNA, 21 nt, Artificial Sequence
  Synthetic
ucaguuccaauaaaagauaau

SEQ ID NO: 19719 - RNA, 21 nt, Artificial Sequence
  Synthetic
caguuccaauaaaagauaaua

SEQ ID NO: 19720 - RNA, 21 nt, Artificial Sequence
  Synthetic
aguuccaauaaaagauaauau

SEQ ID NO: 19721 - RNA, 21 nt, Artificial Sequence
  Synthetic
guuccaauaaaagauaauaua

SEQ ID NO: 19722 - RNA, 21 nt, Artificial Sequence
  Synthetic
uuccaauaaaagauaauauaa

SEQ ID NO: 19723 - RNA, 21 nt, Artificial Sequence
  Synthetic
uccaauaaaagauaauauaaa

SEQ ID NO: 19724 - RNA, 21 nt, Artificial Sequence
  Synthetic
ccaauaaaagauaauauaaaa

SEQ ID NO: 19725 - RNA, 21 nt, Artificial Sequence
  Synthetic
caauaaaagauaauauaaaag

SEQ ID NO: 19726 - RNA, 21 nt, Artificial Sequence
  Synthetic
aauaaaagauaauauaaaagg

SEQ ID NO: 19727 - RNA, 21 nt, Artificial Sequence
  Synthetic
auaaaagauaauauaaaaggc

SEQ ID NO: 19728 - RNA, 21 nt, Artificial Sequence
  Synthetic
uaaaagauaauauaaaaggca

SEQ ID NO: 19729 - RNA, 21 nt, Artificial Sequence
  Synthetic
aaaagauaauauaaaaggcag

SEQ ID NO: 19730 - RNA, 21 nt, Artificial Sequence
  Synthetic
aaagauaauauaaaaggcaga

SEQ ID NO: 19731 - RNA, 21 nt, Artificial Sequence
  Synthetic
aagauaauauaaaaggcagag

SEQ ID NO: 19732 - RNA, 21 nt, Artificial Sequence
  Synthetic
agauaauauaaaaggcagagc

SEQ ID NO: 19733 - RNA, 21 nt, Artificial Sequence
  Synthetic
gauaauauaaaaggcagagcu

SEQ ID NO: 19734 - RNA, 21 nt, Artificial Sequence
  Synthetic
auaauauaaaaggcagagcuu

SEQ ID NO: 19735 - RNA, 21 nt, Artificial Sequence
  Synthetic
uaauauaaaaggcagagcuuc

SEQ ID NO: 19736 - RNA, 21 nt, Artificial Sequence
  Synthetic
aauauaaaaggcagagcuucu

SEQ ID NO: 19737 - RNA, 21 nt, Artificial Sequence
  Synthetic
auauaaaaggcagagcuucug

SEQ ID NO: 19738 - RNA, 21 nt, Artificial Sequence
  Synthetic
uauaaaaggcagagcuucugc

SEQ ID NO: 19739 - RNA, 21 nt, Artificial Sequence
  Synthetic
auaaaaggcagagcuucugcc

SEQ ID NO: 19740 - RNA, 21 nt, Artificial Sequence
  Synthetic
uaaaaggcagagcuucugccu

SEQ ID NO: 19741 - RNA, 21 nt, Artificial Sequence
  Synthetic
aaaaggcagagcuucugccuu

SEQ ID NO: 19742 - RNA, 21 nt, Artificial Sequence
  Synthetic
aaaggcagagcuucugccuug

SEQ ID NO: 19743 - RNA, 21 nt, Artificial Sequence
  Synthetic
aaggcagagcuucugccuugg

SEQ ID NO: 19744 - RNA, 21 nt, Artificial Sequence
  Synthetic
aggcagagcuucugccuugga

SEQ ID NO: 19745 - RNA, 21 nt, Artificial Sequence
  Synthetic
ggcagagcuucugccuuggau

SEQ ID NO: 19746 - RNA, 21 nt, Artificial Sequence
  Synthetic
gcagagcuucugccuuggauu

SEQ ID NO: 19747 - RNA, 21 nt, Artificial Sequence
  Synthetic
cagagcuucugccuuggauuu

SEQ ID NO: 19748 - RNA, 21 nt, Artificial Sequence
  Synthetic
agagcuucugccuuggauuuu

SEQ ID NO: 19749 - RNA, 21 nt, Artificial Sequence
  Synthetic
gagcuucugccuuggauuuug

SEQ ID NO: 19750 - RNA, 21 nt, Artificial Sequence
  Synthetic
agcuucugccuuggauuuugu

SEQ ID NO: 19751 - RNA, 21 nt, Artificial Sequence
  Synthetic
gcuucugccuuggauuuugug

SEQ ID NO: 19752 - RNA, 21 nt, Artificial Sequence
  Synthetic
cuucugccuuggauuuugugu

SEQ ID NO: 19753 - RNA, 21 nt, Artificial Sequence
  Synthetic
uucugccuuggauuuuguguu

SEQ ID NO: 19754 - RNA, 21 nt, Artificial Sequence
  Synthetic
ucugccuuggauuuuguguuc

SEQ ID NO: 19755 - RNA, 21 nt, Artificial Sequence
  Synthetic
cugccuuggauuuuguguucu

SEQ ID NO: 19756 - RNA, 21 nt, Artificial Sequence
  Synthetic
ugccuuggauuuuguguucuu

SEQ ID NO: 19757 - RNA, 21 nt, Artificial Sequence
  Synthetic
gccuuggauuuuguguucuuu

SEQ ID NO: 19758 - RNA, 21 nt, Artificial Sequence
  Synthetic
ccuuggauuuuguguucuuua

SEQ ID NO: 19759 - RNA, 21 nt, Artificial Sequence
  Synthetic
cuuggauuuuguguucuuuaa

SEQ ID NO: 19760 - RNA, 21 nt, Artificial Sequence
  Synthetic
uuggauuuuguguucuuuaaa

SEQ ID NO: 19761 - RNA, 21 nt, Artificial Sequence
  Synthetic
uggauuuuguguucuuuaaau

SEQ ID NO: 19762 - RNA, 21 nt, Artificial Sequence
  Synthetic
ggauuuuguguucuuuaaauu

SEQ ID NO: 19763 - RNA, 21 nt, Artificial Sequence
  Synthetic
gauuuuguguucuuuaaauuu

SEQ ID NO: 19764 - RNA, 21 nt, Artificial Sequence
  Synthetic
auuuuguguucuuuaaauuuu

SEQ ID NO: 19765 - RNA, 21 nt, Artificial Sequence
  Synthetic
uuuuguguucuuuaaauuuuu

SEQ ID NO: 19766 - RNA, 21 nt, Artificial Sequence
  Synthetic
uuuguguucuuuaaauuuuuu

SEQ ID NO: 19767 - RNA, 21 nt, Artificial Sequence
  Synthetic
uuguguucuuuaaauuuuuug

SEQ ID NO: 19768 - RNA, 21 nt, Artificial Sequence
  Synthetic
uguguucuuuaaauuuuuugg

SEQ ID NO: 19769 - RNA, 21 nt, Artificial Sequence
  Synthetic
guguucuuuaaauuuuuuggu

SEQ ID NO: 19770 - RNA, 21 nt, Artificial Sequence
  Synthetic
uguucuuuaaauuuuuuggug

SEQ ID NO: 19771 - RNA, 21 nt, Artificial Sequence
  Synthetic
guucuuuaaauuuuuuggugc

SEQ ID NO: 19772 - RNA, 21 nt, Artificial Sequence
  Synthetic
uucuuuaaauuuuuuggugca

SEQ ID NO: 19773 - RNA, 21 nt, Artificial Sequence
  Synthetic
ucuuuaaauuuuuuggugcau

SEQ ID NO: 19774 - RNA, 21 nt, Artificial Sequence
  Synthetic
cuuuaaauuuuuuggugcauu

SEQ ID NO: 19775 - RNA, 21 nt, Artificial Sequence
  Synthetic
uuuaaauuuuuuggugcauuc

SEQ ID NO: 19776 - RNA, 21 nt, Artificial Sequence
  Synthetic
uuaaauuuuuuggugcauucu

SEQ ID NO: 19777 - RNA, 21 nt, Artificial Sequence
  Synthetic
uaaauuuuuuggugcauucug

SEQ ID NO: 19778 - RNA, 21 nt, Artificial Sequence
  Synthetic
aaauuuuuuggugcauucugu

SEQ ID NO: 19779 - RNA, 21 nt, Artificial Sequence
  Synthetic
aauuuuuuggugcauucuguc

SEQ ID NO: 19780 - RNA, 21 nt, Artificial Sequence
  Synthetic
auuuuuuggugcauucugucu

SEQ ID NO: 19781 - RNA, 21 nt, Artificial Sequence
  Synthetic
uuuuuuggugcauucugucuu

SEQ ID NO: 19782 - RNA, 21 nt, Artificial Sequence
  Synthetic
uuuuuggugcauucugucuuu

SEQ ID NO: 19783 - RNA, 21 nt, Artificial Sequence
  Synthetic
uuuuggugcauucugucuuua

SEQ ID NO: 19784 - RNA, 21 nt, Artificial Sequence
  Synthetic
uuuggugcauucugucuuuaa

SEQ ID NO: 19785 - RNA, 21 nt, Artificial Sequence
  Synthetic
uuggugcauucugucuuuaaa

SEQ ID NO: 19786 - RNA, 21 nt, Artificial Sequence
  Synthetic
uggugcauucugucuuuaaaa

SEQ ID NO: 19787 - RNA, 21 nt, Artificial Sequence
  Synthetic
ggugcauucugucuuuaaaau

SEQ ID NO: 19788 - RNA, 21 nt, Artificial Sequence
  Synthetic
gugcauucugucuuuaaaaua

SEQ ID NO: 19789 - RNA, 21 nt, Artificial Sequence
  Synthetic
ugcauucugucuuuaaaauau

SEQ ID NO: 19790 - RNA, 21 nt, Artificial Sequence
  Synthetic
gcauucugucuuuaaaauaua

SEQ ID NO: 19791 - RNA, 21 nt, Artificial Sequence
  Synthetic
cauucugucuuuaaaauauaa

SEQ ID NO: 19792 - RNA, 21 nt, Artificial Sequence
  Synthetic
auucugucuuuaaaauauaag

SEQ ID NO: 19793 - RNA, 21 nt, Artificial Sequence
  Synthetic
uucugucuuuaaaauauaaga

SEQ ID NO: 19794 - RNA, 21 nt, Artificial Sequence
  Synthetic
ucugucuuuaaaauauaagaa

SEQ ID NO: 19795 - RNA, 21 nt, Artificial Sequence
  Synthetic
cugucuuuaaaauauaagaag

SEQ ID NO: 19796 - RNA, 21 nt, Artificial Sequence
  Synthetic
ugucuuuaaaauauaagaagu

SEQ ID NO: 19797 - RNA, 21 nt, Artificial Sequence
  Synthetic
gucuuuaaaauauaagaagua

SEQ ID NO: 19798 - RNA, 21 nt, Artificial Sequence
  Synthetic
ucuuuaaaauauaagaaguac

SEQ ID NO: 19799 - RNA, 21 nt, Artificial Sequence
  Synthetic
cuuuaaaauauaagaaguacc

SEQ ID NO: 19800 - RNA, 21 nt, Artificial Sequence
  Synthetic
uuuaaaauauaagaaguaccu

SEQ ID NO: 19801 - RNA, 21 nt, Artificial Sequence
  Synthetic
uuaaaauauaagaaguaccuc

SEQ ID NO: 19802 - RNA, 21 nt, Artificial Sequence
  Synthetic
uaaaauauaagaaguaccuca

SEQ ID NO: 19803 - RNA, 21 nt, Artificial Sequence
  Synthetic
aaaauauaagaaguaccucac

SEQ ID NO: 19804 - RNA, 21 nt, Artificial Sequence
  Synthetic
aaauauaagaaguaccucacu

SEQ ID NO: 19805 - RNA, 21 nt, Artificial Sequence
  Synthetic
aauauaagaaguaccucacua

SEQ ID NO: 19806 - RNA, 21 nt, Artificial Sequence
  Synthetic
auauaagaaguaccucacuau

SEQ ID NO: 19807 - RNA, 21 nt, Artificial Sequence
  Synthetic
uauaagaaguaccucacuaua

SEQ ID NO: 19808 - RNA, 21 nt, Artificial Sequence
  Synthetic
auaagaaguaccucacuauau

SEQ ID NO: 19809 - RNA, 21 nt, Artificial Sequence
  Synthetic
uaagaaguaccucacuauauu

SEQ ID NO: 19810 - RNA, 21 nt, Artificial Sequence
  Synthetic
aagaaguaccucacuauauuc

SEQ ID NO: 19811 - RNA, 21 nt, Artificial Sequence
  Synthetic
agaaguaccucacuauauuca

SEQ ID NO: 19812 - RNA, 21 nt, Artificial Sequence
  Synthetic
gaaguaccucacuauauucag

SEQ ID NO: 19813 - RNA, 21 nt, Artificial Sequence
  Synthetic
aaguaccucacuauauucagu

SEQ ID NO: 19814 - RNA, 21 nt, Artificial Sequence
  Synthetic
aguaccucacuauauucagug

SEQ ID NO: 19815 - RNA, 21 nt, Artificial Sequence
  Synthetic
guaccucacuauauucagugu

SEQ ID NO: 19816 - RNA, 21 nt, Artificial Sequence
  Synthetic
uaccucacuauauucagugua

SEQ ID NO: 19817 - RNA, 21 nt, Artificial Sequence
  Synthetic
accucacuauauucaguguaa

SEQ ID NO: 19818 - RNA, 21 nt, Artificial Sequence
  Synthetic
ccucacuauauucaguguaac

SEQ ID NO: 19819 - RNA, 21 nt, Artificial Sequence
  Synthetic
cucacuauauucaguguaaca

SEQ ID NO: 19820 - RNA, 21 nt, Artificial Sequence
  Synthetic
ucacuauauucaguguaacac

SEQ ID NO: 19821 - RNA, 21 nt, Artificial Sequence
  Synthetic
cacuauauucaguguaacacu

SEQ ID NO: 19822 - RNA, 21 nt, Artificial Sequence
  Synthetic
acuauauucaguguaacacuc

SEQ ID NO: 19823 - RNA, 21 nt, Artificial Sequence
  Synthetic
cuauauucaguguaacacuca

SEQ ID NO: 19824 - RNA, 21 nt, Artificial Sequence
  Synthetic
uauauucaguguaacacucaa

SEQ ID NO: 19825 - RNA, 21 nt, Artificial Sequence
  Synthetic
auauucaguguaacacucaac

SEQ ID NO: 19826 - RNA, 21 nt, Artificial Sequence
  Synthetic
uauucaguguaacacucaacc

SEQ ID NO: 19827 - RNA, 21 nt, Artificial Sequence
  Synthetic
auucaguguaacacucaaccg

SEQ ID NO: 19828 - RNA, 21 nt, Artificial Sequence
  Synthetic
uucaguguaacacucaaccgu

SEQ ID NO: 19829 - RNA, 21 nt, Artificial Sequence
  Synthetic
ucaguguaacacucaaccguc

SEQ ID NO: 19830 - RNA, 21 nt, Artificial Sequence
  Synthetic
caguguaacacucaaccgucc

SEQ ID NO: 19831 - RNA, 21 nt, Artificial Sequence
  Synthetic
aguguaacacucaaccguccc

SEQ ID NO: 19832 - RNA, 21 nt, Artificial Sequence
  Synthetic
guguaacacucaaccgucccu

SEQ ID NO: 19833 - RNA, 21 nt, Artificial Sequence
  Synthetic
uguaacacucaaccgucccug

SEQ ID NO: 19834 - RNA, 21 nt, Artificial Sequence
  Synthetic
guaacacucaaccgucccugu

SEQ ID NO: 19835 - RNA, 21 nt, Artificial Sequence
  Synthetic
uaacacucaaccgucccuguc

SEQ ID NO: 19836 - RNA, 21 nt, Artificial Sequence
  Synthetic
aacacucaaccgucccuguca

SEQ ID NO: 19837 - RNA, 21 nt, Artificial Sequence
  Synthetic
acacucaaccgucccugucau

SEQ ID NO: 19838 - RNA, 21 nt, Artificial Sequence
  Synthetic
cacucaaccgucccugucaug

SEQ ID NO: 19839 - RNA, 21 nt, Artificial Sequence
  Synthetic
acucaaccgucccugucauga

SEQ ID NO: 19840 - RNA, 21 nt, Artificial Sequence
  Synthetic
cucaaccgucccugucaugag

SEQ ID NO: 19841 - RNA, 21 nt, Artificial Sequence
  Synthetic
ucaaccgucccugucaugagc

SEQ ID NO: 19842 - RNA, 21 nt, Artificial Sequence
  Synthetic
caaccgucccugucaugagcu

SEQ ID NO: 19843 - RNA, 21 nt, Artificial Sequence
  Synthetic
aaccgucccugucaugagcug

SEQ ID NO: 19844 - RNA, 21 nt, Artificial Sequence
  Synthetic
accgucccugucaugagcugg

SEQ ID NO: 19845 - RNA, 21 nt, Artificial Sequence
  Synthetic
ccgucccugucaugagcuggg

SEQ ID NO: 19846 - RNA, 21 nt, Artificial Sequence
  Synthetic
cgucccugucaugagcugggu

SEQ ID NO: 19847 - RNA, 21 nt, Artificial Sequence
  Synthetic
gucccugucaugagcugggug

SEQ ID NO: 19848 - RNA, 21 nt, Artificial Sequence
  Synthetic
ucccugucaugagcuggguga

SEQ ID NO: 19849 - RNA, 21 nt, Artificial Sequence
  Synthetic
cccugucaugagcugggugac

SEQ ID NO: 19850 - RNA, 21 nt, Artificial Sequence
  Synthetic
ccugucaugagcugggugacc

SEQ ID NO: 19851 - RNA, 21 nt, Artificial Sequence
  Synthetic
cugucaugagcugggugaccu

SEQ ID NO: 19852 - RNA, 21 nt, Artificial Sequence
  Synthetic
ugucaugagcugggugaccuu

SEQ ID NO: 19853 - RNA, 21 nt, Artificial Sequence
  Synthetic
gucaugagcugggugaccuug

SEQ ID NO: 19854 - RNA, 21 nt, Artificial Sequence
  Synthetic
ucaugagcugggugaccuugg

SEQ ID NO: 19855 - RNA, 21 nt, Artificial Sequence
  Synthetic
caugagcugggugaccuuggu

SEQ ID NO: 19856 - RNA, 21 nt, Artificial Sequence
  Synthetic
augagcugggugaccuugguc

SEQ ID NO: 19857 - RNA, 21 nt, Artificial Sequence
  Synthetic
ugagcugggugaccuugguca

SEQ ID NO: 19858 - RNA, 21 nt, Artificial Sequence
  Synthetic
gagcugggugaccuuggucau

SEQ ID NO: 19859 - RNA, 21 nt, Artificial Sequence
  Synthetic
agcugggugaccuuggucauu

SEQ ID NO: 19860 - RNA, 21 nt, Artificial Sequence
  Synthetic
gcugggugaccuuggucauuc

SEQ ID NO: 19861 - RNA, 21 nt, Artificial Sequence
  Synthetic
cugggugaccuuggucauuca

SEQ ID NO: 19862 - RNA, 21 nt, Artificial Sequence
  Synthetic
ugggugaccuuggucauucau

SEQ ID NO: 19863 - RNA, 21 nt, Artificial Sequence
  Synthetic
gggugaccuuggucauucauu

SEQ ID NO: 19864 - RNA, 21 nt, Artificial Sequence
  Synthetic
ggugaccuuggucauucauuu

SEQ ID NO: 19865 - RNA, 21 nt, Artificial Sequence
  Synthetic
gugaccuuggucauucauuua

SEQ ID NO: 19866 - RNA, 21 nt, Artificial Sequence
  Synthetic
ugaccuuggucauucauuuau

SEQ ID NO: 19867 - RNA, 21 nt, Artificial Sequence
  Synthetic
gaccuuggucauucauuuauc

SEQ ID NO: 19868 - RNA, 21 nt, Artificial Sequence
  Synthetic
accuuggucauucauuuaucc

SEQ ID NO: 19869 - RNA, 21 nt, Artificial Sequence
  Synthetic
ccuuggucauucauuuauccu

SEQ ID NO: 19870 - RNA, 21 nt, Artificial Sequence
  Synthetic
cuuggucauucauuuauccuc

SEQ ID NO: 19871 - RNA, 21 nt, Artificial Sequence
  Synthetic
uuggucauucauuuauccucu

SEQ ID NO: 19872 - RNA, 21 nt, Artificial Sequence
  Synthetic
uggucauucauuuauccucug

SEQ ID NO: 19873 - RNA, 21 nt, Artificial Sequence
  Synthetic
ggucauucauuuauccucugg

SEQ ID NO: 19874 - RNA, 21 nt, Artificial Sequence
  Synthetic
gucauucauuuauccucuggu

SEQ ID NO: 19875 - RNA, 21 nt, Artificial Sequence
  Synthetic
ucauucauuuauccucuggug

SEQ ID NO: 19876 - RNA, 21 nt, Artificial Sequence
  Synthetic
cauucauuuauccucuggugg

SEQ ID NO: 19877 - RNA, 21 nt, Artificial Sequence
  Synthetic
auucauuuauccucugguggg

SEQ ID NO: 19878 - RNA, 21 nt, Artificial Sequence
  Synthetic
uucauuuauccucuggugggc

SEQ ID NO: 19879 - RNA, 21 nt, Artificial Sequence
  Synthetic
ucauuuauccucuggugggcu

SEQ ID NO: 19880 - RNA, 21 nt, Artificial Sequence
  Synthetic
cauuuauccucuggugggcuc

SEQ ID NO: 19881 - RNA, 21 nt, Artificial Sequence
  Synthetic
auuuauccucuggugggcuca

SEQ ID NO: 19882 - RNA, 21 nt, Artificial Sequence
  Synthetic
uuuauccucuggugggcucaa

SEQ ID NO: 19883 - RNA, 21 nt, Artificial Sequence
  Synthetic
uuauccucuggugggcucaaa

SEQ ID NO: 19884 - RNA, 21 nt, Artificial Sequence
  Synthetic
uauccucuggugggcucaaau

SEQ ID NO: 19885 - RNA, 21 nt, Artificial Sequence
  Synthetic
auccucuggugggcucaaauu

SEQ ID NO: 19886 - RNA, 21 nt, Artificial Sequence
  Synthetic
uccucuggugggcucaaauua

SEQ ID NO: 19887 - RNA, 21 nt, Artificial Sequence
  Synthetic
ccucuggugggcucaaauuau

SEQ ID NO: 19888 - RNA, 21 nt, Artificial Sequence
  Synthetic
cucuggugggcucaaauuauu

SEQ ID NO: 19889 - RNA, 21 nt, Artificial Sequence
  Synthetic
ucuggugggcucaaauuauuc

SEQ ID NO: 19890 - RNA, 21 nt, Artificial Sequence
  Synthetic
cuggugggcucaaauuauuca

SEQ ID NO: 19891 - RNA, 21 nt, Artificial Sequence
  Synthetic
uggugggcucaaauuauucau

SEQ ID NO: 19892 - RNA, 21 nt, Artificial Sequence
  Synthetic
ggugggcucaaauuauucauc

SEQ ID NO: 19893 - RNA, 21 nt, Artificial Sequence
  Synthetic
gugggcucaaauuauucauca

SEQ ID NO: 19894 - RNA, 21 nt, Artificial Sequence
  Synthetic
ugggcucaaauuauucaucag

SEQ ID NO: 19895 - RNA, 21 nt, Artificial Sequence
  Synthetic
gggcucaaauuauucaucagu

SEQ ID NO: 19896 - RNA, 21 nt, Artificial Sequence
  Synthetic
ggcucaaauuauucaucagua

SEQ ID NO: 19897 - RNA, 21 nt, Artificial Sequence
  Synthetic
gcucaaauuauucaucaguaa

SEQ ID NO: 19898 - RNA, 21 nt, Artificial Sequence
  Synthetic
cucaaauuauucaucaguaaa

SEQ ID NO: 19899 - RNA, 21 nt, Artificial Sequence
  Synthetic
ucaaauuauucaucaguaaaa

SEQ ID NO: 19900 - RNA, 21 nt, Artificial Sequence
  Synthetic
caaauuauucaucaguaaaau

SEQ ID NO: 19901 - RNA, 21 nt, Artificial Sequence
  Synthetic
aaauuauucaucaguaaaaua

SEQ ID NO: 19902 - RNA, 21 nt, Artificial Sequence
  Synthetic
aauuauucaucaguaaaauaa

SEQ ID NO: 19903 - RNA, 21 nt, Artificial Sequence
  Synthetic
auuauucaucaguaaaauaac

SEQ ID NO: 19904 - RNA, 21 nt, Artificial Sequence
  Synthetic
uuauucaucaguaaaauaacg

SEQ ID NO: 19905 - RNA, 21 nt, Artificial Sequence
  Synthetic
uauucaucaguaaaauaacga

SEQ ID NO: 19906 - RNA, 21 nt, Artificial Sequence
  Synthetic
auucaucaguaaaauaacgag

SEQ ID NO: 19907 - RNA, 21 nt, Artificial Sequence
  Synthetic
uucaucaguaaaauaacgagc

SEQ ID NO: 19908 - RNA, 21 nt, Artificial Sequence
  Synthetic
ucaucaguaaaauaacgagcc

SEQ ID NO: 19909 - RNA, 21 nt, Artificial Sequence
  Synthetic
caucaguaaaauaacgagccu

SEQ ID NO: 19910 - RNA, 21 nt, Artificial Sequence
  Synthetic
aucaguaaaauaacgagccug

SEQ ID NO: 19911 - RNA, 21 nt, Artificial Sequence
  Synthetic
ucaguaaaauaacgagccugu

SEQ ID NO: 19912 - RNA, 21 nt, Artificial Sequence
  Synthetic
caguaaaauaacgagccugua

SEQ ID NO: 19913 - RNA, 21 nt, Artificial Sequence
  Synthetic
aguaaaauaacgagccuguac

SEQ ID NO: 19914 - RNA, 21 nt, Artificial Sequence
  Synthetic
guaaaauaacgagccuguaca

SEQ ID NO: 19915 - RNA, 21 nt, Artificial Sequence
  Synthetic
uaaaauaacgagccuguacaa

SEQ ID NO: 19916 - RNA, 21 nt, Artificial Sequence
  Synthetic
aaaauaacgagccuguacaaa

SEQ ID NO: 19917 - RNA, 21 nt, Artificial Sequence
  Synthetic
aaauaacgagccuguacaaau

SEQ ID NO: 19918 - RNA, 21 nt, Artificial Sequence
  Synthetic
aauaacgagccuguacaaaua

SEQ ID NO: 19919 - RNA, 21 nt, Artificial Sequence
  Synthetic
auaacgagccuguacaaauaa

SEQ ID NO: 19920 - RNA, 21 nt, Artificial Sequence
  Synthetic
uaacgagccuguacaaauaaa

SEQ ID NO: 19921 - RNA, 21 nt, Artificial Sequence
  Synthetic
aacgagccuguacaaauaaaa

SEQ ID NO: 19922 - RNA, 21 nt, Artificial Sequence
  Synthetic
acgagccuguacaaauaaaau

SEQ ID NO: 19923 - RNA, 21 nt, Artificial Sequence
  Synthetic
cgagccuguacaaauaaaaug

SEQ ID NO: 19924 - RNA, 21 nt, Artificial Sequence
  Synthetic
gagccuguacaaauaaaaugu

SEQ ID NO: 19925 - RNA, 21 nt, Artificial Sequence
  Synthetic
agccuguacaaauaaaaugua

SEQ ID NO: 19926 - RNA, 21 nt, Artificial Sequence
  Synthetic
gccuguacaaauaaaauguaa

SEQ ID NO: 19927 - RNA, 21 nt, Artificial Sequence
  Synthetic
ccuguacaaauaaaauguaau

SEQ ID NO: 19928 - RNA, 21 nt, Artificial Sequence
  Synthetic
cuguacaaauaaaauguaauu

SEQ ID NO: 19929 - RNA, 21 nt, Artificial Sequence
  Synthetic
uguacaaauaaaauguaauuu

SEQ ID NO: 19930 - RNA, 21 nt, Artificial Sequence
  Synthetic
guacaaauaaaauguaauuuu

SEQ ID NO: 19931 - RNA, 21 nt, Artificial Sequence
  Synthetic
uacaaauaaaauguaauuuuu

SEQ ID NO: 19932 - RNA, 21 nt, Artificial Sequence
  Synthetic
acaaauaaaauguaauuuuuu

SEQ ID NO: 19933 - RNA, 21 nt, Artificial Sequence
  Synthetic
caaauaaaauguaauuuuuuu

SEQ ID NO: 19934 - RNA, 21 nt, Artificial Sequence
  Synthetic
aaauaaaauguaauuuuuuuc

SEQ ID NO: 19935 - RNA, 21 nt, Artificial Sequence
  Synthetic
aauaaaauguaauuuuuuuca

SEQ ID NO: 19936 - RNA, 21 nt, Artificial Sequence
  Synthetic
auaaaauguaauuuuuuucac

SEQ ID NO: 19937 - RNA, 21 nt, Artificial Sequence
  Synthetic
uaaaauguaauuuuuuucaca

SEQ ID NO: 19938 - RNA, 21 nt, Artificial Sequence
  Synthetic
aaaauguaauuuuuuucacau

SEQ ID NO: 19939 - RNA, 21 nt, Artificial Sequence
  Synthetic
aaauguaauuuuuuucacauc

SEQ ID NO: 19940 - RNA, 21 nt, Artificial Sequence
  Synthetic
aauguaauuuuuuucacauca

SEQ ID NO: 19941 - RNA, 21 nt, Artificial Sequence
  Synthetic
auguaauuuuuuucacaucag

SEQ ID NO: 19942 - RNA, 21 nt, Artificial Sequence
  Synthetic
uguaauuuuuuucacaucaga

SEQ ID NO: 19943 - RNA, 21 nt, Artificial Sequence
  Synthetic
guaauuuuuuucacaucagau

SEQ ID NO: 19944 - RNA, 21 nt, Artificial Sequence
  Synthetic
uaauuuuuuucacaucagaug

SEQ ID NO: 19945 - RNA, 21 nt, Artificial Sequence
  Synthetic
aauuuuuuucacaucagaugg

SEQ ID NO: 19946 - RNA, 21 nt, Artificial Sequence
  Synthetic
auuuuuuucacaucagauggg

SEQ ID NO: 19947 - RNA, 21 nt, Artificial Sequence
  Synthetic
uuuuuuucacaucagaugggu

SEQ ID NO: 19948 - RNA, 21 nt, Artificial Sequence
  Synthetic
uuuuuucacaucagaugggua

SEQ ID NO: 19949 - RNA, 21 nt, Artificial Sequence
  Synthetic
uuuuucacaucagauggguaa

SEQ ID NO: 19950 - RNA, 21 nt, Artificial Sequence
  Synthetic
uuuucacaucagauggguaac

SEQ ID NO: 19951 - RNA, 21 nt, Artificial Sequence
  Synthetic
uuucacaucagauggguaacg

SEQ ID NO: 19952 - RNA, 21 nt, Artificial Sequence
  Synthetic
uucacaucagauggguaacgu

SEQ ID NO: 19953 - RNA, 21 nt, Artificial Sequence
  Synthetic
ucacaucagauggguaacgug

SEQ ID NO: 19954 - RNA, 21 nt, Artificial Sequence
  Synthetic
cacaucagauggguaacgugc

SEQ ID NO: 19955 - RNA, 21 nt, Artificial Sequence
  Synthetic
acaucagauggguaacgugcc

SEQ ID NO: 19956 - RNA, 21 nt, Artificial Sequence
  Synthetic
caucagauggguaacgugcca

SEQ ID NO: 19957 - RNA, 21 nt, Artificial Sequence
  Synthetic
aucagauggguaacgugccaa

SEQ ID NO: 19958 - RNA, 21 nt, Artificial Sequence
  Synthetic
ucagauggguaacgugccaaa

SEQ ID NO: 19959 - RNA, 21 nt, Artificial Sequence
  Synthetic
cagauggguaacgugccaaau

SEQ ID NO: 19960 - RNA, 21 nt, Artificial Sequence
  Synthetic
agauggguaacgugccaaauc

SEQ ID NO: 19961 - RNA, 21 nt, Artificial Sequence
  Synthetic
gauggguaacgugccaaauca

SEQ ID NO: 19962 - RNA, 21 nt, Artificial Sequence
  Synthetic
auggguaacgugccaaaucau

SEQ ID NO: 19963 - RNA, 21 nt, Artificial Sequence
  Synthetic
uggguaacgugccaaaucaua

SEQ ID NO: 19964 - RNA, 21 nt, Artificial Sequence
  Synthetic
ggguaacgugccaaaucauaa

SEQ ID NO: 19965 - RNA, 21 nt, Artificial Sequence
  Synthetic
gguaacgugccaaaucauaac

SEQ ID NO: 19966 - RNA, 21 nt, Artificial Sequence
  Synthetic
guaacgugccaaaucauaaca

SEQ ID NO: 19967 - RNA, 21 nt, Artificial Sequence
  Synthetic
uaacgugccaaaucauaacaa

SEQ ID NO: 19968 - RNA, 21 nt, Artificial Sequence
  Synthetic
aacgugccaaaucauaacaag

SEQ ID NO: 19969 - RNA, 21 nt, Artificial Sequence
  Synthetic
acgugccaaaucauaacaagg

SEQ ID NO: 19970 - RNA, 21 nt, Artificial Sequence
  Synthetic
cgugccaaaucauaacaaggu

SEQ ID NO: 19971 - RNA, 21 nt, Artificial Sequence
  Synthetic
gugccaaaucauaacaagguu

SEQ ID NO: 19972 - RNA, 21 nt, Artificial Sequence
  Synthetic
ugccaaaucauaacaagguuu

SEQ ID NO: 19973 - RNA, 21 nt, Artificial Sequence
  Synthetic
gccaaaucauaacaagguuug

SEQ ID NO: 19974 - RNA, 21 nt, Artificial Sequence
  Synthetic
ccaaaucauaacaagguuuga

SEQ ID NO: 19975 - RNA, 21 nt, Artificial Sequence
  Synthetic
caaaucauaacaagguuugag

SEQ ID NO: 19976 - RNA, 21 nt, Artificial Sequence
  Synthetic
aaaucauaacaagguuugagc

SEQ ID NO: 19977 - RNA, 21 nt, Artificial Sequence
  Synthetic
aaucauaacaagguuugagcg

SEQ ID NO: 19978 - RNA, 21 nt, Artificial Sequence
  Synthetic
aucauaacaagguuugagcga

SEQ ID NO: 19979 - RNA, 21 nt, Artificial Sequence
  Synthetic
ucauaacaagguuugagcgag

SEQ ID NO: 19980 - RNA, 21 nt, Artificial Sequence
  Synthetic
cauaacaagguuugagcgagg

SEQ ID NO: 19981 - RNA, 21 nt, Artificial Sequence
  Synthetic
auaacaagguuugagcgaggc

SEQ ID NO: 19982 - RNA, 21 nt, Artificial Sequence
  Synthetic
uaacaagguuugagcgaggca

SEQ ID NO: 19983 - RNA, 21 nt, Artificial Sequence
  Synthetic
aacaagguuugagcgaggcac

SEQ ID NO: 19984 - RNA, 21 nt, Artificial Sequence
  Synthetic
acaagguuugagcgaggcaca

SEQ ID NO: 19985 - RNA, 21 nt, Artificial Sequence
  Synthetic
caagguuugagcgaggcacau

SEQ ID NO: 19986 - RNA, 21 nt, Artificial Sequence
  Synthetic
aagguuugagcgaggcacauc

SEQ ID NO: 19987 - RNA, 21 nt, Artificial Sequence
  Synthetic
agguuugagcgaggcacaucu

SEQ ID NO: 19988 - RNA, 21 nt, Artificial Sequence
  Synthetic
gguuugagcgaggcacaucuc

SEQ ID NO: 19989 - RNA, 21 nt, Artificial Sequence
  Synthetic
guuugagcgaggcacaucuca

SEQ ID NO: 19990 - RNA, 21 nt, Artificial Sequence
  Synthetic
uuugagcgaggcacaucucac

SEQ ID NO: 19991 - RNA, 21 nt, Artificial Sequence
  Synthetic
uugagcgaggcacaucucaca

SEQ ID NO: 19992 - RNA, 21 nt, Artificial Sequence
  Synthetic
ugagcgaggcacaucucacac

SEQ ID NO: 19993 - RNA, 21 nt, Artificial Sequence
  Synthetic
gagcgaggcacaucucacaca

SEQ ID NO: 19994 - RNA, 21 nt, Artificial Sequence
  Synthetic
agcgaggcacaucucacacau

SEQ ID NO: 19995 - RNA, 21 nt, Artificial Sequence
  Synthetic
gcgaggcacaucucacacaug

SEQ ID NO: 19996 - RNA, 21 nt, Artificial Sequence
  Synthetic
cgaggcacaucucacacaugg

SEQ ID NO: 19997 - RNA, 21 nt, Artificial Sequence
  Synthetic
gaggcacaucucacacauggg

SEQ ID NO: 19998 - RNA, 21 nt, Artificial Sequence
  Synthetic
aggcacaucucacacaugggc

SEQ ID NO: 19999 - RNA, 21 nt, Artificial Sequence
  Synthetic
ggcacaucucacacaugggca

SEQ ID NO: 20000 - RNA, 21 nt, Artificial Sequence
  Synthetic
gcacaucucacacaugggcau

SEQ ID NO: 20001 - RNA, 21 nt, Artificial Sequence
  Synthetic
cacaucucacacaugggcaug

SEQ ID NO: 20002 - RNA, 21 nt, Artificial Sequence
  Synthetic
acaucucacacaugggcauga

SEQ ID NO: 20003 - RNA, 21 nt, Artificial Sequence
  Synthetic
caucucacacaugggcaugaa

SEQ ID NO: 20004 - RNA, 21 nt, Artificial Sequence
  Synthetic
aucucacacaugggcaugaaa

SEQ ID NO: 20005 - RNA, 21 nt, Artificial Sequence
  Synthetic
ucucacacaugggcaugaaaa

SEQ ID NO: 20006 - RNA, 21 nt, Artificial Sequence
  Synthetic
cucacacaugggcaugaaaac

SEQ ID NO: 20007 - RNA, 21 nt, Artificial Sequence
  Synthetic
ucacacaugggcaugaaaacc

SEQ ID NO: 20008 - RNA, 21 nt, Artificial Sequence
  Synthetic
cacacaugggcaugaaaaccc

SEQ ID NO: 20009 - RNA, 21 nt, Artificial Sequence
  Synthetic
acacaugggcaugaaaaccca

SEQ ID NO: 20010 - RNA, 21 nt, Artificial Sequence
  Synthetic
cacaugggcaugaaaacccaa

SEQ ID NO: 20011 - RNA, 21 nt, Artificial Sequence
  Synthetic
acaugggcaugaaaacccaau

SEQ ID NO: 20012 - RNA, 21 nt, Artificial Sequence
  Synthetic
caugggcaugaaaacccaauc

SEQ ID NO: 20013 - RNA, 21 nt, Artificial Sequence
  Synthetic
augggcaugaaaacccaauca

SEQ ID NO: 20014 - RNA, 21 nt, Artificial Sequence
  Synthetic
ugggcaugaaaacccaaucau

SEQ ID NO: 20015 - RNA, 21 nt, Artificial Sequence
  Synthetic
gggcaugaaaacccaaucauc

SEQ ID NO: 20016 - RNA, 21 nt, Artificial Sequence
  Synthetic
ggcaugaaaacccaaucaucg

SEQ ID NO: 20017 - RNA, 21 nt, Artificial Sequence
  Synthetic
gcaugaaaacccaaucaucgc

SEQ ID NO: 20018 - RNA, 21 nt, Artificial Sequence
  Synthetic
caugaaaacccaaucaucgcu

SEQ ID NO: 20019 - RNA, 21 nt, Artificial Sequence
  Synthetic
augaaaacccaaucaucgcuu

SEQ ID NO: 20020 - RNA, 21 nt, Artificial Sequence
  Synthetic
ugaaaacccaaucaucgcuua

SEQ ID NO: 20021 - RNA, 21 nt, Artificial Sequence
  Synthetic
gaaaacccaaucaucgcuuau

SEQ ID NO: 20022 - RNA, 21 nt, Artificial Sequence
  Synthetic
aaaacccaaucaucgcuuaug

SEQ ID NO: 20023 - RNA, 21 nt, Artificial Sequence
  Synthetic
aaacccaaucaucgcuuauga

SEQ ID NO: 20024 - RNA, 21 nt, Artificial Sequence
  Synthetic
aacccaaucaucgcuuaugaa

SEQ ID NO: 20025 - RNA, 21 nt, Artificial Sequence
  Synthetic
acccaaucaucgcuuaugaaa

SEQ ID NO: 20026 - RNA, 21 nt, Artificial Sequence
  Synthetic
cccaaucaucgcuuaugaaac

SEQ ID NO: 20027 - RNA, 21 nt, Artificial Sequence
  Synthetic
ccaaucaucgcuuaugaaacu

SEQ ID NO: 20028 - RNA, 21 nt, Artificial Sequence
  Synthetic
caaucaucgcuuaugaaacua

SEQ ID NO: 20029 - RNA, 21 nt, Artificial Sequence
  Synthetic
aaucaucgcuuaugaaacuaa

SEQ ID NO: 20030 - RNA, 21 nt, Artificial Sequence
  Synthetic
aucaucgcuuaugaaacuaac

SEQ ID NO: 20031 - RNA, 21 nt, Artificial Sequence
  Synthetic
ucaucgcuuaugaaacuaaca

SEQ ID NO: 20032 - RNA, 21 nt, Artificial Sequence
  Synthetic
caucgcuuaugaaacuaacau

SEQ ID NO: 20033 - RNA, 21 nt, Artificial Sequence
  Synthetic
aucgcuuaugaaacuaacauu

SEQ ID NO: 20034 - RNA, 21 nt, Artificial Sequence
  Synthetic
ucgcuuaugaaacuaacauuu

SEQ ID NO: 20035 - RNA, 21 nt, Artificial Sequence
  Synthetic
cgcuuaugaaacuaacauuuc

SEQ ID NO: 20036 - RNA, 21 nt, Artificial Sequence
  Synthetic
gcuuaugaaacuaacauuuca

SEQ ID NO: 20037 - RNA, 21 nt, Artificial Sequence
  Synthetic
cuuaugaaacuaacauuucaa

SEQ ID NO: 20038 - RNA, 21 nt, Artificial Sequence
  Synthetic
uuaugaaacuaacauuucaau

SEQ ID NO: 20039 - RNA, 21 nt, Artificial Sequence
  Synthetic
uaugaaacuaacauuucaaua

SEQ ID NO: 20040 - RNA, 21 nt, Artificial Sequence
  Synthetic
augaaacuaacauuucaauag

SEQ ID NO: 20041 - RNA, 21 nt, Artificial Sequence
  Synthetic
ugaaacuaacauuucaauaga

SEQ ID NO: 20042 - RNA, 21 nt, Artificial Sequence
  Synthetic
gaaacuaacauuucaauagaa

SEQ ID NO: 20043 - RNA, 21 nt, Artificial Sequence
  Synthetic
aaacuaacauuucaauagaaa

SEQ ID NO: 20044 - RNA, 21 nt, Artificial Sequence
  Synthetic
aacuaacauuucaauagaaau

SEQ ID NO: 20045 - RNA, 21 nt, Artificial Sequence
  Synthetic
acuaacauuucaauagaaaua

SEQ ID NO: 20046 - RNA, 21 nt, Artificial Sequence
  Synthetic
cuaacauuucaauagaaauac

SEQ ID NO: 20047 - RNA, 21 nt, Artificial Sequence
  Synthetic
uaacauuucaauagaaauaca

SEQ ID NO: 20048 - RNA, 21 nt, Artificial Sequence
  Synthetic
aacauuucaauagaaauacau

SEQ ID NO: 20049 - RNA, 21 nt, Artificial Sequence
  Synthetic
acauuucaauagaaauacauu

SEQ ID NO: 20050 - RNA, 21 nt, Artificial Sequence
  Synthetic
cauuucaauagaaauacauua

SEQ ID NO: 20051 - RNA, 21 nt, Artificial Sequence
  Synthetic
auuucaauagaaauacauuau

SEQ ID NO: 20052 - RNA, 21 nt, Artificial Sequence
  Synthetic
uuucaauagaaauacauuaug

SEQ ID NO: 20053 - RNA, 21 nt, Artificial Sequence
  Synthetic
uucaauagaaauacauuauga

SEQ ID NO: 20054 - RNA, 21 nt, Artificial Sequence
  Synthetic
ucaauagaaauacauuaugaa

SEQ ID NO: 20055 - RNA, 21 nt, Artificial Sequence
  Synthetic
caauagaaauacauuaugaaa

SEQ ID NO: 20056 - RNA, 21 nt, Artificial Sequence
  Synthetic
aauagaaauacauuaugaaag

SEQ ID NO: 20057 - RNA, 21 nt, Artificial Sequence
  Synthetic
auagaaauacauuaugaaagu

SEQ ID NO: 20058 - RNA, 21 nt, Artificial Sequence
  Synthetic
uagaaauacauuaugaaaguu

SEQ ID NO: 20059 - RNA, 21 nt, Artificial Sequence
  Synthetic
agaaauacauuaugaaaguuc

SEQ ID NO: 20060 - RNA, 21 nt, Artificial Sequence
  Synthetic
gaaauacauuaugaaaguucu

SEQ ID NO: 20061 - RNA, 21 nt, Artificial Sequence
  Synthetic
aaauacauuaugaaaguucug

SEQ ID NO: 20062 - RNA, 21 nt, Artificial Sequence
  Synthetic
aauacauuaugaaaguucugg

SEQ ID NO: 20063 - RNA, 21 nt, Artificial Sequence
  Synthetic
auacauuaugaaaguucuggu

SEQ ID NO: 20064 - RNA, 21 nt, Artificial Sequence
  Synthetic
uacauuaugaaaguucugguu

SEQ ID NO: 20065 - RNA, 21 nt, Artificial Sequence
  Synthetic
acauuaugaaaguucugguuc

SEQ ID NO: 20066 - RNA, 21 nt, Artificial Sequence
  Synthetic
cauuaugaaaguucugguucu

SEQ ID NO: 20067 - RNA, 21 nt, Artificial Sequence
  Synthetic
auuaugaaaguucugguucua

SEQ ID NO: 20068 - RNA, 21 nt, Artificial Sequence
  Synthetic
uuaugaaaguucugguucuaa

SEQ ID NO: 20069 - RNA, 21 nt, Artificial Sequence
  Synthetic
uaugaaaguucugguucuaaa

SEQ ID NO: 20070 - RNA, 21 nt, Artificial Sequence
  Synthetic
augaaaguucugguucuaaau

SEQ ID NO: 20071 - RNA, 21 nt, Artificial Sequence
  Synthetic
ugaaaguucugguucuaaauc

SEQ ID NO: 20072 - RNA, 21 nt, Artificial Sequence
  Synthetic
gaaaguucugguucuaaaucc

SEQ ID NO: 20073 - RNA, 21 nt, Artificial Sequence
  Synthetic
aaaguucugguucuaaaucca

SEQ ID NO: 20074 - RNA, 21 nt, Artificial Sequence
  Synthetic
aaguucugguucuaaauccau

SEQ ID NO: 20075 - RNA, 21 nt, Artificial Sequence
  Synthetic
aguucugguucuaaauccaua

SEQ ID NO: 20076 - RNA, 21 nt, Artificial Sequence
  Synthetic
guucugguucuaaauccauau

SEQ ID NO: 20077 - RNA, 21 nt, Artificial Sequence
  Synthetic
uucugguucuaaauccauauu

SEQ ID NO: 20078 - RNA, 21 nt, Artificial Sequence
  Synthetic
ucugguucuaaauccauauua

SEQ ID NO: 20079 - RNA, 21 nt, Artificial Sequence
  Synthetic
cugguucuaaauccauauuau

SEQ ID NO: 20080 - RNA, 21 nt, Artificial Sequence
  Synthetic
ugguucuaaauccauauuauc

SEQ ID NO: 20081 - RNA, 21 nt, Artificial Sequence
  Synthetic
gguucuaaauccauauuaucu

SEQ ID NO: 20082 - RNA, 21 nt, Artificial Sequence
  Synthetic
guucuaaauccauauuaucuu

SEQ ID NO: 20083 - RNA, 21 nt, Artificial Sequence
  Synthetic
uucuaaauccauauuaucuug

SEQ ID NO: 20084 - RNA, 21 nt, Artificial Sequence
  Synthetic
ucuaaauccauauuaucuuga

SEQ ID NO: 20085 - RNA, 21 nt, Artificial Sequence
  Synthetic
cuaaauccauauuaucuugag

SEQ ID NO: 20086 - RNA, 21 nt, Artificial Sequence
  Synthetic
uaaauccauauuaucuugagg

SEQ ID NO: 20087 - RNA, 21 nt, Artificial Sequence
  Synthetic
aaauccauauuaucuugaggg

SEQ ID NO: 20088 - RNA, 21 nt, Artificial Sequence
  Synthetic
aauccauauuaucuugagggc

SEQ ID NO: 20089 - RNA, 21 nt, Artificial Sequence
  Synthetic
auccauauuaucuugagggca

SEQ ID NO: 20090 - RNA, 21 nt, Artificial Sequence
  Synthetic
uccauauuaucuugagggcau

SEQ ID NO: 20091 - RNA, 21 nt, Artificial Sequence
  Synthetic
ccauauuaucuugagggcaua

SEQ ID NO: 20092 - RNA, 21 nt, Artificial Sequence
  Synthetic
cauauuaucuugagggcauau

SEQ ID NO: 20093 - RNA, 21 nt, Artificial Sequence
  Synthetic
auauuaucuugagggcauauc

SEQ ID NO: 20094 - RNA, 21 nt, Artificial Sequence
  Synthetic
uauuaucuugagggcauaucc

SEQ ID NO: 20095 - RNA, 21 nt, Artificial Sequence
  Synthetic
auuaucuugagggcauaucca

SEQ ID NO: 20096 - RNA, 21 nt, Artificial Sequence
  Synthetic
uuaucuugagggcauauccac

SEQ ID NO: 20097 - RNA, 21 nt, Artificial Sequence
  Synthetic
uaucuugagggcauauccacu

SEQ ID NO: 20098 - RNA, 21 nt, Artificial Sequence
  Synthetic
aucuugagggcauauccacug

SEQ ID NO: 20099 - RNA, 21 nt, Artificial Sequence
  Synthetic
ucuugagggcauauccacuga

SEQ ID NO: 20100 - RNA, 21 nt, Artificial Sequence
  Synthetic
cuugagggcauauccacugau

SEQ ID NO: 20101 - RNA, 21 nt, Artificial Sequence
  Synthetic
uugagggcauauccacugaug

SEQ ID NO: 20102 - RNA, 21 nt, Artificial Sequence
  Synthetic
ugagggcauauccacugaugc

SEQ ID NO: 20103 - RNA, 21 nt, Artificial Sequence
  Synthetic
gagggcauauccacugaugca

SEQ ID NO: 20104 - RNA, 21 nt, Artificial Sequence
  Synthetic
agggcauauccacugaugcaa

SEQ ID NO: 20105 - RNA, 21 nt, Artificial Sequence
  Synthetic
gggcauauccacugaugcaau

SEQ ID NO: 20106 - RNA, 21 nt, Artificial Sequence
  Synthetic
ggcauauccacugaugcaaug

SEQ ID NO: 20107 - RNA, 21 nt, Artificial Sequence
  Synthetic
gcauauccacugaugcaaugg

SEQ ID NO: 20108 - RNA, 21 nt, Artificial Sequence
  Synthetic
cauauccacugaugcaaugga

SEQ ID NO: 20109 - RNA, 21 nt, Artificial Sequence
  Synthetic
auauccacugaugcaauggau

SEQ ID NO: 20110 - RNA, 21 nt, Artificial Sequence
  Synthetic
uauccacugaugcaauggaua

SEQ ID NO: 20111 - RNA, 21 nt, Artificial Sequence
  Synthetic
auccacugaugcaauggauau

SEQ ID NO: 20112 - RNA, 21 nt, Artificial Sequence
  Synthetic
uccacugaugcaauggauaug

SEQ ID NO: 20113 - RNA, 21 nt, Artificial Sequence
  Synthetic
ccacugaugcaauggauauga

SEQ ID NO: 20114 - RNA, 21 nt, Artificial Sequence
  Synthetic
cacugaugcaauggauaugau

SEQ ID NO: 20115 - RNA, 21 nt, Artificial Sequence
  Synthetic
acugaugcaauggauaugauc

SEQ ID NO: 20116 - RNA, 21 nt, Artificial Sequence
  Synthetic
cugaugcaauggauaugauca

SEQ ID NO: 20117 - RNA, 21 nt, Artificial Sequence
  Synthetic
ugaugcaauggauaugaucau

SEQ ID NO: 20118 - RNA, 21 nt, Artificial Sequence
  Synthetic
gaugcaauggauaugaucauu

SEQ ID NO: 20119 - RNA, 21 nt, Artificial Sequence
  Synthetic
augcaauggauaugaucauua

SEQ ID NO: 20120 - RNA, 21 nt, Artificial Sequence
  Synthetic
ugcaauggauaugaucauuau

SEQ ID NO: 20121 - RNA, 21 nt, Artificial Sequence
  Synthetic
gcaauggauaugaucauuauu

SEQ ID NO: 20122 - RNA, 21 nt, Artificial Sequence
  Synthetic
caauggauaugaucauuauuu

SEQ ID NO: 20123 - RNA, 21 nt, Artificial Sequence
  Synthetic
aauggauaugaucauuauuug

SEQ ID NO: 20124 - RNA, 21 nt, Artificial Sequence
  Synthetic
auggauaugaucauuauuuga

SEQ ID NO: 20125 - RNA, 21 nt, Artificial Sequence
  Synthetic
uggauaugaucauuauuugau

SEQ ID NO: 20126 - RNA, 21 nt, Artificial Sequence
  Synthetic
ggauaugaucauuauuugauu

SEQ ID NO: 20127 - RNA, 21 nt, Artificial Sequence
  Synthetic
gauaugaucauuauuugauuu

SEQ ID NO: 20128 - RNA, 21 nt, Artificial Sequence
  Synthetic
auaugaucauuauuugauuug

SEQ ID NO: 20129 - RNA, 21 nt, Artificial Sequence
  Synthetic
uaugaucauuauuugauuuga

SEQ ID NO: 20130 - RNA, 21 nt, Artificial Sequence
  Synthetic
augaucauuauuugauuugau

SEQ ID NO: 20131 - RNA, 21 nt, Artificial Sequence
  Synthetic
ugaucauuauuugauuugaua

SEQ ID NO: 20132 - RNA, 21 nt, Artificial Sequence
  Synthetic
gaucauuauuugauuugauau

SEQ ID NO: 20133 - RNA, 21 nt, Artificial Sequence
  Synthetic
aucauuauuugauuugauauc

SEQ ID NO: 20134 - RNA, 21 nt, Artificial Sequence
  Synthetic
ucauuauuugauuugauauca

SEQ ID NO: 20135 - RNA, 21 nt, Artificial Sequence
  Synthetic
cauuauuugauuugauaucaa

SEQ ID NO: 20136 - RNA, 21 nt, Artificial Sequence
  Synthetic
auuauuugauuugauaucaaa

SEQ ID NO: 20137 - RNA, 21 nt, Artificial Sequence
  Synthetic
uuauuugauuugauaucaaac

SEQ ID NO: 20138 - RNA, 21 nt, Artificial Sequence
  Synthetic
uauuugauuugauaucaaacu

SEQ ID NO: 20139 - RNA, 21 nt, Artificial Sequence
  Synthetic
auuugauuugauaucaaacua

SEQ ID NO: 20140 - RNA, 21 nt, Artificial Sequence
  Synthetic
uuugauuugauaucaaacuaa

SEQ ID NO: 20141 - RNA, 21 nt, Artificial Sequence
  Synthetic
uugauuugauaucaaacuaaa

SEQ ID NO: 20142 - RNA, 21 nt, Artificial Sequence
  Synthetic
ugauuugauaucaaacuaaaa

SEQ ID NO: 20143 - RNA, 21 nt, Artificial Sequence
  Synthetic
gauuugauaucaaacuaaaac

SEQ ID NO: 20144 - RNA, 21 nt, Artificial Sequence
  Synthetic
auuugauaucaaacuaaaacg

SEQ ID NO: 20145 - RNA, 21 nt, Artificial Sequence
  Synthetic
uuugauaucaaacuaaaacga

SEQ ID NO: 20146 - RNA, 21 nt, Artificial Sequence
  Synthetic
uugauaucaaacuaaaacgag

SEQ ID NO: 20147 - RNA, 21 nt, Artificial Sequence
  Synthetic
ugauaucaaacuaaaacgagu

SEQ ID NO: 20148 - RNA, 21 nt, Artificial Sequence
  Synthetic
gauaucaaacuaaaacgagug

SEQ ID NO: 20149 - RNA, 21 nt, Artificial Sequence
  Synthetic
auaucaaacuaaaacgaguga

SEQ ID NO: 20150 - RNA, 21 nt, Artificial Sequence
  Synthetic
uaucaaacuaaaacgagugag

SEQ ID NO: 20151 - RNA, 21 nt, Artificial Sequence
  Synthetic
aucaaacuaaaacgagugaga

SEQ ID NO: 20152 - RNA, 21 nt, Artificial Sequence
  Synthetic
ucaaacuaaaacgagugagaa

SEQ ID NO: 20153 - RNA, 21 nt, Artificial Sequence
  Synthetic
caaacuaaaacgagugagaaa

SEQ ID NO: 20154 - RNA, 21 nt, Artificial Sequence
  Synthetic
aaacuaaaacgagugagaaaa

SEQ ID NO: 20155 - RNA, 21 nt, Artificial Sequence
  Synthetic
aacuaaaacgagugagaaaaa

SEQ ID NO: 20156 - RNA, 21 nt, Artificial Sequence
  Synthetic
acuaaaacgagugagaaaaaa

SEQ ID NO: 20157 - RNA, 21 nt, Artificial Sequence
  Synthetic
cuaaaacgagugagaaaaaaa

SEQ ID NO: 20158 - RNA, 21 nt, Artificial Sequence
  Synthetic
uaaaacgagugagaaaaaaaa

SEQ ID NO: 20159 - RNA, 21 nt, Artificial Sequence
  Synthetic
aaaacgagugagaaaaaaaaa

SEQ ID NO: 20160 - RNA, 21 nt, Artificial Sequence
  Synthetic
aaacgagugagaaaaaaaaaa

SEQ ID NO: 20161 - RNA, 21 nt, Artificial Sequence
  Synthetic
aacgagugagaaaaaaaaaaa

SEQ ID NO: 20162 - RNA, 21 nt, Artificial Sequence
  Synthetic
acgagugagaaaaaaaaaaag

SEQ ID NO: 20163 - RNA, 21 nt, Artificial Sequence
  Synthetic
cgagugagaaaaaaaaaaaga

SEQ ID NO: 20164 - RNA, 21 nt, Artificial Sequence
  Synthetic
gagugagaaaaaaaaaaagaa

SEQ ID NO: 20165 - RNA, 21 nt, Artificial Sequence
  Synthetic
agugagaaaaaaaaaaagaaa

SEQ ID NO: 20166 - RNA, 21 nt, Artificial Sequence
  Synthetic
gugagaaaaaaaaaaagaaac

SEQ ID NO: 20167 - RNA, 21 nt, Artificial Sequence
  Synthetic
ugagaaaaaaaaaaagaaacc

SEQ ID NO: 20168 - RNA, 21 nt, Artificial Sequence
  Synthetic
gagaaaaaaaaaaagaaaccc

SEQ ID NO: 20169 - RNA, 21 nt, Artificial Sequence
  Synthetic
agaaaaaaaaaaagaaacccc

SEQ ID NO: 20170 - RNA, 21 nt, Artificial Sequence
  Synthetic
gaaaaaaaaaaagaaacccca

SEQ ID NO: 20171 - RNA, 21 nt, Artificial Sequence
  Synthetic
aaaaaaaaaaagaaaccccag

SEQ ID NO: 20172 - RNA, 21 nt, Artificial Sequence
  Synthetic
aaaaaaaaaagaaaccccaga

SEQ ID NO: 20173 - RNA, 21 nt, Artificial Sequence
  Synthetic
aaaaaaaaagaaaccccagaa

SEQ ID NO: 20174 - RNA, 21 nt, Artificial Sequence
  Synthetic
aaaaaaaagaaaccccagaau

SEQ ID NO: 20175 - RNA, 21 nt, Artificial Sequence
  Synthetic
aaaaaaagaaaccccagaaua

SEQ ID NO: 20176 - RNA, 21 nt, Artificial Sequence
  Synthetic
aaaaaagaaaccccagaauau

SEQ ID NO: 20177 - RNA, 21 nt, Artificial Sequence
  Synthetic
aaaaagaaaccccagaauaug

SEQ ID NO: 20178 - RNA, 21 nt, Artificial Sequence
  Synthetic
aaaagaaaccccagaauaugu

SEQ ID NO: 20179 - RNA, 21 nt, Artificial Sequence
  Synthetic
aaagaaaccccagaauauguu

SEQ ID NO: 20180 - RNA, 21 nt, Artificial Sequence
  Synthetic
aagaaaccccagaauauguua

SEQ ID NO: 20181 - RNA, 21 nt, Artificial Sequence
  Synthetic
agaaaccccagaauauguuac

SEQ ID NO: 20182 - RNA, 21 nt, Artificial Sequence
  Synthetic
gaaaccccagaauauguuaca

SEQ ID NO: 20183 - RNA, 21 nt, Artificial Sequence
  Synthetic
aaaccccagaauauguuacag

SEQ ID NO: 20184 - RNA, 21 nt, Artificial Sequence
  Synthetic
aaccccagaauauguuacagu

SEQ ID NO: 20185 - RNA, 21 nt, Artificial Sequence
  Synthetic
accccagaauauguuacaguu

SEQ ID NO: 20186 - RNA, 21 nt, Artificial Sequence
  Synthetic
ccccagaauauguuacaguug

SEQ ID NO: 20187 - RNA, 21 nt, Artificial Sequence
  Synthetic
cccagaauauguuacaguugu

SEQ ID NO: 20188 - RNA, 21 nt, Artificial Sequence
  Synthetic
ccagaauauguuacaguuguu

SEQ ID NO: 20189 - RNA, 21 nt, Artificial Sequence
  Synthetic
cagaauauguuacaguuguuu

SEQ ID NO: 20190 - RNA, 21 nt, Artificial Sequence
  Synthetic
agaauauguuacaguuguuuu

SEQ ID NO: 20191 - RNA, 21 nt, Artificial Sequence
  Synthetic
gaauauguuacaguuguuuuu

SEQ ID NO: 20192 - RNA, 21 nt, Artificial Sequence
  Synthetic
aauauguuacaguuguuuuua

SEQ ID NO: 20193 - RNA, 21 nt, Artificial Sequence
  Synthetic
auauguuacaguuguuuuuau

SEQ ID NO: 20194 - RNA, 21 nt, Artificial Sequence
  Synthetic
uauguuacaguuguuuuuauu

SEQ ID NO: 20195 - RNA, 21 nt, Artificial Sequence
  Synthetic
auguuacaguuguuuuuauuc

SEQ ID NO: 20196 - RNA, 21 nt, Artificial Sequence
  Synthetic
uguuacaguuguuuuuauucc

SEQ ID NO: 20197 - RNA, 21 nt, Artificial Sequence
  Synthetic
guuacaguuguuuuuauucca

SEQ ID NO: 20198 - RNA, 21 nt, Artificial Sequence
  Synthetic
uuacaguuguuuuuauuccaa

SEQ ID NO: 20199 - RNA, 21 nt, Artificial Sequence
  Synthetic
uacaguuguuuuuauuccaac

SEQ ID NO: 20200 - RNA, 21 nt, Artificial Sequence
  Synthetic
acaguuguuuuuauuccaacu

SEQ ID NO: 20201 - RNA, 21 nt, Artificial Sequence
  Synthetic
caguuguuuuuauuccaacug

SEQ ID NO: 20202 - RNA, 21 nt, Artificial Sequence
  Synthetic
aguuguuuuuauuccaacuga

SEQ ID NO: 20203 - RNA, 21 nt, Artificial Sequence
  Synthetic
guuguuuuuauuccaacugaa

SEQ ID NO: 20204 - RNA, 21 nt, Artificial Sequence
  Synthetic
uuguuuuuauuccaacugaaa

SEQ ID NO: 20205 - RNA, 21 nt, Artificial Sequence
  Synthetic
uguuuuuauuccaacugaaaa

SEQ ID NO: 20206 - RNA, 21 nt, Artificial Sequence
  Synthetic
guuuuuauuccaacugaaaau

SEQ ID NO: 20207 - RNA, 21 nt, Artificial Sequence
  Synthetic
uuuuuauuccaacugaaaauu

SEQ ID NO: 20208 - RNA, 21 nt, Artificial Sequence
  Synthetic
uuuuauuccaacugaaaauug

SEQ ID NO: 20209 - RNA, 21 nt, Artificial Sequence
  Synthetic
uuuauuccaacugaaaauuga

SEQ ID NO: 20210 - RNA, 21 nt, Artificial Sequence
  Synthetic
uuauuccaacugaaaauugag

SEQ ID NO: 20211 - RNA, 21 nt, Artificial Sequence
  Synthetic
uauuccaacugaaaauugagu

SEQ ID NO: 20212 - RNA, 21 nt, Artificial Sequence
  Synthetic
auuccaacugaaaauugagua

SEQ ID NO: 20213 - RNA, 21 nt, Artificial Sequence
  Synthetic
uuccaacugaaaauugaguaa

SEQ ID NO: 20214 - RNA, 21 nt, Artificial Sequence
  Synthetic
uccaacugaaaauugaguaag

SEQ ID NO: 20215 - RNA, 21 nt, Artificial Sequence
  Synthetic
ccaacugaaaauugaguaagg

SEQ ID NO: 20216 - RNA, 21 nt, Artificial Sequence
  Synthetic
caacugaaaauugaguaaggg

SEQ ID NO: 20217 - RNA, 21 nt, Artificial Sequence
  Synthetic
aacugaaaauugaguaagggu

SEQ ID NO: 20218 - RNA, 21 nt, Artificial Sequence
  Synthetic
acugaaaauugaguaagggua

SEQ ID NO: 20219 - RNA, 21 nt, Artificial Sequence
  Synthetic
cugaaaauugaguaaggguaa

SEQ ID NO: 20220 - RNA, 21 nt, Artificial Sequence
  Synthetic
ugaaaauugaguaaggguaac

SEQ ID NO: 20221 - RNA, 21 nt, Artificial Sequence
  Synthetic
gaaaauugaguaaggguaacu

SEQ ID NO: 20222 - RNA, 21 nt, Artificial Sequence
  Synthetic
aaaauugaguaaggguaacuc

SEQ ID NO: 20223 - RNA, 21 nt, Artificial Sequence
  Synthetic
aaauugaguaaggguaacucu

SEQ ID NO: 20224 - RNA, 21 nt, Artificial Sequence
  Synthetic
aauugaguaaggguaacucuu

SEQ ID NO: 20225 - RNA, 21 nt, Artificial Sequence
  Synthetic
auugaguaaggguaacucuuc

SEQ ID NO: 20226 - RNA, 21 nt, Artificial Sequence
  Synthetic
uugaguaaggguaacucuuca

SEQ ID NO: 20227 - RNA, 21 nt, Artificial Sequence
  Synthetic
ugaguaaggguaacucuucac

SEQ ID NO: 20228 - RNA, 21 nt, Artificial Sequence
  Synthetic
gaguaaggguaacucuucacu

SEQ ID NO: 20229 - RNA, 21 nt, Artificial Sequence
  Synthetic
aguaaggguaacucuucacuu

SEQ ID NO: 20230 - RNA, 21 nt, Artificial Sequence
  Synthetic
guaaggguaacucuucacuuu

SEQ ID NO: 20231 - RNA, 21 nt, Artificial Sequence
  Synthetic
uaaggguaacucuucacuuua

SEQ ID NO: 20232 - RNA, 21 nt, Artificial Sequence
  Synthetic
aaggguaacucuucacuuuaa

SEQ ID NO: 20233 - RNA, 21 nt, Artificial Sequence
  Synthetic
aggguaacucuucacuuuaac

SEQ ID NO: 20234 - RNA, 21 nt, Artificial Sequence
  Synthetic
ggguaacucuucacuuuaacg

SEQ ID NO: 20235 - RNA, 21 nt, Artificial Sequence
  Synthetic
gguaacucuucacuuuaacgu

SEQ ID NO: 20236 - RNA, 21 nt, Artificial Sequence
  Synthetic
guaacucuucacuuuaacgua

SEQ ID NO: 20237 - RNA, 21 nt, Artificial Sequence
  Synthetic
uaacucuucacuuuaacguac

SEQ ID NO: 20238 - RNA, 21 nt, Artificial Sequence
  Synthetic
aacucuucacuuuaacguacc

SEQ ID NO: 20239 - RNA, 21 nt, Artificial Sequence
  Synthetic
acucuucacuuuaacguaccu

SEQ ID NO: 20240 - RNA, 21 nt, Artificial Sequence
  Synthetic
cucuucacuuuaacguaccua

SEQ ID NO: 20241 - RNA, 21 nt, Artificial Sequence
  Synthetic
ucuucacuuuaacguaccuag

SEQ ID NO: 20242 - RNA, 21 nt, Artificial Sequence
  Synthetic
cuucacuuuaacguaccuaga

SEQ ID NO: 20243 - RNA, 21 nt, Artificial Sequence
  Synthetic
uucacuuuaacguaccuagaa

SEQ ID NO: 20244 - RNA, 21 nt, Artificial Sequence
  Synthetic
ucacuuuaacguaccuagaaa

SEQ ID NO: 20245 - RNA, 21 nt, Artificial Sequence
  Synthetic
cacuuuaacguaccuagaaau

SEQ ID NO: 20246 - RNA, 21 nt, Artificial Sequence
  Synthetic
acuuuaacguaccuagaaaug

SEQ ID NO: 20247 - RNA, 21 nt, Artificial Sequence
  Synthetic
cuuuaacguaccuagaaauga

SEQ ID NO: 20248 - RNA, 21 nt, Artificial Sequence
  Synthetic
uuuaacguaccuagaaaugau

SEQ ID NO: 20249 - RNA, 21 nt, Artificial Sequence
  Synthetic
uuaacguaccuagaaaugaua

SEQ ID NO: 20250 - RNA, 21 nt, Artificial Sequence
  Synthetic
uaacguaccuagaaaugauau

SEQ ID NO: 20251 - RNA, 21 nt, Artificial Sequence
  Synthetic
aacguaccuagaaaugauauc

SEQ ID NO: 20252 - RNA, 21 nt, Artificial Sequence
  Synthetic
acguaccuagaaaugauaucu

SEQ ID NO: 20253 - RNA, 21 nt, Artificial Sequence
  Synthetic
cguaccuagaaaugauaucuc

SEQ ID NO: 20254 - RNA, 21 nt, Artificial Sequence
  Synthetic
guaccuagaaaugauaucucc

SEQ ID NO: 20255 - RNA, 21 nt, Artificial Sequence
  Synthetic
uaccuagaaaugauaucuccu

SEQ ID NO: 20256 - RNA, 21 nt, Artificial Sequence
  Synthetic
accuagaaaugauaucuccuu

SEQ ID NO: 20257 - RNA, 21 nt, Artificial Sequence
  Synthetic
ccuagaaaugauaucuccuug

SEQ ID NO: 20258 - RNA, 21 nt, Artificial Sequence
  Synthetic
cuagaaaugauaucuccuugc

SEQ ID NO: 20259 - RNA, 21 nt, Artificial Sequence
  Synthetic
uagaaaugauaucuccuugca

SEQ ID NO: 20260 - RNA, 21 nt, Artificial Sequence
  Synthetic
agaaaugauaucuccuugcau

SEQ ID NO: 20261 - RNA, 21 nt, Artificial Sequence
  Synthetic
gaaaugauaucuccuugcaua

SEQ ID NO: 20262 - RNA, 21 nt, Artificial Sequence
  Synthetic
aaaugauaucuccuugcauaa

SEQ ID NO: 20263 - RNA, 21 nt, Artificial Sequence
  Synthetic
aaugauaucuccuugcauaau

SEQ ID NO: 20264 - RNA, 21 nt, Artificial Sequence
  Synthetic
augauaucuccuugcauaauu

SEQ ID NO: 20265 - RNA, 21 nt, Artificial Sequence
  Synthetic
ugauaucuccuugcauaauua

SEQ ID NO: 20266 - RNA, 21 nt, Artificial Sequence
  Synthetic
gauaucuccuugcauaauuag

SEQ ID NO: 20267 - RNA, 21 nt, Artificial Sequence
  Synthetic
auaucuccuugcauaauuagu

SEQ ID NO: 20268 - RNA, 21 nt, Artificial Sequence
  Synthetic
uaucuccuugcauaauuaguc

SEQ ID NO: 20269 - RNA, 21 nt, Artificial Sequence
  Synthetic
aucuccuugcauaauuaguca

SEQ ID NO: 20270 - RNA, 21 nt, Artificial Sequence
  Synthetic
ucuccuugcauaauuagucau

SEQ ID NO: 20271 - RNA, 21 nt, Artificial Sequence
  Synthetic
cuccuugcauaauuagucauu

SEQ ID NO: 20272 - RNA, 21 nt, Artificial Sequence
  Synthetic
uccuugcauaauuagucauuu

SEQ ID NO: 20273 - RNA, 21 nt, Artificial Sequence
  Synthetic
ccuugcauaauuagucauuua

SEQ ID NO: 20274 - RNA, 21 nt, Artificial Sequence
  Synthetic
cuugcauaauuagucauuuaa

SEQ ID NO: 20275 - RNA, 21 nt, Artificial Sequence
  Synthetic
uugcauaauuagucauuuaac

SEQ ID NO: 20276 - RNA, 21 nt, Artificial Sequence
  Synthetic
ugcauaauuagucauuuaaca

SEQ ID NO: 20277 - RNA, 21 nt, Artificial Sequence
  Synthetic
gcauaauuagucauuuaacag

SEQ ID NO: 20278 - RNA, 21 nt, Artificial Sequence
  Synthetic
cauaauuagucauuuaacaga

SEQ ID NO: 20279 - RNA, 21 nt, Artificial Sequence
  Synthetic
auaauuagucauuuaacagag

SEQ ID NO: 20280 - RNA, 21 nt, Artificial Sequence
  Synthetic
uaauuagucauuuaacagagc

SEQ ID NO: 20281 - RNA, 21 nt, Artificial Sequence
  Synthetic
aauuagucauuuaacagagcc

SEQ ID NO: 20282 - RNA, 21 nt, Artificial Sequence
  Synthetic
auuagucauuuaacagagcca

SEQ ID NO: 20283 - RNA, 21 nt, Artificial Sequence
  Synthetic
uuagucauuuaacagagccag

SEQ ID NO: 20284 - RNA, 21 nt, Artificial Sequence
  Synthetic
uagucauuuaacagagccagc

SEQ ID NO: 20285 - RNA, 21 nt, Artificial Sequence
  Synthetic
agucauuuaacagagccagca

SEQ ID NO: 20286 - RNA, 21 nt, Artificial Sequence
  Synthetic
gucauuuaacagagccagcaa

SEQ ID NO: 20287 - RNA, 21 nt, Artificial Sequence
  Synthetic
ucauuuaacagagccagcaac

SEQ ID NO: 20288 - RNA, 21 nt, Artificial Sequence
  Synthetic
cauuuaacagagccagcaacc

SEQ ID NO: 20289 - RNA, 21 nt, Artificial Sequence
  Synthetic
auuuaacagagccagcaacca

SEQ ID NO: 20290 - RNA, 21 nt, Artificial Sequence
  Synthetic
uuuaacagagccagcaaccau

SEQ ID NO: 20291 - RNA, 21 nt, Artificial Sequence
  Synthetic
uuaacagagccagcaaccauc

SEQ ID NO: 20292 - RNA, 21 nt, Artificial Sequence
  Synthetic
uaacagagccagcaaccaucc

SEQ ID NO: 20293 - RNA, 21 nt, Artificial Sequence
  Synthetic
aacagagccagcaaccaucca

SEQ ID NO: 20294 - RNA, 21 nt, Artificial Sequence
  Synthetic
acagagccagcaaccauccag

SEQ ID NO: 20295 - RNA, 21 nt, Artificial Sequence
  Synthetic
cagagccagcaaccauccagg

SEQ ID NO: 20296 - RNA, 21 nt, Artificial Sequence
  Synthetic
agagccagcaaccauccagga

SEQ ID NO: 20297 - RNA, 21 nt, Artificial Sequence
  Synthetic
gagccagcaaccauccaggag

SEQ ID NO: 20298 - RNA, 21 nt, Artificial Sequence
  Synthetic
agccagcaaccauccaggagc

SEQ ID NO: 20299 - RNA, 21 nt, Artificial Sequence
  Synthetic
gccagcaaccauccaggagcu

SEQ ID NO: 20300 - RNA, 21 nt, Artificial Sequence
  Synthetic
ccagcaaccauccaggagcuu

SEQ ID NO: 20301 - RNA, 21 nt, Artificial Sequence
  Synthetic
cagcaaccauccaggagcuug

SEQ ID NO: 20302 - RNA, 21 nt, Artificial Sequence
  Synthetic
agcaaccauccaggagcuugg

SEQ ID NO: 20303 - RNA, 21 nt, Artificial Sequence
  Synthetic
gcaaccauccaggagcuuggc

SEQ ID NO: 20304 - RNA, 21 nt, Artificial Sequence
  Synthetic
caaccauccaggagcuuggcu

SEQ ID NO: 20305 - RNA, 21 nt, Artificial Sequence
  Synthetic
aaccauccaggagcuuggcuu

SEQ ID NO: 20306 - RNA, 21 nt, Artificial Sequence
  Synthetic
accauccaggagcuuggcuug

SEQ ID NO: 20307 - RNA, 21 nt, Artificial Sequence
  Synthetic
ccauccaggagcuuggcuugg

SEQ ID NO: 20308 - RNA, 21 nt, Artificial Sequence
  Synthetic
cauccaggagcuuggcuuggu

SEQ ID NO: 20309 - RNA, 21 nt, Artificial Sequence
  Synthetic
auccaggagcuuggcuuggug

SEQ ID NO: 20310 - RNA, 21 nt, Artificial Sequence
  Synthetic
uccaggagcuuggcuuggugu

SEQ ID NO: 20311 - RNA, 21 nt, Artificial Sequence
  Synthetic
ccaggagcuuggcuugguguc

SEQ ID NO: 20312 - RNA, 21 nt, Artificial Sequence
  Synthetic
caggagcuuggcuugguguca

SEQ ID NO: 20313 - RNA, 21 nt, Artificial Sequence
  Synthetic
aggagcuuggcuuggugucau

SEQ ID NO: 20314 - RNA, 21 nt, Artificial Sequence
  Synthetic
ggagcuuggcuuggugucaua

SEQ ID NO: 20315 - RNA, 21 nt, Artificial Sequence
  Synthetic
gagcuuggcuuggugucauaa

SEQ ID NO: 20316 - RNA, 21 nt, Artificial Sequence
  Synthetic
agcuuggcuuggugucauaag

SEQ ID NO: 20317 - RNA, 21 nt, Artificial Sequence
  Synthetic
gcuuggcuuggugucauaaga

SEQ ID NO: 20318 - RNA, 21 nt, Artificial Sequence
  Synthetic
cuuggcuuggugucauaagac

SEQ ID NO: 20319 - RNA, 21 nt, Artificial Sequence
  Synthetic
uuggcuuggugucauaagaca

SEQ ID NO: 20320 - RNA, 21 nt, Artificial Sequence
  Synthetic
uggcuuggugucauaagacau

SEQ ID NO: 20321 - RNA, 21 nt, Artificial Sequence
  Synthetic
ggcuuggugucauaagacaug

SEQ ID NO: 20322 - RNA, 21 nt, Artificial Sequence
  Synthetic
gcuuggugucauaagacaugu

SEQ ID NO: 20323 - RNA, 21 nt, Artificial Sequence
  Synthetic
cuuggugucauaagacaugug

SEQ ID NO: 20324 - RNA, 21 nt, Artificial Sequence
  Synthetic
uuggugucauaagacaugugu

SEQ ID NO: 20325 - RNA, 21 nt, Artificial Sequence
  Synthetic
uggugucauaagacaugugua

SEQ ID NO: 20326 - RNA, 21 nt, Artificial Sequence
  Synthetic
ggugucauaagacauguguaa

SEQ ID NO: 20327 - RNA, 21 nt, Artificial Sequence
  Synthetic
gugucauaagacauguguaag

SEQ ID NO: 20328 - RNA, 21 nt, Artificial Sequence
  Synthetic
ugucauaagacauguguaagu

SEQ ID NO: 20329 - RNA, 21 nt, Artificial Sequence
  Synthetic
gucauaagacauguguaagua

SEQ ID NO: 20330 - RNA, 21 nt, Artificial Sequence
  Synthetic
ucauaagacauguguaaguag

SEQ ID NO: 20331 - RNA, 21 nt, Artificial Sequence
  Synthetic
cauaagacauguguaaguagc

SEQ ID NO: 20332 - RNA, 21 nt, Artificial Sequence
  Synthetic
auaagacauguguaaguagca

SEQ ID NO: 20333 - RNA, 21 nt, Artificial Sequence
  Synthetic
uaagacauguguaaguagcaa

SEQ ID NO: 20334 - RNA, 21 nt, Artificial Sequence
  Synthetic
aagacauguguaaguagcaaa

SEQ ID NO: 20335 - RNA, 21 nt, Artificial Sequence
  Synthetic
agacauguguaaguagcaaag

SEQ ID NO: 20336 - RNA, 21 nt, Artificial Sequence
  Synthetic
gacauguguaaguagcaaagc

SEQ ID NO: 20337 - RNA, 21 nt, Artificial Sequence
  Synthetic
acauguguaaguagcaaagca

SEQ ID NO: 20338 - RNA, 21 nt, Artificial Sequence
  Synthetic
cauguguaaguagcaaagcac

SEQ ID NO: 20339 - RNA, 21 nt, Artificial Sequence
  Synthetic
auguguaaguagcaaagcacu

SEQ ID NO: 20340 - RNA, 21 nt, Artificial Sequence
  Synthetic
uguguaaguagcaaagcacug

SEQ ID NO: 20341 - RNA, 21 nt, Artificial Sequence
  Synthetic
guguaaguagcaaagcacugu

SEQ ID NO: 20342 - RNA, 21 nt, Artificial Sequence
  Synthetic
uguaaguagcaaagcacuguc

SEQ ID NO: 20343 - RNA, 21 nt, Artificial Sequence
  Synthetic
guaaguagcaaagcacugucu

SEQ ID NO: 20344 - RNA, 21 nt, Artificial Sequence
  Synthetic
uaaguagcaaagcacugucug

SEQ ID NO: 20345 - RNA, 21 nt, Artificial Sequence
  Synthetic
aaguagcaaagcacugucugg

SEQ ID NO: 20346 - RNA, 21 nt, Artificial Sequence
  Synthetic
aguagcaaagcacugucuggu

SEQ ID NO: 20347 - RNA, 21 nt, Artificial Sequence
  Synthetic
guagcaaagcacugucugguu

SEQ ID NO: 20348 - RNA, 21 nt, Artificial Sequence
  Synthetic
uagcaaagcacugucugguuu

SEQ ID NO: 20349 - RNA, 21 nt, Artificial Sequence
  Synthetic
agcaaagcacugucugguuuu

SEQ ID NO: 20350 - RNA, 21 nt, Artificial Sequence
  Synthetic
gcaaagcacugucugguuuug

SEQ ID NO: 20351 - RNA, 21 nt, Artificial Sequence
  Synthetic
caaagcacugucugguuuuga

SEQ ID NO: 20352 - RNA, 21 nt, Artificial Sequence
  Synthetic
aaagcacugucugguuuugaa

SEQ ID NO: 20353 - RNA, 21 nt, Artificial Sequence
  Synthetic
aagcacugucugguuuugaaa

SEQ ID NO: 20354 - RNA, 21 nt, Artificial Sequence
  Synthetic
agcacugucugguuuugaaau

SEQ ID NO: 20355 - RNA, 21 nt, Artificial Sequence
  Synthetic
gcacugucugguuuugaaauc

SEQ ID NO: 20356 - RNA, 21 nt, Artificial Sequence
  Synthetic
cacugucugguuuugaaaucu

SEQ ID NO: 20357 - RNA, 21 nt, Artificial Sequence
  Synthetic
acugucugguuuugaaaucuc

SEQ ID NO: 20358 - RNA, 21 nt, Artificial Sequence
  Synthetic
cugucugguuuugaaaucuca

SEQ ID NO: 20359 - RNA, 21 nt, Artificial Sequence
  Synthetic
ugucugguuuugaaaucucaa

SEQ ID NO: 20360 - RNA, 21 nt, Artificial Sequence
  Synthetic
gucugguuuugaaaucucaaa

SEQ ID NO: 20361 - RNA, 21 nt, Artificial Sequence
  Synthetic
ucugguuuugaaaucucaaaa

SEQ ID NO: 20362 - RNA, 21 nt, Artificial Sequence
  Synthetic
cugguuuugaaaucucaaaac

SEQ ID NO: 20363 - RNA, 21 nt, Artificial Sequence
  Synthetic
ugguuuugaaaucucaaaacc

SEQ ID NO: 20364 - RNA, 21 nt, Artificial Sequence
  Synthetic
gguuuugaaaucucaaaacca

SEQ ID NO: 20365 - RNA, 21 nt, Artificial Sequence
  Synthetic
guuuugaaaucucaaaaccau

SEQ ID NO: 20366 - RNA, 21 nt, Artificial Sequence
  Synthetic
uuuugaaaucucaaaaccaug

SEQ ID NO: 20367 - RNA, 21 nt, Artificial Sequence
  Synthetic
uuugaaaucucaaaaccauga

SEQ ID NO: 20368 - RNA, 21 nt, Artificial Sequence
  Synthetic
uugaaaucucaaaaccaugag

SEQ ID NO: 20369 - RNA, 21 nt, Artificial Sequence
  Synthetic
ugaaaucucaaaaccaugagu

SEQ ID NO: 20370 - RNA, 21 nt, Artificial Sequence
  Synthetic
gaaaucucaaaaccaugagua

SEQ ID NO: 20371 - RNA, 21 nt, Artificial Sequence
  Synthetic
aaaucucaaaaccaugaguau

SEQ ID NO: 20372 - RNA, 21 nt, Artificial Sequence
  Synthetic
aaucucaaaaccaugaguauu

SEQ ID NO: 20373 - RNA, 21 nt, Artificial Sequence
  Synthetic
aucucaaaaccaugaguauug

SEQ ID NO: 20374 - RNA, 21 nt, Artificial Sequence
  Synthetic
ucucaaaaccaugaguauuga

SEQ ID NO: 20375 - RNA, 21 nt, Artificial Sequence
  Synthetic
cucaaaaccaugaguauugaa

SEQ ID NO: 20376 - RNA, 21 nt, Artificial Sequence
  Synthetic
ucaaaaccaugaguauugaaa

SEQ ID NO: 20377 - RNA, 21 nt, Artificial Sequence
  Synthetic
caaaaccaugaguauugaaau

SEQ ID NO: 20378 - RNA, 21 nt, Artificial Sequence
  Synthetic
aaaaccaugaguauugaaaug

SEQ ID NO: 20379 - RNA, 21 nt, Artificial Sequence
  Synthetic
aaaccaugaguauugaaaugu

SEQ ID NO: 20380 - RNA, 21 nt, Artificial Sequence
  Synthetic
aaccaugaguauugaaauguu

SEQ ID NO: 20381 - RNA, 21 nt, Artificial Sequence
  Synthetic
accaugaguauugaaauguug

SEQ ID NO: 20382 - RNA, 21 nt, Artificial Sequence
  Synthetic
ccaugaguauugaaauguugu

SEQ ID NO: 20383 - RNA, 21 nt, Artificial Sequence
  Synthetic
caugaguauugaaauguugua

SEQ ID NO: 20384 - RNA, 21 nt, Artificial Sequence
  Synthetic
augaguauugaaauguuguau

SEQ ID NO: 20385 - RNA, 21 nt, Artificial Sequence
  Synthetic
ugaguauugaaauguuguauu

SEQ ID NO: 20386 - RNA, 21 nt, Artificial Sequence
  Synthetic
gaguauugaaauguuguauuu

SEQ ID NO: 20387 - RNA, 21 nt, Artificial Sequence
  Synthetic
aguauugaaauguuguauuug

SEQ ID NO: 20388 - RNA, 21 nt, Artificial Sequence
  Synthetic
guauugaaauguuguauuuga

SEQ ID NO: 20389 - RNA, 21 nt, Artificial Sequence
  Synthetic
uauugaaauguuguauuugag

SEQ ID NO: 20390 - RNA, 21 nt, Artificial Sequence
  Synthetic
auugaaauguuguauuugagu

SEQ ID NO: 20391 - RNA, 21 nt, Artificial Sequence
  Synthetic
uugaaauguuguauuugagug

SEQ ID NO: 20392 - RNA, 21 nt, Artificial Sequence
  Synthetic
ugaaauguuguauuugagugu

SEQ ID NO: 20393 - RNA, 21 nt, Artificial Sequence
  Synthetic
gaaauguuguauuugaguguu

SEQ ID NO: 20394 - RNA, 21 nt, Artificial Sequence
  Synthetic
aaauguuguauuugaguguuu

SEQ ID NO: 20395 - RNA, 21 nt, Artificial Sequence
  Synthetic
aauguuguauuugaguguuua

SEQ ID NO: 20396 - RNA, 21 nt, Artificial Sequence
  Synthetic
auguuguauuugaguguuuaa

SEQ ID NO: 20397 - RNA, 21 nt, Artificial Sequence
  Synthetic
uguuguauuugaguguuuaau

SEQ ID NO: 20398 - RNA, 21 nt, Artificial Sequence
  Synthetic
guuguauuugaguguuuaaug

SEQ ID NO: 20399 - RNA, 21 nt, Artificial Sequence
  Synthetic
uuguauuugaguguuuaauga

SEQ ID NO: 20400 - RNA, 21 nt, Artificial Sequence
  Synthetic
uguauuugaguguuuaaugag

SEQ ID NO: 20401 - RNA, 21 nt, Artificial Sequence
  Synthetic
guauuugaguguuuaaugaga

SEQ ID NO: 20402 - RNA, 21 nt, Artificial Sequence
  Synthetic
uauuugaguguuuaaugagaa

SEQ ID NO: 20403 - RNA, 21 nt, Artificial Sequence
  Synthetic
auuugaguguuuaaugagaag

SEQ ID NO: 20404 - RNA, 21 nt, Artificial Sequence
  Synthetic
uuugaguguuuaaugagaagu

SEQ ID NO: 20405 - RNA, 21 nt, Artificial Sequence
  Synthetic
uugaguguuuaaugagaagug

SEQ ID NO: 20406 - RNA, 21 nt, Artificial Sequence
  Synthetic
ugaguguuuaaugagaagugg

SEQ ID NO: 20407 - RNA, 21 nt, Artificial Sequence
  Synthetic
gaguguuuaaugagaaguggu

SEQ ID NO: 20408 - RNA, 21 nt, Artificial Sequence
  Synthetic
aguguuuaaugagaagugguu

SEQ ID NO: 20409 - RNA, 21 nt, Artificial Sequence
  Synthetic
guguuuaaugagaagugguua

SEQ ID NO: 20410 - RNA, 21 nt, Artificial Sequence
  Synthetic
uguuuaaugagaagugguuaa

SEQ ID NO: 20411 - RNA, 21 nt, Artificial Sequence
  Synthetic
guuuaaugagaagugguuaau

SEQ ID NO: 20412 - RNA, 21 nt, Artificial Sequence
  Synthetic
uuuaaugagaagugguuaauc

SEQ ID NO: 20413 - RNA, 21 nt, Artificial Sequence
  Synthetic
uuaaugagaagugguuaauca

SEQ ID NO: 20414 - RNA, 21 nt, Artificial Sequence
  Synthetic
uaaugagaagugguuaaucau

SEQ ID NO: 20415 - RNA, 21 nt, Artificial Sequence
  Synthetic
aaugagaagugguuaaucauu

SEQ ID NO: 20416 - RNA, 21 nt, Artificial Sequence
  Synthetic
augagaagugguuaaucauuu

SEQ ID NO: 20417 - RNA, 21 nt, Artificial Sequence
  Synthetic
ugagaagugguuaaucauuua

SEQ ID NO: 20418 - RNA, 21 nt, Artificial Sequence
  Synthetic
gagaagugguuaaucauuuac

SEQ ID NO: 20419 - RNA, 21 nt, Artificial Sequence
  Synthetic
agaagugguuaaucauuuacu

SEQ ID NO: 20420 - RNA, 21 nt, Artificial Sequence
  Synthetic
gaagugguuaaucauuuacuu

SEQ ID NO: 20421 - RNA, 21 nt, Artificial Sequence
  Synthetic
aagugguuaaucauuuacuuc

SEQ ID NO: 20422 - RNA, 21 nt, Artificial Sequence
  Synthetic
agugguuaaucauuuacuucc

SEQ ID NO: 20423 - RNA, 21 nt, Artificial Sequence
  Synthetic
gugguuaaucauuuacuuccu

SEQ ID NO: 20424 - RNA, 21 nt, Artificial Sequence
  Synthetic
ugguuaaucauuuacuuccuu

SEQ ID NO: 20425 - RNA, 21 nt, Artificial Sequence
  Synthetic
gguuaaucauuuacuuccuuu

SEQ ID NO: 20426 - RNA, 21 nt, Artificial Sequence
  Synthetic
guuaaucauuuacuuccuuuu

SEQ ID NO: 20427 - RNA, 21 nt, Artificial Sequence
  Synthetic
uuaaucauuuacuuccuuuuu

SEQ ID NO: 20428 - RNA, 21 nt, Artificial Sequence
  Synthetic
uaaucauuuacuuccuuuuuu

SEQ ID NO: 20429 - RNA, 21 nt, Artificial Sequence
  Synthetic
aaucauuuacuuccuuuuuuc

SEQ ID NO: 20430 - RNA, 21 nt, Artificial Sequence
  Synthetic
aucauuuacuuccuuuuuuca

SEQ ID NO: 20431 - RNA, 21 nt, Artificial Sequence
  Synthetic
ucauuuacuuccuuuuuucag

SEQ ID NO: 20432 - RNA, 21 nt, Artificial Sequence
  Synthetic
cauuuacuuccuuuuuucagg

SEQ ID NO: 20433 - RNA, 21 nt, Artificial Sequence
  Synthetic
auuuacuuccuuuuuucagga

SEQ ID NO: 20434 - RNA, 21 nt, Artificial Sequence
  Synthetic
uuuacuuccuuuuuucaggaa

SEQ ID NO: 20435 - RNA, 21 nt, Artificial Sequence
  Synthetic
uuacuuccuuuuuucaggaaa

SEQ ID NO: 20436 - RNA, 21 nt, Artificial Sequence
  Synthetic
uacuuccuuuuuucaggaaag

SEQ ID NO: 20437 - RNA, 21 nt, Artificial Sequence
  Synthetic
acuuccuuuuuucaggaaagg

SEQ ID NO: 20438 - RNA, 21 nt, Artificial Sequence
  Synthetic
cuuccuuuuuucaggaaaggg

SEQ ID NO: 20439 - RNA, 21 nt, Artificial Sequence
  Synthetic
uuccuuuuuucaggaaagggg

SEQ ID NO: 20440 - RNA, 21 nt, Artificial Sequence
  Synthetic
uccuuuuuucaggaaagggga

SEQ ID NO: 20441 - RNA, 21 nt, Artificial Sequence
  Synthetic
ccuuuuuucaggaaaggggaa

SEQ ID NO: 20442 - RNA, 21 nt, Artificial Sequence
  Synthetic
cuuuuuucaggaaaggggaac

SEQ ID NO: 20443 - RNA, 21 nt, Artificial Sequence
  Synthetic
uuuuuucaggaaaggggaacu

SEQ ID NO: 20444 - RNA, 21 nt, Artificial Sequence
  Synthetic
uuuuucaggaaaggggaacuc

SEQ ID NO: 20445 - RNA, 21 nt, Artificial Sequence
  Synthetic
uuuucaggaaaggggaacucu

SEQ ID NO: 20446 - RNA, 21 nt, Artificial Sequence
  Synthetic
uuucaggaaaggggaacucuc

SEQ ID NO: 20447 - RNA, 21 nt, Artificial Sequence
  Synthetic
uucaggaaaggggaacucucu

SEQ ID NO: 20448 - RNA, 21 nt, Artificial Sequence
  Synthetic
ucaggaaaggggaacucucug

SEQ ID NO: 20449 - RNA, 21 nt, Artificial Sequence
  Synthetic
caggaaaggggaacucucugu

SEQ ID NO: 20450 - RNA, 21 nt, Artificial Sequence
  Synthetic
aggaaaggggaacucucuguc

SEQ ID NO: 20451 - RNA, 21 nt, Artificial Sequence
  Synthetic
ggaaaggggaacucucugucu

SEQ ID NO: 20452 - RNA, 21 nt, Artificial Sequence
  Synthetic
gaaaggggaacucucugucuu

SEQ ID NO: 20453 - RNA, 21 nt, Artificial Sequence
  Synthetic
aaaggggaacucucugucuuc

SEQ ID NO: 20454 - RNA, 21 nt, Artificial Sequence
  Synthetic
aaggggaacucucugucuucu

SEQ ID NO: 20455 - RNA, 21 nt, Artificial Sequence
  Synthetic
aggggaacucucugucuucua

SEQ ID NO: 20456 - RNA, 21 nt, Artificial Sequence
  Synthetic
ggggaacucucugucuucuag

SEQ ID NO: 20457 - RNA, 21 nt, Artificial Sequence
  Synthetic
gggaacucucugucuucuaga

SEQ ID NO: 20458 - RNA, 21 nt, Artificial Sequence
  Synthetic
ggaacucucugucuucuagac

SEQ ID NO: 20459 - RNA, 21 nt, Artificial Sequence
  Synthetic
gaacucucugucuucuagaca

SEQ ID NO: 20460 - RNA, 21 nt, Artificial Sequence
  Synthetic
aacucucugucuucuagacaa

SEQ ID NO: 20461 - RNA, 21 nt, Artificial Sequence
  Synthetic
acucucugucuucuagacaag

SEQ ID NO: 20462 - RNA, 21 nt, Artificial Sequence
  Synthetic
cucucugucuucuagacaagg

SEQ ID NO: 20463 - RNA, 21 nt, Artificial Sequence
  Synthetic
ucucugucuucuagacaaggu

SEQ ID NO: 20464 - RNA, 21 nt, Artificial Sequence
  Synthetic
cucugucuucuagacaagguc

SEQ ID NO: 20465 - RNA, 21 nt, Artificial Sequence
  Synthetic
ucugucuucuagacaagguca

SEQ ID NO: 20466 - RNA, 21 nt, Artificial Sequence
  Synthetic
cugucuucuagacaaggucac

SEQ ID NO: 20467 - RNA, 21 nt, Artificial Sequence
  Synthetic
ugucuucuagacaaggucacc

SEQ ID NO: 20468 - RNA, 21 nt, Artificial Sequence
  Synthetic
gucuucuagacaaggucacca

SEQ ID NO: 20469 - RNA, 21 nt, Artificial Sequence
  Synthetic
ucuucuagacaaggucaccaa

SEQ ID NO: 20470 - RNA, 21 nt, Artificial Sequence
  Synthetic
cuucuagacaaggucaccaac

SEQ ID NO: 20471 - RNA, 21 nt, Artificial Sequence
  Synthetic
uucuagacaaggucaccaaca

SEQ ID NO: 20472 - RNA, 21 nt, Artificial Sequence
  Synthetic
ucuagacaaggucaccaacau

SEQ ID NO: 20473 - RNA, 21 nt, Artificial Sequence
  Synthetic
cuagacaaggucaccaacauc

SEQ ID NO: 20474 - RNA, 21 nt, Artificial Sequence
  Synthetic
uagacaaggucaccaacaucu

SEQ ID NO: 20475 - RNA, 21 nt, Artificial Sequence
  Synthetic
agacaaggucaccaacaucua

SEQ ID NO: 20476 - RNA, 21 nt, Artificial Sequence
  Synthetic
gacaaggucaccaacaucuaa

SEQ ID NO: 20477 - RNA, 21 nt, Artificial Sequence
  Synthetic
acaaggucaccaacaucuaac

SEQ ID NO: 20478 - RNA, 21 nt, Artificial Sequence
  Synthetic
caaggucaccaacaucuaacc

SEQ ID NO: 20479 - RNA, 21 nt, Artificial Sequence
  Synthetic
aaggucaccaacaucuaaccu

SEQ ID NO: 20480 - RNA, 21 nt, Artificial Sequence
  Synthetic
aggucaccaacaucuaaccuu

SEQ ID NO: 20481 - RNA, 21 nt, Artificial Sequence
  Synthetic
ggucaccaacaucuaaccuug

SEQ ID NO: 20482 - RNA, 21 nt, Artificial Sequence
  Synthetic
gucaccaacaucuaaccuugg

SEQ ID NO: 20483 - RNA, 21 nt, Artificial Sequence
  Synthetic
ucaccaacaucuaaccuuggg

SEQ ID NO: 20484 - RNA, 21 nt, Artificial Sequence
  Synthetic
caccaacaucuaaccuugggc

SEQ ID NO: 20485 - RNA, 21 nt, Artificial Sequence
  Synthetic
accaacaucuaaccuugggcu

SEQ ID NO: 20486 - RNA, 21 nt, Artificial Sequence
  Synthetic
ccaacaucuaaccuugggcug

SEQ ID NO: 20487 - RNA, 21 nt, Artificial Sequence
  Synthetic
caacaucuaaccuugggcugu

SEQ ID NO: 20488 - RNA, 21 nt, Artificial Sequence
  Synthetic
aacaucuaaccuugggcugug

SEQ ID NO: 20489 - RNA, 21 nt, Artificial Sequence
  Synthetic
acaucuaaccuugggcugugu

SEQ ID NO: 20490 - RNA, 21 nt, Artificial Sequence
  Synthetic
caucuaaccuugggcuguguc

SEQ ID NO: 20491 - RNA, 21 nt, Artificial Sequence
  Synthetic
aucuaaccuugggcugugucu

SEQ ID NO: 20492 - RNA, 21 nt, Artificial Sequence
  Synthetic
ucuaaccuugggcugugucuu

SEQ ID NO: 20493 - RNA, 21 nt, Artificial Sequence
  Synthetic
cuaaccuugggcugugucuuc

SEQ ID NO: 20494 - RNA, 21 nt, Artificial Sequence
  Synthetic
uaaccuugggcugugucuucc

SEQ ID NO: 20495 - RNA, 21 nt, Artificial Sequence
  Synthetic
aaccuugggcugugucuuccc

SEQ ID NO: 20496 - RNA, 21 nt, Artificial Sequence
  Synthetic
accuugggcugugucuuccca

SEQ ID NO: 20497 - RNA, 21 nt, Artificial Sequence
  Synthetic
ccuugggcugugucuucccau

SEQ ID NO: 20498 - RNA, 21 nt, Artificial Sequence
  Synthetic
cuugggcugugucuucccaua

SEQ ID NO: 20499 - RNA, 21 nt, Artificial Sequence
  Synthetic
uugggcugugucuucccauac

SEQ ID NO: 20500 - RNA, 21 nt, Artificial Sequence
  Synthetic
ugggcugugucuucccauaca

SEQ ID NO: 20501 - RNA, 21 nt, Artificial Sequence
  Synthetic
gggcugugucuucccauacaa

SEQ ID NO: 20502 - RNA, 21 nt, Artificial Sequence
  Synthetic
ggcugugucuucccauacaac

SEQ ID NO: 20503 - RNA, 21 nt, Artificial Sequence
  Synthetic
gcugugucuucccauacaacc

SEQ ID NO: 20504 - RNA, 21 nt, Artificial Sequence
  Synthetic
cugugucuucccauacaaccc

SEQ ID NO: 20505 - RNA, 21 nt, Artificial Sequence
  Synthetic
ugugucuucccauacaacccu

SEQ ID NO: 20506 - RNA, 21 nt, Artificial Sequence
  Synthetic
gugucuucccauacaacccua

SEQ ID NO: 20507 - RNA, 21 nt, Artificial Sequence
  Synthetic
ugucuucccauacaacccuau

SEQ ID NO: 20508 - RNA, 21 nt, Artificial Sequence
  Synthetic
gucuucccauacaacccuauu

SEQ ID NO: 20509 - RNA, 21 nt, Artificial Sequence
  Synthetic
ucuucccauacaacccuauuu

SEQ ID NO: 20510 - RNA, 21 nt, Artificial Sequence
  Synthetic
cuucccauacaacccuauuua

SEQ ID NO: 20511 - RNA, 21 nt, Artificial Sequence
  Synthetic
uucccauacaacccuauuuac

SEQ ID NO: 20512 - RNA, 21 nt, Artificial Sequence
  Synthetic
ucccauacaacccuauuuacg

SEQ ID NO: 20513 - RNA, 21 nt, Artificial Sequence
  Synthetic
cccauacaacccuauuuacgu

SEQ ID NO: 20514 - RNA, 21 nt, Artificial Sequence
  Synthetic
ccauacaacccuauuuacguc

SEQ ID NO: 20515 - RNA, 21 nt, Artificial Sequence
  Synthetic
cauacaacccuauuuacguca

SEQ ID NO: 20516 - RNA, 21 nt, Artificial Sequence
  Synthetic
auacaacccuauuuacgucaa

SEQ ID NO: 20517 - RNA, 21 nt, Artificial Sequence
  Synthetic
uacaacccuauuuacgucaac

SEQ ID NO: 20518 - RNA, 21 nt, Artificial Sequence
  Synthetic
acaacccuauuuacgucaacc

SEQ ID NO: 20519 - RNA, 21 nt, Artificial Sequence
  Synthetic
caacccuauuuacgucaaccu

SEQ ID NO: 20520 - RNA, 21 nt, Artificial Sequence
  Synthetic
aacccuauuuacgucaaccuu

SEQ ID NO: 20521 - RNA, 21 nt, Artificial Sequence
  Synthetic
acccuauuuacgucaaccuuc

SEQ ID NO: 20522 - RNA, 21 nt, Artificial Sequence
  Synthetic
cccuauuuacgucaaccuucc

SEQ ID NO: 20523 - RNA, 21 nt, Artificial Sequence
  Synthetic
ccuauuuacgucaaccuucca

SEQ ID NO: 20524 - RNA, 21 nt, Artificial Sequence
  Synthetic
cuauuuacgucaaccuuccaa

SEQ ID NO: 20525 - RNA, 21 nt, Artificial Sequence
  Synthetic
uauuuacgucaaccuuccaau

SEQ ID NO: 20526 - RNA, 21 nt, Artificial Sequence
  Synthetic
auuuacgucaaccuuccaaug

SEQ ID NO: 20527 - RNA, 21 nt, Artificial Sequence
  Synthetic
uuuacgucaaccuuccaauga

SEQ ID NO: 20528 - RNA, 21 nt, Artificial Sequence
  Synthetic
uuacgucaaccuuccaaugac

SEQ ID NO: 20529 - RNA, 21 nt, Artificial Sequence
  Synthetic
uacgucaaccuuccaaugacu

SEQ ID NO: 20530 - RNA, 21 nt, Artificial Sequence
  Synthetic
acgucaaccuuccaaugacug

SEQ ID NO: 20531 - RNA, 21 nt, Artificial Sequence
  Synthetic
cgucaaccuuccaaugacugc

SEQ ID NO: 20532 - RNA, 21 nt, Artificial Sequence
  Synthetic
gucaaccuuccaaugacugcu

SEQ ID NO: 20533 - RNA, 21 nt, Artificial Sequence
  Synthetic
ucaaccuuccaaugacugcuc

SEQ ID NO: 20534 - RNA, 21 nt, Artificial Sequence
  Synthetic
caaccuuccaaugacugcucc

SEQ ID NO: 20535 - RNA, 21 nt, Artificial Sequence
  Synthetic
aaccuuccaaugacugcuccu

SEQ ID NO: 20536 - RNA, 21 nt, Artificial Sequence
  Synthetic
accuuccaaugacugcuccug

SEQ ID NO: 20537 - RNA, 21 nt, Artificial Sequence
  Synthetic
ccuuccaaugacugcuccugg

SEQ ID NO: 20538 - RNA, 21 nt, Artificial Sequence
  Synthetic
cuuccaaugacugcuccuggg

SEQ ID NO: 20539 - RNA, 21 nt, Artificial Sequence
  Synthetic
uuccaaugacugcuccugggg

SEQ ID NO: 20540 - RNA, 21 nt, Artificial Sequence
  Synthetic
uccaaugacugcuccugggga

SEQ ID NO: 20541 - RNA, 21 nt, Artificial Sequence
  Synthetic
ccaaugacugcuccuggggac

SEQ ID NO: 20542 - RNA, 21 nt, Artificial Sequence
  Synthetic
caaugacugcuccuggggaca

SEQ ID NO: 20543 - RNA, 21 nt, Artificial Sequence
  Synthetic
aaugacugcuccuggggacag

SEQ ID NO: 20544 - RNA, 21 nt, Artificial Sequence
  Synthetic
augacugcuccuggggacaga

SEQ ID NO: 20545 - RNA, 21 nt, Artificial Sequence
  Synthetic
ugacugcuccuggggacagag

SEQ ID NO: 20546 - RNA, 21 nt, Artificial Sequence
  Synthetic
gacugcuccuggggacagagu

SEQ ID NO: 20547 - RNA, 21 nt, Artificial Sequence
  Synthetic
acugcuccuggggacagagug

SEQ ID NO: 20548 - RNA, 21 nt, Artificial Sequence
  Synthetic
cugcuccuggggacagagugg

SEQ ID NO: 20549 - RNA, 21 nt, Artificial Sequence
  Synthetic
ugcuccuggggacagaguggu

SEQ ID NO: 20550 - RNA, 21 nt, Artificial Sequence
  Synthetic
gcuccuggggacagaguggug

SEQ ID NO: 20551 - RNA, 21 nt, Artificial Sequence
  Synthetic
cuccuggggacagagugguga

SEQ ID NO: 20552 - RNA, 21 nt, Artificial Sequence
  Synthetic
uccuggggacagaguggugaa

SEQ ID NO: 20553 - RNA, 21 nt, Artificial Sequence
  Synthetic
ccuggggacagaguggugaaa

SEQ ID NO: 20554 - RNA, 21 nt, Artificial Sequence
  Synthetic
cuggggacagaguggugaaau

SEQ ID NO: 20555 - RNA, 21 nt, Artificial Sequence
  Synthetic
uggggacagaguggugaaaug

SEQ ID NO: 20556 - RNA, 21 nt, Artificial Sequence
  Synthetic
ggggacagaguggugaaaugg

SEQ ID NO: 20557 - RNA, 21 nt, Artificial Sequence
  Synthetic
gggacagaguggugaaauggu

SEQ ID NO: 20558 - RNA, 21 nt, Artificial Sequence
  Synthetic
ggacagaguggugaaauggua

SEQ ID NO: 20559 - RNA, 21 nt, Artificial Sequence
  Synthetic
gacagaguggugaaaugguac

SEQ ID NO: 20560 - RNA, 21 nt, Artificial Sequence
  Synthetic
acagaguggugaaaugguacc

SEQ ID NO: 20561 - RNA, 21 nt, Artificial Sequence
  Synthetic
cagaguggugaaaugguacca

SEQ ID NO: 20562 - RNA, 21 nt, Artificial Sequence
  Synthetic
agaguggugaaaugguaccau

SEQ ID NO: 20563 - RNA, 21 nt, Artificial Sequence
  Synthetic
gaguggugaaaugguaccaug

SEQ ID NO: 20564 - RNA, 21 nt, Artificial Sequence
  Synthetic
aguggugaaaugguaccaugg

SEQ ID NO: 20565 - RNA, 21 nt, Artificial Sequence
  Synthetic
guggugaaaugguaccauggg

SEQ ID NO: 20566 - RNA, 21 nt, Artificial Sequence
  Synthetic
uggugaaaugguaccaugggc

SEQ ID NO: 20567 - RNA, 21 nt, Artificial Sequence
  Synthetic
ggugaaaugguaccaugggca

SEQ ID NO: 20568 - RNA, 21 nt, Artificial Sequence
  Synthetic
gugaaaugguaccaugggcau

SEQ ID NO: 20569 - RNA, 21 nt, Artificial Sequence
  Synthetic
ugaaaugguaccaugggcauu

SEQ ID NO: 20570 - RNA, 21 nt, Artificial Sequence
  Synthetic
gaaaugguaccaugggcauuc

SEQ ID NO: 20571 - RNA, 21 nt, Artificial Sequence
  Synthetic
aaaugguaccaugggcauucu

SEQ ID NO: 20572 - RNA, 21 nt, Artificial Sequence
  Synthetic
aaugguaccaugggcauucug

SEQ ID NO: 20573 - RNA, 21 nt, Artificial Sequence
  Synthetic
augguaccaugggcauucuga

SEQ ID NO: 20574 - RNA, 21 nt, Artificial Sequence
  Synthetic
ugguaccaugggcauucugac

SEQ ID NO: 20575 - RNA, 21 nt, Artificial Sequence
  Synthetic
gguaccaugggcauucugaca

SEQ ID NO: 20576 - RNA, 21 nt, Artificial Sequence
  Synthetic
guaccaugggcauucugacaa

SEQ ID NO: 20577 - RNA, 21 nt, Artificial Sequence
  Synthetic
uaccaugggcauucugacaac

SEQ ID NO: 20578 - RNA, 21 nt, Artificial Sequence
  Synthetic
accaugggcauucugacaacc

SEQ ID NO: 20579 - RNA, 21 nt, Artificial Sequence
  Synthetic
ccaugggcauucugacaacca

SEQ ID NO: 20580 - RNA, 21 nt, Artificial Sequence
  Synthetic
caugggcauucugacaaccaa

SEQ ID NO: 20581 - RNA, 21 nt, Artificial Sequence
  Synthetic
augggcauucugacaaccaac

SEQ ID NO: 20582 - RNA, 21 nt, Artificial Sequence
  Synthetic
ugggcauucugacaaccaacu

SEQ ID NO: 20583 - RNA, 21 nt, Artificial Sequence
  Synthetic
gggcauucugacaaccaacuc

SEQ ID NO: 20584 - RNA, 21 nt, Artificial Sequence
  Synthetic
ggcauucugacaaccaacuca

SEQ ID NO: 20585 - RNA, 21 nt, Artificial Sequence
  Synthetic
gcauucugacaaccaacucag

SEQ ID NO: 20586 - RNA, 21 nt, Artificial Sequence
  Synthetic
cauucugacaaccaacucaga

SEQ ID NO: 20587 - RNA, 21 nt, Artificial Sequence
  Synthetic
auucugacaaccaacucagag

SEQ ID NO: 20588 - RNA, 21 nt, Artificial Sequence
  Synthetic
uucugacaaccaacucagaga

SEQ ID NO: 20589 - RNA, 21 nt, Artificial Sequence
  Synthetic
ucugacaaccaacucagagaa

SEQ ID NO: 20590 - RNA, 21 nt, Artificial Sequence
  Synthetic
cugacaaccaacucagagaag

SEQ ID NO: 20591 - RNA, 21 nt, Artificial Sequence
  Synthetic
ugacaaccaacucagagaaga

SEQ ID NO: 20592 - RNA, 21 nt, Artificial Sequence
  Synthetic
gacaaccaacucagagaagag

SEQ ID NO: 20593 - RNA, 21 nt, Artificial Sequence
  Synthetic
acaaccaacucagagaagaga

SEQ ID NO: 20594 - RNA, 21 nt, Artificial Sequence
  Synthetic
caaccaacucagagaagagau

SEQ ID NO: 20595 - RNA, 21 nt, Artificial Sequence
  Synthetic
aaccaacucagagaagagaug

SEQ ID NO: 20596 - RNA, 21 nt, Artificial Sequence
  Synthetic
accaacucagagaagagaugc

SEQ ID NO: 20597 - RNA, 21 nt, Artificial Sequence
  Synthetic
ccaacucagagaagagaugcu

SEQ ID NO: 20598 - RNA, 21 nt, Artificial Sequence
  Synthetic
caacucagagaagagaugcua

SEQ ID NO: 20599 - RNA, 21 nt, Artificial Sequence
  Synthetic
aacucagagaagagaugcuac

SEQ ID NO: 20600 - RNA, 21 nt, Artificial Sequence
  Synthetic
acucagagaagagaugcuaca

SEQ ID NO: 20601 - RNA, 21 nt, Artificial Sequence
  Synthetic
cucagagaagagaugcuacau

SEQ ID NO: 20602 - RNA, 21 nt, Artificial Sequence
  Synthetic
ucagagaagagaugcuacauc

SEQ ID NO: 20603 - RNA, 21 nt, Artificial Sequence
  Synthetic
cagagaagagaugcuacaucc

SEQ ID NO: 20604 - RNA, 21 nt, Artificial Sequence
  Synthetic
agagaagagaugcuacauccu

SEQ ID NO: 20605 - RNA, 21 nt, Artificial Sequence
  Synthetic
gagaagagaugcuacauccuu

SEQ ID NO: 20606 - RNA, 21 nt, Artificial Sequence
  Synthetic
agaagagaugcuacauccuuu

SEQ ID NO: 20607 - RNA, 21 nt, Artificial Sequence
  Synthetic
gaagagaugcuacauccuuug

SEQ ID NO: 20608 - RNA, 21 nt, Artificial Sequence
  Synthetic
aagagaugcuacauccuuugc

SEQ ID NO: 20609 - RNA, 21 nt, Artificial Sequence
  Synthetic
agagaugcuacauccuuugcc

SEQ ID NO: 20610 - RNA, 21 nt, Artificial Sequence
  Synthetic
gagaugcuacauccuuugccc

SEQ ID NO: 20611 - RNA, 21 nt, Artificial Sequence
  Synthetic
agaugcuacauccuuugcccu

SEQ ID NO: 20612 - RNA, 21 nt, Artificial Sequence
  Synthetic
gaugcuacauccuuugcccuc

SEQ ID NO: 20613 - RNA, 21 nt, Artificial Sequence
  Synthetic
augcuacauccuuugcccucu

SEQ ID NO: 20614 - RNA, 21 nt, Artificial Sequence
  Synthetic
ugcuacauccuuugcccucuc

SEQ ID NO: 20615 - RNA, 21 nt, Artificial Sequence
  Synthetic
gcuacauccuuugcccucuca

SEQ ID NO: 20616 - RNA, 21 nt, Artificial Sequence
  Synthetic
cuacauccuuugcccucucag

SEQ ID NO: 20617 - RNA, 21 nt, Artificial Sequence
  Synthetic
uacauccuuugcccucucaga

SEQ ID NO: 20618 - RNA, 21 nt, Artificial Sequence
  Synthetic
acauccuuugcccucucagag

SEQ ID NO: 20619 - RNA, 21 nt, Artificial Sequence
  Synthetic
cauccuuugcccucucagagg

SEQ ID NO: 20620 - RNA, 21 nt, Artificial Sequence
  Synthetic
auccuuugcccucucagaggg

SEQ ID NO: 20621 - RNA, 21 nt, Artificial Sequence
  Synthetic
uccuuugcccucucagagggu

SEQ ID NO: 20622 - RNA, 21 nt, Artificial Sequence
  Synthetic
ccuuugcccucucagaggguc

SEQ ID NO: 20623 - RNA, 21 nt, Artificial Sequence
  Synthetic
cuuugcccucucagaggguca

SEQ ID NO: 20624 - RNA, 21 nt, Artificial Sequence
  Synthetic
uuugcccucucagagggucag

SEQ ID NO: 20625 - RNA, 21 nt, Artificial Sequence
  Synthetic
uugcccucucagagggucaga

SEQ ID NO: 20626 - RNA, 21 nt, Artificial Sequence
  Synthetic
ugcccucucagagggucagaa

SEQ ID NO: 20627 - RNA, 21 nt, Artificial Sequence
  Synthetic
gcccucucagagggucagaau

SEQ ID NO: 20628 - RNA, 21 nt, Artificial Sequence
  Synthetic
cccucucagagggucagaauu

SEQ ID NO: 20629 - RNA, 21 nt, Artificial Sequence
  Synthetic
ccucucagagggucagaauug

SEQ ID NO: 20630 - RNA, 21 nt, Artificial Sequence
  Synthetic
cucucagagggucagaauuga

SEQ ID NO: 20631 - RNA, 21 nt, Artificial Sequence
  Synthetic
ucucagagggucagaauugag

SEQ ID NO: 20632 - RNA, 21 nt, Artificial Sequence
  Synthetic
cucagagggucagaauugaga

SEQ ID NO: 20633 - RNA, 21 nt, Artificial Sequence
  Synthetic
ucagagggucagaauugagaa

SEQ ID NO: 20634 - RNA, 21 nt, Artificial Sequence
  Synthetic
cagagggucagaauugagaac

SEQ ID NO: 20635 - RNA, 21 nt, Artificial Sequence
  Synthetic
agagggucagaauugagaaca

SEQ ID NO: 20636 - RNA, 21 nt, Artificial Sequence
  Synthetic
gagggucagaauugagaacau

SEQ ID NO: 20637 - RNA, 21 nt, Artificial Sequence
  Synthetic
agggucagaauugagaacauc

SEQ ID NO: 20638 - RNA, 21 nt, Artificial Sequence
  Synthetic
gggucagaauugagaacaucu

SEQ ID NO: 20639 - RNA, 21 nt, Artificial Sequence
  Synthetic
ggucagaauugagaacaucuc

SEQ ID NO: 20640 - RNA, 21 nt, Artificial Sequence
  Synthetic
gucagaauugagaacaucucc

SEQ ID NO: 20641 - RNA, 21 nt, Artificial Sequence
  Synthetic
ucagaauugagaacaucuccc

SEQ ID NO: 20642 - RNA, 21 nt, Artificial Sequence
  Synthetic
cagaauugagaacaucuccca

SEQ ID NO: 20643 - RNA, 21 nt, Artificial Sequence
  Synthetic
agaauugagaacaucucccag

SEQ ID NO: 20644 - RNA, 21 nt, Artificial Sequence
  Synthetic
gaauugagaacaucucccagu

SEQ ID NO: 20645 - RNA, 21 nt, Artificial Sequence
  Synthetic
aauugagaacaucucccagua

SEQ ID NO: 20646 - RNA, 21 nt, Artificial Sequence
  Synthetic
auugagaacaucucccaguac

SEQ ID NO: 20647 - RNA, 21 nt, Artificial Sequence
  Synthetic
uugagaacaucucccaguacc

SEQ ID NO: 20648 - RNA, 21 nt, Artificial Sequence
  Synthetic
ugagaacaucucccaguaccu

SEQ ID NO: 20649 - RNA, 21 nt, Artificial Sequence
  Synthetic
gagaacaucucccaguaccua

SEQ ID NO: 20650 - RNA, 21 nt, Artificial Sequence
  Synthetic
agaacaucucccaguaccuag

SEQ ID NO: 20651 - RNA, 21 nt, Artificial Sequence
  Synthetic
gaacaucucccaguaccuaga

SEQ ID NO: 20652 - RNA, 21 nt, Artificial Sequence
  Synthetic
aacaucucccaguaccuagac

SEQ ID NO: 20653 - RNA, 21 nt, Artificial Sequence
  Synthetic
acaucucccaguaccuagaca

SEQ ID NO: 20654 - RNA, 21 nt, Artificial Sequence
  Synthetic
caucucccaguaccuagacau

SEQ ID NO: 20655 - RNA, 21 nt, Artificial Sequence
  Synthetic
aucucccaguaccuagacaua

SEQ ID NO: 20656 - RNA, 21 nt, Artificial Sequence
  Synthetic
ucucccaguaccuagacauac

SEQ ID NO: 20657 - RNA, 21 nt, Artificial Sequence
  Synthetic
cucccaguaccuagacauacu

SEQ ID NO: 20658 - RNA, 21 nt, Artificial Sequence
  Synthetic
ucccaguaccuagacauacuc

SEQ ID NO: 20659 - RNA, 21 nt, Artificial Sequence
  Synthetic
cccaguaccuagacauacucu

SEQ ID NO: 20660 - RNA, 21 nt, Artificial Sequence
  Synthetic
ccaguaccuagacauacucug

SEQ ID NO: 20661 - RNA, 21 nt, Artificial Sequence
  Synthetic
caguaccuagacauacucugg

SEQ ID NO: 20662 - RNA, 21 nt, Artificial Sequence
  Synthetic
aguaccuagacauacucuggu

SEQ ID NO: 20663 - RNA, 21 nt, Artificial Sequence
  Synthetic
guaccuagacauacucuggua

SEQ ID NO: 20664 - RNA, 21 nt, Artificial Sequence
  Synthetic
uaccuagacauacucugguac

SEQ ID NO: 20665 - RNA, 21 nt, Artificial Sequence
  Synthetic
accuagacauacucugguaca

SEQ ID NO: 20666 - RNA, 21 nt, Artificial Sequence
  Synthetic
ccuagacauacucugguacau

SEQ ID NO: 20667 - RNA, 21 nt, Artificial Sequence
  Synthetic
cuagacauacucugguacaua

SEQ ID NO: 20668 - RNA, 21 nt, Artificial Sequence
  Synthetic
uagacauacucugguacauau

SEQ ID NO: 20669 - RNA, 21 nt, Artificial Sequence
  Synthetic
agacauacucugguacauaug

SEQ ID NO: 20670 - RNA, 21 nt, Artificial Sequence
  Synthetic
gacauacucugguacauauga

SEQ ID NO: 20671 - RNA, 21 nt, Artificial Sequence
  Synthetic
acauacucugguacauaugaa

SEQ ID NO: 20672 - RNA, 21 nt, Artificial Sequence
  Synthetic
cauacucugguacauaugaag

SEQ ID NO: 20673 - RNA, 21 nt, Artificial Sequence
  Synthetic
auacucugguacauaugaagu

SEQ ID NO: 20674 - RNA, 21 nt, Artificial Sequence
  Synthetic
uacucugguacauaugaaguu

SEQ ID NO: 20675 - RNA, 21 nt, Artificial Sequence
  Synthetic
acucugguacauaugaaguuu

SEQ ID NO: 20676 - RNA, 21 nt, Artificial Sequence
  Synthetic
cucugguacauaugaaguuug

SEQ ID NO: 20677 - RNA, 21 nt, Artificial Sequence
  Synthetic
ucugguacauaugaaguuugu

SEQ ID NO: 20678 - RNA, 21 nt, Artificial Sequence
  Synthetic
cugguacauaugaaguuugug

SEQ ID NO: 20679 - RNA, 21 nt, Artificial Sequence
  Synthetic
ugguacauaugaaguuuguga

SEQ ID NO: 20680 - RNA, 21 nt, Artificial Sequence
  Synthetic
gguacauaugaaguuugugau

SEQ ID NO: 20681 - RNA, 21 nt, Artificial Sequence
  Synthetic
guacauaugaaguuugugauc

SEQ ID NO: 20682 - RNA, 21 nt, Artificial Sequence
  Synthetic
uacauaugaaguuugugaucu

SEQ ID NO: 20683 - RNA, 21 nt, Artificial Sequence
  Synthetic
acauaugaaguuugugaucua

SEQ ID NO: 20684 - RNA, 21 nt, Artificial Sequence
  Synthetic
cauaugaaguuugugaucuau

SEQ ID NO: 20685 - RNA, 21 nt, Artificial Sequence
  Synthetic
auaugaaguuugugaucuaug

SEQ ID NO: 20686 - RNA, 21 nt, Artificial Sequence
  Synthetic
uaugaaguuugugaucuauga

SEQ ID NO: 20687 - RNA, 21 nt, Artificial Sequence
  Synthetic
augaaguuugugaucuaugaa

SEQ ID NO: 20688 - RNA, 21 nt, Artificial Sequence
  Synthetic
ugaaguuugugaucuaugaau

SEQ ID NO: 20689 - RNA, 21 nt, Artificial Sequence
  Synthetic
gaaguuugugaucuaugaauu

SEQ ID NO: 20690 - RNA, 21 nt, Artificial Sequence
  Synthetic
aaguuugugaucuaugaauuu

SEQ ID NO: 20691 - RNA, 21 nt, Artificial Sequence
  Synthetic
aguuugugaucuaugaauuug

SEQ ID NO: 20692 - RNA, 21 nt, Artificial Sequence
  Synthetic
guuugugaucuaugaauuugg

SEQ ID NO: 20693 - RNA, 21 nt, Artificial Sequence
  Synthetic
uuugugaucuaugaauuugga

SEQ ID NO: 20694 - RNA, 21 nt, Artificial Sequence
  Synthetic
uugugaucuaugaauuuggac

SEQ ID NO: 20695 - RNA, 21 nt, Artificial Sequence
  Synthetic
ugugaucuaugaauuuggacc

SEQ ID NO: 20696 - RNA, 21 nt, Artificial Sequence
  Synthetic
gugaucuaugaauuuggacca

SEQ ID NO: 20697 - RNA, 21 nt, Artificial Sequence
  Synthetic
ugaucuaugaauuuggaccac

SEQ ID NO: 20698 - RNA, 21 nt, Artificial Sequence
  Synthetic
gaucuaugaauuuggaccaca

SEQ ID NO: 20699 - RNA, 21 nt, Artificial Sequence
  Synthetic
aucuaugaauuuggaccacag

SEQ ID NO: 20700 - RNA, 21 nt, Artificial Sequence
  Synthetic
ucuaugaauuuggaccacaga

SEQ ID NO: 20701 - RNA, 21 nt, Artificial Sequence
  Synthetic
cuaugaauuuggaccacagaa

SEQ ID NO: 20702 - RNA, 21 nt, Artificial Sequence
  Synthetic
uaugaauuuggaccacagaau

SEQ ID NO: 20703 - RNA, 21 nt, Artificial Sequence
  Synthetic
augaauuuggaccacagaauc

SEQ ID NO: 20704 - RNA, 21 nt, Artificial Sequence
  Synthetic
ugaauuuggaccacagaaucc

SEQ ID NO: 20705 - RNA, 21 nt, Artificial Sequence
  Synthetic
gaauuuggaccacagaaucca

SEQ ID NO: 20706 - RNA, 21 nt, Artificial Sequence
  Synthetic
aauuuggaccacagaauccac

SEQ ID NO: 20707 - RNA, 21 nt, Artificial Sequence
  Synthetic
auuuggaccacagaauccacc

SEQ ID NO: 20708 - RNA, 21 nt, Artificial Sequence
  Synthetic
uuuggaccacagaauccacca

SEQ ID NO: 20709 - RNA, 21 nt, Artificial Sequence
  Synthetic
uuggaccacagaauccaccac

SEQ ID NO: 20710 - RNA, 21 nt, Artificial Sequence
  Synthetic
uggaccacagaauccaccacu

SEQ ID NO: 20711 - RNA, 21 nt, Artificial Sequence
  Synthetic
ggaccacagaauccaccacua

SEQ ID NO: 20712 - RNA, 21 nt, Artificial Sequence
  Synthetic
gaccacagaauccaccacuac

SEQ ID NO: 20713 - RNA, 21 nt, Artificial Sequence
  Synthetic
accacagaauccaccacuaca

SEQ ID NO: 20714 - RNA, 21 nt, Artificial Sequence
  Synthetic
ccacagaauccaccacuacau

SEQ ID NO: 20715 - RNA, 21 nt, Artificial Sequence
  Synthetic
cacagaauccaccacuacauc

SEQ ID NO: 20716 - RNA, 21 nt, Artificial Sequence
  Synthetic
acagaauccaccacuacaucu

SEQ ID NO: 20717 - RNA, 21 nt, Artificial Sequence
  Synthetic
cagaauccaccacuacaucua

SEQ ID NO: 20718 - RNA, 21 nt, Artificial Sequence
  Synthetic
agaauccaccacuacaucuag

SEQ ID NO: 20719 - RNA, 21 nt, Artificial Sequence
  Synthetic
gaauccaccacuacaucuagc

SEQ ID NO: 20720 - RNA, 21 nt, Artificial Sequence
  Synthetic
aauccaccacuacaucuagcu

SEQ ID NO: 20721 - RNA, 21 nt, Artificial Sequence
  Synthetic
auccaccacuacaucuagcuc

SEQ ID NO: 20722 - RNA, 21 nt, Artificial Sequence
  Synthetic
uccaccacuacaucuagcucu

SEQ ID NO: 20723 - RNA, 21 nt, Artificial Sequence
  Synthetic
ccaccacuacaucuagcucuu

SEQ ID NO: 20724 - RNA, 21 nt, Artificial Sequence
  Synthetic
caccacuacaucuagcucuua

SEQ ID NO: 20725 - RNA, 21 nt, Artificial Sequence
  Synthetic
accacuacaucuagcucuuac

SEQ ID NO: 20726 - RNA, 21 nt, Artificial Sequence
  Synthetic
ccacuacaucuagcucuuacu

SEQ ID NO: 20727 - RNA, 21 nt, Artificial Sequence
  Synthetic
cacuacaucuagcucuuacuu

SEQ ID NO: 20728 - RNA, 21 nt, Artificial Sequence
  Synthetic
acuacaucuagcucuuacuuc

SEQ ID NO: 20729 - RNA, 21 nt, Artificial Sequence
  Synthetic
cuacaucuagcucuuacuucu

SEQ ID NO: 20730 - RNA, 21 nt, Artificial Sequence
  Synthetic
uacaucuagcucuuacuucuc

SEQ ID NO: 20731 - RNA, 21 nt, Artificial Sequence
  Synthetic
acaucuagcucuuacuucucu

SEQ ID NO: 20732 - RNA, 21 nt, Artificial Sequence
  Synthetic
caucuagcucuuacuucucuc

SEQ ID NO: 20733 - RNA, 21 nt, Artificial Sequence
  Synthetic
aucuagcucuuacuucucucc

SEQ ID NO: 20734 - RNA, 21 nt, Artificial Sequence
  Synthetic
ucuagcucuuacuucucucca

SEQ ID NO: 20735 - RNA, 21 nt, Artificial Sequence
  Synthetic
cuagcucuuacuucucuccaa

SEQ ID NO: 20736 - RNA, 21 nt, Artificial Sequence
  Synthetic
uagcucuuacuucucuccaau

SEQ ID NO: 20737 - RNA, 21 nt, Artificial Sequence
  Synthetic
agcucuuacuucucuccaaug

SEQ ID NO: 20738 - RNA, 21 nt, Artificial Sequence
  Synthetic
gcucuuacuucucuccaaugc

SEQ ID NO: 20739 - RNA, 21 nt, Artificial Sequence
  Synthetic
cucuuacuucucuccaaugcc

SEQ ID NO: 20740 - RNA, 21 nt, Artificial Sequence
  Synthetic
ucuuacuucucuccaaugccc

SEQ ID NO: 20741 - RNA, 21 nt, Artificial Sequence
  Synthetic
cuuacuucucuccaaugcccu

SEQ ID NO: 20742 - RNA, 21 nt, Artificial Sequence
  Synthetic
uuacuucucuccaaugcccug

SEQ ID NO: 20743 - RNA, 21 nt, Artificial Sequence
  Synthetic
uacuucucuccaaugcccugc

SEQ ID NO: 20744 - RNA, 21 nt, Artificial Sequence
  Synthetic
acuucucuccaaugcccugcu

SEQ ID NO: 20745 - RNA, 21 nt, Artificial Sequence
  Synthetic
cuucucuccaaugcccugcug

SEQ ID NO: 20746 - RNA, 21 nt, Artificial Sequence
  Synthetic
uucucuccaaugcccugcugg

SEQ ID NO: 20747 - RNA, 21 nt, Artificial Sequence
  Synthetic
ucucuccaaugcccugcuggu

SEQ ID NO: 20748 - RNA, 21 nt, Artificial Sequence
  Synthetic
cucuccaaugcccugcugguu

SEQ ID NO: 20749 - RNA, 21 nt, Artificial Sequence
  Synthetic
ucuccaaugcccugcugguuc

SEQ ID NO: 20750 - RNA, 21 nt, Artificial Sequence
  Synthetic
cuccaaugcccugcugguuca

SEQ ID NO: 20751 - RNA, 21 nt, Artificial Sequence
  Synthetic
uccaaugcccugcugguucag

SEQ ID NO: 20752 - RNA, 21 nt, Artificial Sequence
  Synthetic
ccaaugcccugcugguucagu

SEQ ID NO: 20753 - RNA, 21 nt, Artificial Sequence
  Synthetic
caaugcccugcugguucaguc

SEQ ID NO: 20754 - RNA, 21 nt, Artificial Sequence
  Synthetic
aaugcccugcugguucaguca

SEQ ID NO: 20755 - RNA, 21 nt, Artificial Sequence
  Synthetic
augcccugcugguucagucaa

SEQ ID NO: 20756 - RNA, 21 nt, Artificial Sequence
  Synthetic
ugcccugcugguucagucaac

SEQ ID NO: 20757 - RNA, 21 nt, Artificial Sequence
  Synthetic
gcccugcugguucagucaaca

SEQ ID NO: 20758 - RNA, 21 nt, Artificial Sequence
  Synthetic
cccugcugguucagucaacag

SEQ ID NO: 20759 - RNA, 21 nt, Artificial Sequence
  Synthetic
ccugcugguucagucaacagu

SEQ ID NO: 20760 - RNA, 21 nt, Artificial Sequence
  Synthetic
cugcugguucagucaacagua

SEQ ID NO: 20761 - RNA, 21 nt, Artificial Sequence
  Synthetic
ugcugguucagucaacaguaa

SEQ ID NO: 20762 - RNA, 21 nt, Artificial Sequence
  Synthetic
gcugguucagucaacaguaag

SEQ ID NO: 20763 - RNA, 21 nt, Artificial Sequence
  Synthetic
cugguucagucaacaguaagu

SEQ ID NO: 20764 - RNA, 21 nt, Artificial Sequence
  Synthetic
ugguucagucaacaguaaguc

SEQ ID NO: 20765 - RNA, 21 nt, Artificial Sequence
  Synthetic
gguucagucaacaguaaguca

SEQ ID NO: 20766 - RNA, 21 nt, Artificial Sequence
  Synthetic
guucagucaacaguaagucaa

SEQ ID NO: 20767 - RNA, 21 nt, Artificial Sequence
  Synthetic
uucagucaacaguaagucaac

SEQ ID NO: 20768 - RNA, 21 nt, Artificial Sequence
  Synthetic
ucagucaacaguaagucaaca

SEQ ID NO: 20769 - RNA, 21 nt, Artificial Sequence
  Synthetic
cagucaacaguaagucaacag

SEQ ID NO: 20770 - RNA, 21 nt, Artificial Sequence
  Synthetic
agucaacaguaagucaacaga

SEQ ID NO: 20771 - RNA, 21 nt, Artificial Sequence
  Synthetic
gucaacaguaagucaacagac

SEQ ID NO: 20772 - RNA, 21 nt, Artificial Sequence
  Synthetic
ucaacaguaagucaacagaca

SEQ ID NO: 20773 - RNA, 21 nt, Artificial Sequence
  Synthetic
caacaguaagucaacagacag

SEQ ID NO: 20774 - RNA, 21 nt, Artificial Sequence
  Synthetic
aacaguaagucaacagacaga

SEQ ID NO: 20775 - RNA, 21 nt, Artificial Sequence
  Synthetic
acaguaagucaacagacagac

SEQ ID NO: 20776 - RNA, 21 nt, Artificial Sequence
  Synthetic
caguaagucaacagacagaca

SEQ ID NO: 20777 - RNA, 21 nt, Artificial Sequence
  Synthetic
aguaagucaacagacagacau

SEQ ID NO: 20778 - RNA, 21 nt, Artificial Sequence
  Synthetic
guaagucaacagacagacaug

SEQ ID NO: 20779 - RNA, 21 nt, Artificial Sequence
  Synthetic
uaagucaacagacagacaugu

SEQ ID NO: 20780 - RNA, 21 nt, Artificial Sequence
  Synthetic
aagucaacagacagacaugua

SEQ ID NO: 20781 - RNA, 21 nt, Artificial Sequence
  Synthetic
agucaacagacagacauguaa

SEQ ID NO: 20782 - RNA, 21 nt, Artificial Sequence
  Synthetic
gucaacagacagacauguaag

SEQ ID NO: 20783 - RNA, 21 nt, Artificial Sequence
  Synthetic
ucaacagacagacauguaaga

SEQ ID NO: 20784 - RNA, 21 nt, Artificial Sequence
  Synthetic
caacagacagacauguaagag

SEQ ID NO: 20785 - RNA, 21 nt, Artificial Sequence
  Synthetic
aacagacagacauguaagagc

SEQ ID NO: 20786 - RNA, 21 nt, Artificial Sequence
  Synthetic
acagacagacauguaagagcu

SEQ ID NO: 20787 - RNA, 21 nt, Artificial Sequence
  Synthetic
cagacagacauguaagagcua

SEQ ID NO: 20788 - RNA, 21 nt, Artificial Sequence
  Synthetic
agacagacauguaagagcuaa

SEQ ID NO: 20789 - RNA, 21 nt, Artificial Sequence
  Synthetic
gacagacauguaagagcuaau

SEQ ID NO: 20790 - RNA, 21 nt, Artificial Sequence
  Synthetic
acagacauguaagagcuaaug

SEQ ID NO: 20791 - RNA, 21 nt, Artificial Sequence
  Synthetic
cagacauguaagagcuaaugu

SEQ ID NO: 20792 - RNA, 21 nt, Artificial Sequence
  Synthetic
agacauguaagagcuaaugua

SEQ ID NO: 20793 - RNA, 21 nt, Artificial Sequence
  Synthetic
gacauguaagagcuaauguaa

SEQ ID NO: 20794 - RNA, 21 nt, Artificial Sequence
  Synthetic
acauguaagagcuaauguaag

SEQ ID NO: 20795 - RNA, 21 nt, Artificial Sequence
  Synthetic
cauguaagagcuaauguaaga

SEQ ID NO: 20796 - RNA, 21 nt, Artificial Sequence
  Synthetic
auguaagagcuaauguaagau

SEQ ID NO: 20797 - RNA, 21 nt, Artificial Sequence
  Synthetic
uguaagagcuaauguaagaug

SEQ ID NO: 20798 - RNA, 21 nt, Artificial Sequence
  Synthetic
guaagagcuaauguaagaugc

SEQ ID NO: 20799 - RNA, 21 nt, Artificial Sequence
  Synthetic
uaagagcuaauguaagaugcu

SEQ ID NO: 20800 - RNA, 21 nt, Artificial Sequence
  Synthetic
aagagcuaauguaagaugcua

SEQ ID NO: 20801 - RNA, 21 nt, Artificial Sequence
  Synthetic
agagcuaauguaagaugcuag

SEQ ID NO: 20802 - RNA, 21 nt, Artificial Sequence
  Synthetic
gagcuaauguaagaugcuagg

SEQ ID NO: 20803 - RNA, 21 nt, Artificial Sequence
  Synthetic
agcuaauguaagaugcuaggc

SEQ ID NO: 20804 - RNA, 21 nt, Artificial Sequence
  Synthetic
gcuaauguaagaugcuaggca

SEQ ID NO: 20805 - RNA, 21 nt, Artificial Sequence
  Synthetic
cuaauguaagaugcuaggcag

SEQ ID NO: 20806 - RNA, 21 nt, Artificial Sequence
  Synthetic
uaauguaagaugcuaggcaga

SEQ ID NO: 20807 - RNA, 21 nt, Artificial Sequence
  Synthetic
aauguaagaugcuaggcagaa

SEQ ID NO: 20808 - RNA, 21 nt, Artificial Sequence
  Synthetic
auguaagaugcuaggcagaau

SEQ ID NO: 20809 - RNA, 21 nt, Artificial Sequence
  Synthetic
uguaagaugcuaggcagaaug

SEQ ID NO: 20810 - RNA, 21 nt, Artificial Sequence
  Synthetic
guaagaugcuaggcagaaugc

SEQ ID NO: 20811 - RNA, 21 nt, Artificial Sequence
  Synthetic
uaagaugcuaggcagaaugca

SEQ ID NO: 20812 - RNA, 21 nt, Artificial Sequence
  Synthetic
aagaugcuaggcagaaugcaa

SEQ ID NO: 20813 - RNA, 21 nt, Artificial Sequence
  Synthetic
agaugcuaggcagaaugcaag

SEQ ID NO: 20814 - RNA, 21 nt, Artificial Sequence
  Synthetic
gaugcuaggcagaaugcaaga

SEQ ID NO: 20815 - RNA, 21 nt, Artificial Sequence
  Synthetic
augcuaggcagaaugcaagau

SEQ ID NO: 20816 - RNA, 21 nt, Artificial Sequence
  Synthetic
ugcuaggcagaaugcaagaug

SEQ ID NO: 20817 - RNA, 21 nt, Artificial Sequence
  Synthetic
gcuaggcagaaugcaagaugu

SEQ ID NO: 20818 - RNA, 21 nt, Artificial Sequence
  Synthetic
cuaggcagaaugcaagaugua

SEQ ID NO: 20819 - RNA, 21 nt, Artificial Sequence
  Synthetic
uaggcagaaugcaagauguaa

SEQ ID NO: 20820 - RNA, 21 nt, Artificial Sequence
  Synthetic
aggcagaaugcaagauguaag

SEQ ID NO: 20821 - RNA, 21 nt, Artificial Sequence
  Synthetic
ggcagaaugcaagauguaaga

SEQ ID NO: 20822 - RNA, 21 nt, Artificial Sequence
  Synthetic
gcagaaugcaagauguaagau

SEQ ID NO: 20823 - RNA, 21 nt, Artificial Sequence
  Synthetic
cagaaugcaagauguaagaug

SEQ ID NO: 20824 - RNA, 21 nt, Artificial Sequence
  Synthetic
agaaugcaagauguaagaugu

SEQ ID NO: 20825 - RNA, 21 nt, Artificial Sequence
  Synthetic
gaaugcaagauguaagaugua

SEQ ID NO: 20826 - RNA, 21 nt, Artificial Sequence
  Synthetic
aaugcaagauguaagauguaa

SEQ ID NO: 20827 - RNA, 21 nt, Artificial Sequence
  Synthetic
augcaagauguaagauguaag

SEQ ID NO: 20828 - RNA, 21 nt, Artificial Sequence
  Synthetic
ugcaagauguaagauguaaga

SEQ ID NO: 20829 - RNA, 21 nt, Artificial Sequence
  Synthetic
gcaagauguaagauguaagau

SEQ ID NO: 20830 - RNA, 21 nt, Artificial Sequence
  Synthetic
caagauguaagauguaagaug

SEQ ID NO: 20831 - RNA, 21 nt, Artificial Sequence
  Synthetic
aagauguaagauguaagaugu

SEQ ID NO: 20832 - RNA, 21 nt, Artificial Sequence
  Synthetic
agauguaagauguaagaugua

SEQ ID NO: 20833 - RNA, 21 nt, Artificial Sequence
  Synthetic
gauguaagauguaagauguaa

SEQ ID NO: 20834 - RNA, 21 nt, Artificial Sequence
  Synthetic
auguaagauguaagauguaag

SEQ ID NO: 20835 - RNA, 21 nt, Artificial Sequence
  Synthetic
uguaagauguaagauguaaga

SEQ ID NO: 20836 - RNA, 21 nt, Artificial Sequence
  Synthetic
guaagauguaagauguaagau

SEQ ID NO: 20837 - RNA, 21 nt, Artificial Sequence
  Synthetic
uaagauguaagauguaagaug

SEQ ID NO: 20838 - RNA, 21 nt, Artificial Sequence
  Synthetic
aagauguaagauguaagaugu

SEQ ID NO: 20839 - RNA, 21 nt, Artificial Sequence
  Synthetic
agauguaagauguaagaugua

SEQ ID NO: 20840 - RNA, 21 nt, Artificial Sequence
  Synthetic
gauguaagauguaagauguaa

SEQ ID NO: 20841 - RNA, 21 nt, Artificial Sequence
  Synthetic
auguaagauguaagauguaag

SEQ ID NO: 20842 - RNA, 21 nt, Artificial Sequence
  Synthetic
uguaagauguaagauguaagc

SEQ ID NO: 20843 - RNA, 21 nt, Artificial Sequence
  Synthetic
guaagauguaagauguaagca

SEQ ID NO: 20844 - RNA, 21 nt, Artificial Sequence
  Synthetic
uaagauguaagauguaagcau

SEQ ID NO: 20845 - RNA, 21 nt, Artificial Sequence
  Synthetic
aagauguaagauguaagcaug

SEQ ID NO: 20846 - RNA, 21 nt, Artificial Sequence
  Synthetic
agauguaagauguaagcaugu

SEQ ID NO: 20847 - RNA, 21 nt, Artificial Sequence
  Synthetic
gauguaagauguaagcaugua

SEQ ID NO: 20848 - RNA, 21 nt, Artificial Sequence
  Synthetic
auguaagauguaagcauguaa

SEQ ID NO: 20849 - RNA, 21 nt, Artificial Sequence
  Synthetic
uguaagauguaagcauguaag

SEQ ID NO: 20850 - RNA, 21 nt, Artificial Sequence
  Synthetic
guaagauguaagcauguaaga

SEQ ID NO: 20851 - RNA, 21 nt, Artificial Sequence
  Synthetic
uaagauguaagcauguaagau

SEQ ID NO: 20852 - RNA, 21 nt, Artificial Sequence
  Synthetic
aagauguaagcauguaagaug

SEQ ID NO: 20853 - RNA, 21 nt, Artificial Sequence
  Synthetic
agauguaagcauguaagaugc

SEQ ID NO: 20854 - RNA, 21 nt, Artificial Sequence
  Synthetic
gauguaagcauguaagaugcu

SEQ ID NO: 20855 - RNA, 21 nt, Artificial Sequence
  Synthetic
auguaagcauguaagaugcua

SEQ ID NO: 20856 - RNA, 21 nt, Artificial Sequence
  Synthetic
uguaagcauguaagaugcuag

SEQ ID NO: 20857 - RNA, 21 nt, Artificial Sequence
  Synthetic
guaagcauguaagaugcuagg

SEQ ID NO: 20858 - RNA, 21 nt, Artificial Sequence
  Synthetic
uaagcauguaagaugcuaggc

SEQ ID NO: 20859 - RNA, 21 nt, Artificial Sequence
  Synthetic
aagcauguaagaugcuaggca

SEQ ID NO: 20860 - RNA, 21 nt, Artificial Sequence
  Synthetic
agcauguaagaugcuaggcag

SEQ ID NO: 20861 - RNA, 21 nt, Artificial Sequence
  Synthetic
gcauguaagaugcuaggcaga

SEQ ID NO: 20862 - RNA, 21 nt, Artificial Sequence
  Synthetic
cauguaagaugcuaggcagaa

SEQ ID NO: 20863 - RNA, 21 nt, Artificial Sequence
  Synthetic
auguaagaugcuaggcagaau

SEQ ID NO: 20864 - RNA, 21 nt, Artificial Sequence
  Synthetic
uguaagaugcuaggcagaauc

SEQ ID NO: 20865 - RNA, 21 nt, Artificial Sequence
  Synthetic
guaagaugcuaggcagaaucc

SEQ ID NO: 20866 - RNA, 21 nt, Artificial Sequence
  Synthetic
uaagaugcuaggcagaaucca

SEQ ID NO: 20867 - RNA, 21 nt, Artificial Sequence
  Synthetic
aagaugcuaggcagaauccag

SEQ ID NO: 20868 - RNA, 21 nt, Artificial Sequence
  Synthetic
agaugcuaggcagaauccaga

SEQ ID NO: 20869 - RNA, 21 nt, Artificial Sequence
  Synthetic
gaugcuaggcagaauccagag

SEQ ID NO: 20870 - RNA, 21 nt, Artificial Sequence
  Synthetic
augcuaggcagaauccagaga

SEQ ID NO: 20871 - RNA, 21 nt, Artificial Sequence
  Synthetic
ugcuaggcagaauccagagac

SEQ ID NO: 20872 - RNA, 21 nt, Artificial Sequence
  Synthetic
gcuaggcagaauccagagaca

SEQ ID NO: 20873 - RNA, 21 nt, Artificial Sequence
  Synthetic
cuaggcagaauccagagacaa

SEQ ID NO: 20874 - RNA, 21 nt, Artificial Sequence
  Synthetic
uaggcagaauccagagacaaa

SEQ ID NO: 20875 - RNA, 21 nt, Artificial Sequence
  Synthetic
aggcagaauccagagacaaag

SEQ ID NO: 20876 - RNA, 21 nt, Artificial Sequence
  Synthetic
ggcagaauccagagacaaagu

SEQ ID NO: 20877 - RNA, 21 nt, Artificial Sequence
  Synthetic
gcagaauccagagacaaaguu

SEQ ID NO: 20878 - RNA, 21 nt, Artificial Sequence
  Synthetic
cagaauccagagacaaaguug

SEQ ID NO: 20879 - RNA, 21 nt, Artificial Sequence
  Synthetic
agaauccagagacaaaguugg

SEQ ID NO: 20880 - RNA, 21 nt, Artificial Sequence
  Synthetic
gaauccagagacaaaguugga

SEQ ID NO: 20881 - RNA, 21 nt, Artificial Sequence
  Synthetic
aauccagagacaaaguuggaa

SEQ ID NO: 20882 - RNA, 21 nt, Artificial Sequence
  Synthetic
auccagagacaaaguuggaag

SEQ ID NO: 20883 - RNA, 21 nt, Artificial Sequence
  Synthetic
uccagagacaaaguuggaaga

SEQ ID NO: 20884 - RNA, 21 nt, Artificial Sequence
  Synthetic
ccagagacaaaguuggaagau

SEQ ID NO: 20885 - RNA, 21 nt, Artificial Sequence
  Synthetic
cagagacaaaguuggaagaug

SEQ ID NO: 20886 - RNA, 21 nt, Artificial Sequence
  Synthetic
agagacaaaguuggaagaugu

SEQ ID NO: 20887 - RNA, 21 nt, Artificial Sequence
  Synthetic
gagacaaaguuggaagauguc

SEQ ID NO: 20888 - RNA, 21 nt, Artificial Sequence
  Synthetic
agacaaaguuggaagauguca

SEQ ID NO: 20889 - RNA, 21 nt, Artificial Sequence
  Synthetic
gacaaaguuggaagaugucac

SEQ ID NO: 20890 - RNA, 21 nt, Artificial Sequence
  Synthetic
acaaaguuggaagaugucacc

SEQ ID NO: 20891 - RNA, 21 nt, Artificial Sequence
  Synthetic
caaaguuggaagaugucaccc

SEQ ID NO: 20892 - RNA, 21 nt, Artificial Sequence
  Synthetic
aaaguuggaagaugucacccu

SEQ ID NO: 20893 - RNA, 21 nt, Artificial Sequence
  Synthetic
aaguuggaagaugucacccug

SEQ ID NO: 20894 - RNA, 21 nt, Artificial Sequence
  Synthetic
aguuggaagaugucacccugu

SEQ ID NO: 20895 - RNA, 21 nt, Artificial Sequence
  Synthetic
guuggaagaugucacccugug

SEQ ID NO: 20896 - RNA, 21 nt, Artificial Sequence
  Synthetic
uuggaagaugucacccugugu

SEQ ID NO: 20897 - RNA, 21 nt, Artificial Sequence
  Synthetic
uggaagaugucacccugugua

SEQ ID NO: 20898 - RNA, 21 nt, Artificial Sequence
  Synthetic
ggaagaugucacccuguguaa

SEQ ID NO: 20899 - RNA, 21 nt, Artificial Sequence
  Synthetic
gaagaugucacccuguguaac

SEQ ID NO: 20900 - RNA, 21 nt, Artificial Sequence
  Synthetic
aagaugucacccuguguaaca

SEQ ID NO: 20901 - RNA, 21 nt, Artificial Sequence
  Synthetic
agaugucacccuguguaacag

SEQ ID NO: 20902 - RNA, 21 nt, Artificial Sequence
  Synthetic
gaugucacccuguguaacaga

SEQ ID NO: 20903 - RNA, 21 nt, Artificial Sequence
  Synthetic
augucacccuguguaacagaa

SEQ ID NO: 20904 - RNA, 21 nt, Artificial Sequence
  Synthetic
ugucacccuguguaacagaag

SEQ ID NO: 20905 - RNA, 21 nt, Artificial Sequence
  Synthetic
gucacccuguguaacagaagu

SEQ ID NO: 20906 - RNA, 21 nt, Artificial Sequence
  Synthetic
ucacccuguguaacagaaguu

SEQ ID NO: 20907 - RNA, 21 nt, Artificial Sequence
  Synthetic
cacccuguguaacagaaguuu

SEQ ID NO: 20908 - RNA, 21 nt, Artificial Sequence
  Synthetic
acccuguguaacagaaguuuc

SEQ ID NO: 20909 - RNA, 21 nt, Artificial Sequence
  Synthetic
cccuguguaacagaaguuucu

SEQ ID NO: 20910 - RNA, 21 nt, Artificial Sequence
  Synthetic
ccuguguaacagaaguuucua

SEQ ID NO: 20911 - RNA, 21 nt, Artificial Sequence
  Synthetic
cuguguaacagaaguuucuag

SEQ ID NO: 20912 - RNA, 21 nt, Artificial Sequence
  Synthetic
uguguaacagaaguuucuagg

SEQ ID NO: 20913 - RNA, 21 nt, Artificial Sequence
  Synthetic
guguaacagaaguuucuagga

SEQ ID NO: 20914 - RNA, 21 nt, Artificial Sequence
  Synthetic
uguaacagaaguuucuaggac

SEQ ID NO: 20915 - RNA, 21 nt, Artificial Sequence
  Synthetic
guaacagaaguuucuaggacu

SEQ ID NO: 20916 - RNA, 21 nt, Artificial Sequence
  Synthetic
uaacagaaguuucuaggacuc

SEQ ID NO: 20917 - RNA, 21 nt, Artificial Sequence
  Synthetic
aacagaaguuucuaggacucu

SEQ ID NO: 20918 - RNA, 21 nt, Artificial Sequence
  Synthetic
acagaaguuucuaggacucug

SEQ ID NO: 20919 - RNA, 21 nt, Artificial Sequence
  Synthetic
cagaaguuucuaggacucugc

SEQ ID NO: 20920 - RNA, 21 nt, Artificial Sequence
  Synthetic
agaaguuucuaggacucugca

SEQ ID NO: 20921 - RNA, 21 nt, Artificial Sequence
  Synthetic
gaaguuucuaggacucugcac

SEQ ID NO: 20922 - RNA, 21 nt, Artificial Sequence
  Synthetic
aaguuucuaggacucugcaca

SEQ ID NO: 20923 - RNA, 21 nt, Artificial Sequence
  Synthetic
aguuucuaggacucugcacac

SEQ ID NO: 20924 - RNA, 21 nt, Artificial Sequence
  Synthetic
guuucuaggacucugcacacu

SEQ ID NO: 20925 - RNA, 21 nt, Artificial Sequence
  Synthetic
uuucuaggacucugcacacua

SEQ ID NO: 20926 - RNA, 21 nt, Artificial Sequence
  Synthetic
uucuaggacucugcacacuau

SEQ ID NO: 20927 - RNA, 21 nt, Artificial Sequence
  Synthetic
ucuaggacucugcacacuaug

SEQ ID NO: 20928 - RNA, 21 nt, Artificial Sequence
  Synthetic
cuaggacucugcacacuaugc

SEQ ID NO: 20929 - RNA, 21 nt, Artificial Sequence
  Synthetic
uaggacucugcacacuaugca

SEQ ID NO: 20930 - RNA, 21 nt, Artificial Sequence
  Synthetic
aggacucugcacacuaugcau

SEQ ID NO: 20931 - RNA, 21 nt, Artificial Sequence
  Synthetic
ggacucugcacacuaugcaua

SEQ ID NO: 20932 - RNA, 21 nt, Artificial Sequence
  Synthetic
gacucugcacacuaugcauau

SEQ ID NO: 20933 - RNA, 21 nt, Artificial Sequence
  Synthetic
acucugcacacuaugcauauu

SEQ ID NO: 20934 - RNA, 21 nt, Artificial Sequence
  Synthetic
cucugcacacuaugcauauua

SEQ ID NO: 20935 - RNA, 21 nt, Artificial Sequence
  Synthetic
ucugcacacuaugcauauuaa

SEQ ID NO: 20936 - RNA, 21 nt, Artificial Sequence
  Synthetic
cugcacacuaugcauauuaau

SEQ ID NO: 20937 - RNA, 21 nt, Artificial Sequence
  Synthetic
ugcacacuaugcauauuaaua

SEQ ID NO: 20938 - RNA, 21 nt, Artificial Sequence
  Synthetic
gcacacuaugcauauuaauaa

SEQ ID NO: 20939 - RNA, 21 nt, Artificial Sequence
  Synthetic
cacacuaugcauauuaauaac

SEQ ID NO: 20940 - RNA, 21 nt, Artificial Sequence
  Synthetic
acacuaugcauauuaauaacg

SEQ ID NO: 20941 - RNA, 21 nt, Artificial Sequence
  Synthetic
cacuaugcauauuaauaacgu

SEQ ID NO: 20942 - RNA, 21 nt, Artificial Sequence
  Synthetic
acuaugcauauuaauaacgua

SEQ ID NO: 20943 - RNA, 21 nt, Artificial Sequence
  Synthetic
cuaugcauauuaauaacguau

SEQ ID NO: 20944 - RNA, 21 nt, Artificial Sequence
  Synthetic
uaugcauauuaauaacguauu

SEQ ID NO: 20945 - RNA, 21 nt, Artificial Sequence
  Synthetic
augcauauuaauaacguauuu

SEQ ID NO: 20946 - RNA, 21 nt, Artificial Sequence
  Synthetic
ugcauauuaauaacguauuua

SEQ ID NO: 20947 - RNA, 21 nt, Artificial Sequence
  Synthetic
gcauauuaauaacguauuuaa

SEQ ID NO: 20948 - RNA, 21 nt, Artificial Sequence
  Synthetic
cauauuaauaacguauuuaaa

SEQ ID NO: 20949 - RNA, 21 nt, Artificial Sequence
  Synthetic
auauuaauaacguauuuaaag

SEQ ID NO: 20950 - RNA, 21 nt, Artificial Sequence
  Synthetic
uauuaauaacguauuuaaaga

SEQ ID NO: 20951 - RNA, 21 nt, Artificial Sequence
  Synthetic
auuaauaacguauuuaaagag

SEQ ID NO: 20952 - RNA, 21 nt, Artificial Sequence
  Synthetic
uuaauaacguauuuaaagagg

SEQ ID NO: 20953 - RNA, 21 nt, Artificial Sequence
  Synthetic
uaauaacguauuuaaagaggg

SEQ ID NO: 20954 - RNA, 21 nt, Artificial Sequence
  Synthetic
aauaacguauuuaaagaggga

SEQ ID NO: 20955 - RNA, 21 nt, Artificial Sequence
  Synthetic
auaacguauuuaaagagggaa

SEQ ID NO: 20956 - RNA, 21 nt, Artificial Sequence
  Synthetic
uaacguauuuaaagagggaac

SEQ ID NO: 20957 - RNA, 21 nt, Artificial Sequence
  Synthetic
aacguauuuaaagagggaacu

SEQ ID NO: 20958 - RNA, 21 nt, Artificial Sequence
  Synthetic
acguauuuaaagagggaacuu

SEQ ID NO: 20959 - RNA, 21 nt, Artificial Sequence
  Synthetic
cguauuuaaagagggaacuug

SEQ ID NO: 20960 - RNA, 21 nt, Artificial Sequence
  Synthetic
guauuuaaagagggaacuuga

SEQ ID NO: 20961 - RNA, 21 nt, Artificial Sequence
  Synthetic
uauuuaaagagggaacuugaa

SEQ ID NO: 20962 - RNA, 21 nt, Artificial Sequence
  Synthetic
auuuaaagagggaacuugaag

SEQ ID NO: 20963 - RNA, 21 nt, Artificial Sequence
  Synthetic
uuuaaagagggaacuugaaga

SEQ ID NO: 20964 - RNA, 21 nt, Artificial Sequence
  Synthetic
uuaaagagggaacuugaagac

SEQ ID NO: 20965 - RNA, 21 nt, Artificial Sequence
  Synthetic
uaaagagggaacuugaagaca

SEQ ID NO: 20966 - RNA, 21 nt, Artificial Sequence
  Synthetic
aaagagggaacuugaagacag

SEQ ID NO: 20967 - RNA, 21 nt, Artificial Sequence
  Synthetic
aagagggaacuugaagacagu

SEQ ID NO: 20968 - RNA, 21 nt, Artificial Sequence
  Synthetic
agagggaacuugaagacaguu

SEQ ID NO: 20969 - RNA, 21 nt, Artificial Sequence
  Synthetic
gagggaacuugaagacaguuu

SEQ ID NO: 20970 - RNA, 21 nt, Artificial Sequence
  Synthetic
agggaacuugaagacaguuua

SEQ ID NO: 20971 - RNA, 21 nt, Artificial Sequence
  Synthetic
gggaacuugaagacaguuuag

SEQ ID NO: 20972 - RNA, 21 nt, Artificial Sequence
  Synthetic
ggaacuugaagacaguuuagg

SEQ ID NO: 20973 - RNA, 21 nt, Artificial Sequence
  Synthetic
gaacuugaagacaguuuaggc

SEQ ID NO: 20974 - RNA, 21 nt, Artificial Sequence
  Synthetic
aacuugaagacaguuuaggca

SEQ ID NO: 20975 - RNA, 21 nt, Artificial Sequence
  Synthetic
acuugaagacaguuuaggcag

SEQ ID NO: 20976 - RNA, 21 nt, Artificial Sequence
  Synthetic
cuugaagacaguuuaggcagg

SEQ ID NO: 20977 - RNA, 21 nt, Artificial Sequence
  Synthetic
uugaagacaguuuaggcagga

SEQ ID NO: 20978 - RNA, 21 nt, Artificial Sequence
  Synthetic
ugaagacaguuuaggcaggag

SEQ ID NO: 20979 - RNA, 21 nt, Artificial Sequence
  Synthetic
gaagacaguuuaggcaggaga

SEQ ID NO: 20980 - RNA, 21 nt, Artificial Sequence
  Synthetic
aagacaguuuaggcaggagau

SEQ ID NO: 20981 - RNA, 21 nt, Artificial Sequence
  Synthetic
agacaguuuaggcaggagauu

SEQ ID NO: 20982 - RNA, 21 nt, Artificial Sequence
  Synthetic
gacaguuuaggcaggagauua

SEQ ID NO: 20983 - RNA, 21 nt, Artificial Sequence
  Synthetic
acaguuuaggcaggagauuaa

SEQ ID NO: 20984 - RNA, 21 nt, Artificial Sequence
  Synthetic
caguuuaggcaggagauuaag

SEQ ID NO: 20985 - RNA, 21 nt, Artificial Sequence
  Synthetic
aguuuaggcaggagauuaagg

SEQ ID NO: 20986 - RNA, 21 nt, Artificial Sequence
  Synthetic
guuuaggcaggagauuaagga

SEQ ID NO: 20987 - RNA, 21 nt, Artificial Sequence
  Synthetic
uuuaggcaggagauuaaggag

SEQ ID NO: 20988 - RNA, 21 nt, Artificial Sequence
  Synthetic
uuaggcaggagauuaaggaga

SEQ ID NO: 20989 - RNA, 21 nt, Artificial Sequence
  Synthetic
uaggcaggagauuaaggagac

SEQ ID NO: 20990 - RNA, 21 nt, Artificial Sequence
  Synthetic
aggcaggagauuaaggagacc

SEQ ID NO: 20991 - RNA, 21 nt, Artificial Sequence
  Synthetic
ggcaggagauuaaggagaccu

SEQ ID NO: 20992 - RNA, 21 nt, Artificial Sequence
  Synthetic
gcaggagauuaaggagaccuc

SEQ ID NO: 20993 - RNA, 21 nt, Artificial Sequence
  Synthetic
caggagauuaaggagaccucu

SEQ ID NO: 20994 - RNA, 21 nt, Artificial Sequence
  Synthetic
aggagauuaaggagaccucuc

SEQ ID NO: 20995 - RNA, 21 nt, Artificial Sequence
  Synthetic
ggagauuaaggagaccucuca

SEQ ID NO: 20996 - RNA, 21 nt, Artificial Sequence
  Synthetic
gagauuaaggagaccucucau

SEQ ID NO: 20997 - RNA, 21 nt, Artificial Sequence
  Synthetic
agauuaaggagaccucucaug

SEQ ID NO: 20998 - RNA, 21 nt, Artificial Sequence
  Synthetic
gauuaaggagaccucucaugu

SEQ ID NO: 20999 - RNA, 21 nt, Artificial Sequence
  Synthetic
auuaaggagaccucucaugug

SEQ ID NO: 21000 - RNA, 21 nt, Artificial Sequence
  Synthetic
uuaaggagaccucucaugugu

SEQ ID NO: 21001 - RNA, 21 nt, Artificial Sequence
  Synthetic
uaaggagaccucucauguguu

SEQ ID NO: 21002 - RNA, 21 nt, Artificial Sequence
  Synthetic
aaggagaccucucauguguuu

SEQ ID NO: 21003 - RNA, 21 nt, Artificial Sequence
  Synthetic
aggagaccucucauguguuuu

SEQ ID NO: 21004 - RNA, 21 nt, Artificial Sequence
  Synthetic
ggagaccucucauguguuuuc

SEQ ID NO: 21005 - RNA, 21 nt, Artificial Sequence
  Synthetic
gagaccucucauguguuuuca

SEQ ID NO: 21006 - RNA, 21 nt, Artificial Sequence
  Synthetic
agaccucucauguguuuucau

SEQ ID NO: 21007 - RNA, 21 nt, Artificial Sequence
  Synthetic
gaccucucauguguuuucaug

SEQ ID NO: 21008 - RNA, 21 nt, Artificial Sequence
  Synthetic
accucucauguguuuucaugu

SEQ ID NO: 21009 - RNA, 21 nt, Artificial Sequence
  Synthetic
ccucucauguguuuucaugug

SEQ ID NO: 21010 - RNA, 21 nt, Artificial Sequence
  Synthetic
cucucauguguuuucaugugu

SEQ ID NO: 21011 - RNA, 21 nt, Artificial Sequence
  Synthetic
ucucauguguuuucauguguu

SEQ ID NO: 21012 - RNA, 21 nt, Artificial Sequence
  Synthetic
cucauguguuuucauguguug

SEQ ID NO: 21013 - RNA, 21 nt, Artificial Sequence
  Synthetic
ucauguguuuucauguguugu

SEQ ID NO: 21014 - RNA, 21 nt, Artificial Sequence
  Synthetic
cauguguuuucauguguuguc

SEQ ID NO: 21015 - RNA, 21 nt, Artificial Sequence
  Synthetic
auguguuuucauguguuguca

SEQ ID NO: 21016 - RNA, 21 nt, Artificial Sequence
  Synthetic
uguguuuucauguguugucau

SEQ ID NO: 21017 - RNA, 21 nt, Artificial Sequence
  Synthetic
guguuuucauguguugucaua

SEQ ID NO: 21018 - RNA, 21 nt, Artificial Sequence
  Synthetic
uguuuucauguguugucauag

SEQ ID NO: 21019 - RNA, 21 nt, Artificial Sequence
  Synthetic
guuuucauguguugucauagc

SEQ ID NO: 21020 - RNA, 21 nt, Artificial Sequence
  Synthetic
uuuucauguguugucauagcc

SEQ ID NO: 21021 - RNA, 21 nt, Artificial Sequence
  Synthetic
uuucauguguugucauagccc

SEQ ID NO: 21022 - RNA, 21 nt, Artificial Sequence
  Synthetic
uucauguguugucauagcccc

SEQ ID NO: 21023 - RNA, 21 nt, Artificial Sequence
  Synthetic
ucauguguugucauagcccca

SEQ ID NO: 21024 - RNA, 21 nt, Artificial Sequence
  Synthetic
cauguguugucauagccccau

SEQ ID NO: 21025 - RNA, 21 nt, Artificial Sequence
  Synthetic
auguguugucauagccccaug

SEQ ID NO: 21026 - RNA, 21 nt, Artificial Sequence
  Synthetic
uguguugucauagccccaugu

SEQ ID NO: 21027 - RNA, 21 nt, Artificial Sequence
  Synthetic
guguugucauagccccauguu

SEQ ID NO: 21028 - RNA, 21 nt, Artificial Sequence
  Synthetic
uguugucauagccccauguuu

SEQ ID NO: 21029 - RNA, 21 nt, Artificial Sequence
  Synthetic
guugucauagccccauguuug

SEQ ID NO: 21030 - RNA, 21 nt, Artificial Sequence
  Synthetic
uugucauagccccauguuugg

SEQ ID NO: 21031 - RNA, 21 nt, Artificial Sequence
  Synthetic
ugucauagccccauguuugga

SEQ ID NO: 21032 - RNA, 21 nt, Artificial Sequence
  Synthetic
gucauagccccauguuuggaa

SEQ ID NO: 21033 - RNA, 21 nt, Artificial Sequence
  Synthetic
ucauagccccauguuuggaaa

SEQ ID NO: 21034 - RNA, 21 nt, Artificial Sequence
  Synthetic
cauagccccauguuuggaaau

SEQ ID NO: 21035 - RNA, 21 nt, Artificial Sequence
  Synthetic
auagccccauguuuggaaaug

SEQ ID NO: 21036 - RNA, 21 nt, Artificial Sequence
  Synthetic
uagccccauguuuggaaauga

SEQ ID NO: 21037 - RNA, 21 nt, Artificial Sequence
  Synthetic
agccccauguuuggaaaugac

SEQ ID NO: 21038 - RNA, 21 nt, Artificial Sequence
  Synthetic
gccccauguuuggaaaugaca

SEQ ID NO: 21039 - RNA, 21 nt, Artificial Sequence
  Synthetic
ccccauguuuggaaaugacaa

SEQ ID NO: 21040 - RNA, 21 nt, Artificial Sequence
  Synthetic
cccauguuuggaaaugacaau

SEQ ID NO: 21041 - RNA, 21 nt, Artificial Sequence
  Synthetic
ccauguuuggaaaugacaaua

SEQ ID NO: 21042 - RNA, 21 nt, Artificial Sequence
  Synthetic
cauguuuggaaaugacaauau

SEQ ID NO: 21043 - RNA, 21 nt, Artificial Sequence
  Synthetic
auguuuggaaaugacaauaug

SEQ ID NO: 21044 - RNA, 21 nt, Artificial Sequence
  Synthetic
uguuuggaaaugacaauaugu

SEQ ID NO: 21045 - RNA, 21 nt, Artificial Sequence
  Synthetic
guuuggaaaugacaauaugug

SEQ ID NO: 21046 - RNA, 21 nt, Artificial Sequence
  Synthetic
uuuggaaaugacaauauguga

SEQ ID NO: 21047 - RNA, 21 nt, Artificial Sequence
  Synthetic
uuggaaaugacaauaugugac

SEQ ID NO: 21048 - RNA, 21 nt, Artificial Sequence
  Synthetic
uggaaaugacaauaugugaca

SEQ ID NO: 21049 - RNA, 21 nt, Artificial Sequence
  Synthetic
ggaaaugacaauaugugacac

SEQ ID NO: 21050 - RNA, 21 nt, Artificial Sequence
  Synthetic
gaaaugacaauaugugacaca

SEQ ID NO: 21051 - RNA, 21 nt, Artificial Sequence
  Synthetic
aaaugacaauaugugacacaa

SEQ ID NO: 21052 - RNA, 21 nt, Artificial Sequence
  Synthetic
aaugacaauaugugacacaag

SEQ ID NO: 21053 - RNA, 21 nt, Artificial Sequence
  Synthetic
augacaauaugugacacaaga

SEQ ID NO: 21054 - RNA, 21 nt, Artificial Sequence
  Synthetic
ugacaauaugugacacaagag

SEQ ID NO: 21055 - RNA, 21 nt, Artificial Sequence
  Synthetic
gacaauaugugacacaagagu

SEQ ID NO: 21056 - RNA, 21 nt, Artificial Sequence
  Synthetic
acaauaugugacacaagagug

SEQ ID NO: 21057 - RNA, 21 nt, Artificial Sequence
  Synthetic
caauaugugacacaagagugu

SEQ ID NO: 21058 - RNA, 21 nt, Artificial Sequence
  Synthetic
aauaugugacacaagaguguc

SEQ ID NO: 21059 - RNA, 21 nt, Artificial Sequence
  Synthetic
auaugugacacaagaguguca

SEQ ID NO: 21060 - RNA, 21 nt, Artificial Sequence
  Synthetic
uaugugacacaagagugucaa

SEQ ID NO: 21061 - RNA, 21 nt, Artificial Sequence
  Synthetic
augugacacaagagugucaaa

SEQ ID NO: 21062 - RNA, 21 nt, Artificial Sequence
  Synthetic
ugugacacaagagugucaaaa

SEQ ID NO: 21063 - RNA, 21 nt, Artificial Sequence
  Synthetic
gugacacaagagugucaaaau

SEQ ID NO: 21064 - RNA, 21 nt, Artificial Sequence
  Synthetic
ugacacaagagugucaaaaug

SEQ ID NO: 21065 - RNA, 21 nt, Artificial Sequence
  Synthetic
gacacaagagugucaaaauga

SEQ ID NO: 21066 - RNA, 21 nt, Artificial Sequence
  Synthetic
acacaagagugucaaaaugaa

SEQ ID NO: 21067 - RNA, 21 nt, Artificial Sequence
  Synthetic
cacaagagugucaaaaugaag

SEQ ID NO: 21068 - RNA, 21 nt, Artificial Sequence
  Synthetic
acaagagugucaaaaugaaga

SEQ ID NO: 21069 - RNA, 21 nt, Artificial Sequence
  Synthetic
caagagugucaaaaugaagac

SEQ ID NO: 21070 - RNA, 21 nt, Artificial Sequence
  Synthetic
aagagugucaaaaugaagaca

SEQ ID NO: 21071 - RNA, 21 nt, Artificial Sequence
  Synthetic
agagugucaaaaugaagacac

SEQ ID NO: 21072 - RNA, 21 nt, Artificial Sequence
  Synthetic
gagugucaaaaugaagacacc

SEQ ID NO: 21073 - RNA, 21 nt, Artificial Sequence
  Synthetic
agugucaaaaugaagacacca

SEQ ID NO: 21074 - RNA, 21 nt, Artificial Sequence
  Synthetic
gugucaaaaugaagacaccag

SEQ ID NO: 21075 - RNA, 21 nt, Artificial Sequence
  Synthetic
ugucaaaaugaagacaccaga

SEQ ID NO: 21076 - RNA, 21 nt, Artificial Sequence
  Synthetic
gucaaaaugaagacaccagag

SEQ ID NO: 21077 - RNA, 21 nt, Artificial Sequence
  Synthetic
ucaaaaugaagacaccagagg

SEQ ID NO: 21078 - RNA, 21 nt, Artificial Sequence
  Synthetic
caaaaugaagacaccagagga

SEQ ID NO: 21079 - RNA, 21 nt, Artificial Sequence
  Synthetic
aaaaugaagacaccagaggau

SEQ ID NO: 21080 - RNA, 21 nt, Artificial Sequence
  Synthetic
aaaugaagacaccagaggaug

SEQ ID NO: 21081 - RNA, 21 nt, Artificial Sequence
  Synthetic
aaugaagacaccagaggauga

SEQ ID NO: 21082 - RNA, 21 nt, Artificial Sequence
  Synthetic
augaagacaccagaggaugac

SEQ ID NO: 21083 - RNA, 21 nt, Artificial Sequence
  Synthetic
ugaagacaccagaggaugaca

SEQ ID NO: 21084 - RNA, 21 nt, Artificial Sequence
  Synthetic
gaagacaccagaggaugacaa

SEQ ID NO: 21085 - RNA, 21 nt, Artificial Sequence
  Synthetic
aagacaccagaggaugacaac

SEQ ID NO: 21086 - RNA, 21 nt, Artificial Sequence
  Synthetic
agacaccagaggaugacaaca

SEQ ID NO: 21087 - RNA, 21 nt, Artificial Sequence
  Synthetic
gacaccagaggaugacaacag

SEQ ID NO: 21088 - RNA, 21 nt, Artificial Sequence
  Synthetic
acaccagaggaugacaacagu

SEQ ID NO: 21089 - RNA, 21 nt, Artificial Sequence
  Synthetic
caccagaggaugacaacaguc

SEQ ID NO: 21090 - RNA, 21 nt, Artificial Sequence
  Synthetic
accagaggaugacaacaguca

SEQ ID NO: 21091 - RNA, 21 nt, Artificial Sequence
  Synthetic
ccagaggaugacaacagucaa

SEQ ID NO: 21092 - RNA, 21 nt, Artificial Sequence
  Synthetic
cagaggaugacaacagucaau

SEQ ID NO: 21093 - RNA, 21 nt, Artificial Sequence
  Synthetic
agaggaugacaacagucaauc

SEQ ID NO: 21094 - RNA, 21 nt, Artificial Sequence
  Synthetic
gaggaugacaacagucaauca

SEQ ID NO: 21095 - RNA, 21 nt, Artificial Sequence
  Synthetic
aggaugacaacagucaaucaa

SEQ ID NO: 21096 - RNA, 21 nt, Artificial Sequence
  Synthetic
ggaugacaacagucaaucaaa

SEQ ID NO: 21097 - RNA, 21 nt, Artificial Sequence
  Synthetic
gaugacaacagucaaucaaag

SEQ ID NO: 21098 - RNA, 21 nt, Artificial Sequence
  Synthetic
augacaacagucaaucaaagc

SEQ ID NO: 21099 - RNA, 21 nt, Artificial Sequence
  Synthetic
ugacaacagucaaucaaagcc

SEQ ID NO: 21100 - RNA, 21 nt, Artificial Sequence
  Synthetic
gacaacagucaaucaaagccc

SEQ ID NO: 21101 - RNA, 21 nt, Artificial Sequence
  Synthetic
acaacagucaaucaaagccca

SEQ ID NO: 21102 - RNA, 21 nt, Artificial Sequence
  Synthetic
caacagucaaucaaagcccag

SEQ ID NO: 21103 - RNA, 21 nt, Artificial Sequence
  Synthetic
aacagucaaucaaagcccagu

SEQ ID NO: 21104 - RNA, 21 nt, Artificial Sequence
  Synthetic
acagucaaucaaagcccagua

SEQ ID NO: 21105 - RNA, 21 nt, Artificial Sequence
  Synthetic
cagucaaucaaagcccaguag

SEQ ID NO: 21106 - RNA, 21 nt, Artificial Sequence
  Synthetic
agucaaucaaagcccaguaga

SEQ ID NO: 21107 - RNA, 21 nt, Artificial Sequence
  Synthetic
gucaaucaaagcccaguagaa

SEQ ID NO: 21108 - RNA, 21 nt, Artificial Sequence
  Synthetic
ucaaucaaagcccaguagaau

SEQ ID NO: 21109 - RNA, 21 nt, Artificial Sequence
  Synthetic
caaucaaagcccaguagaauc

SEQ ID NO: 21110 - RNA, 21 nt, Artificial Sequence
  Synthetic
aaucaaagcccaguagaaucu

SEQ ID NO: 21111 - RNA, 21 nt, Artificial Sequence
  Synthetic
aucaaagcccaguagaaucua

SEQ ID NO: 21112 - RNA, 21 nt, Artificial Sequence
  Synthetic
ucaaagcccaguagaaucuag

SEQ ID NO: 21113 - RNA, 21 nt, Artificial Sequence
  Synthetic
caaagcccaguagaaucuagg

SEQ ID NO: 21114 - RNA, 21 nt, Artificial Sequence
  Synthetic
aaagcccaguagaaucuagga

SEQ ID NO: 21115 - RNA, 21 nt, Artificial Sequence
  Synthetic
aagcccaguagaaucuaggaa

SEQ ID NO: 21116 - RNA, 21 nt, Artificial Sequence
  Synthetic
agcccaguagaaucuaggaac

SEQ ID NO: 21117 - RNA, 21 nt, Artificial Sequence
  Synthetic
gcccaguagaaucuaggaacu

SEQ ID NO: 21118 - RNA, 21 nt, Artificial Sequence
  Synthetic
cccaguagaaucuaggaacug

SEQ ID NO: 21119 - RNA, 21 nt, Artificial Sequence
  Synthetic
ccaguagaaucuaggaacugg

SEQ ID NO: 21120 - RNA, 21 nt, Artificial Sequence
  Synthetic
caguagaaucuaggaacugga

SEQ ID NO: 21121 - RNA, 21 nt, Artificial Sequence
  Synthetic
aguagaaucuaggaacuggaa

SEQ ID NO: 21122 - RNA, 21 nt, Artificial Sequence
  Synthetic
guagaaucuaggaacuggaag

SEQ ID NO: 21123 - RNA, 21 nt, Artificial Sequence
  Synthetic
uagaaucuaggaacuggaagc

SEQ ID NO: 21124 - RNA, 21 nt, Artificial Sequence
  Synthetic
agaaucuaggaacuggaagca

SEQ ID NO: 21125 - RNA, 21 nt, Artificial Sequence
  Synthetic
gaaucuaggaacuggaagcaa

SEQ ID NO: 21126 - RNA, 21 nt, Artificial Sequence
  Synthetic
aaucuaggaacuggaagcaag

SEQ ID NO: 21127 - RNA, 21 nt, Artificial Sequence
  Synthetic
aucuaggaacuggaagcaagg

SEQ ID NO: 21128 - RNA, 21 nt, Artificial Sequence
  Synthetic
ucuaggaacuggaagcaagga

SEQ ID NO: 21129 - RNA, 21 nt, Artificial Sequence
  Synthetic
cuaggaacuggaagcaaggaa

SEQ ID NO: 21130 - RNA, 21 nt, Artificial Sequence
  Synthetic
uaggaacuggaagcaaggaag

SEQ ID NO: 21131 - RNA, 21 nt, Artificial Sequence
  Synthetic
aggaacuggaagcaaggaagg

SEQ ID NO: 21132 - RNA, 21 nt, Artificial Sequence
  Synthetic
ggaacuggaagcaaggaaggu

SEQ ID NO: 21133 - RNA, 21 nt, Artificial Sequence
  Synthetic
gaacuggaagcaaggaaggug

SEQ ID NO: 21134 - RNA, 21 nt, Artificial Sequence
  Synthetic
aacuggaagcaaggaagguga

SEQ ID NO: 21135 - RNA, 21 nt, Artificial Sequence
  Synthetic
acuggaagcaaggaaggugag

SEQ ID NO: 21136 - RNA, 21 nt, Artificial Sequence
  Synthetic
cuggaagcaaggaaggugaga

SEQ ID NO: 21137 - RNA, 21 nt, Artificial Sequence
  Synthetic
uggaagcaaggaaggugagaa

SEQ ID NO: 21138 - RNA, 21 nt, Artificial Sequence
  Synthetic
ggaagcaaggaaggugagaau

SEQ ID NO: 21139 - RNA, 21 nt, Artificial Sequence
  Synthetic
gaagcaaggaaggugagaauu

SEQ ID NO: 21140 - RNA, 21 nt, Artificial Sequence
  Synthetic
aagcaaggaaggugagaauuu

SEQ ID NO: 21141 - RNA, 21 nt, Artificial Sequence
  Synthetic
agcaaggaaggugagaauuug

SEQ ID NO: 21142 - RNA, 21 nt, Artificial Sequence
  Synthetic
gcaaggaaggugagaauuugu

SEQ ID NO: 21143 - RNA, 21 nt, Artificial Sequence
  Synthetic
caaggaaggugagaauuuguc

SEQ ID NO: 21144 - RNA, 21 nt, Artificial Sequence
  Synthetic
aaggaaggugagaauuuguca

SEQ ID NO: 21145 - RNA, 21 nt, Artificial Sequence
  Synthetic
aggaaggugagaauuugucag

SEQ ID NO: 21146 - RNA, 21 nt, Artificial Sequence
  Synthetic
ggaaggugagaauuugucagu

SEQ ID NO: 21147 - RNA, 21 nt, Artificial Sequence
  Synthetic
gaaggugagaauuugucagug

SEQ ID NO: 21148 - RNA, 21 nt, Artificial Sequence
  Synthetic
aaggugagaauuugucagugu

SEQ ID NO: 21149 - RNA, 21 nt, Artificial Sequence
  Synthetic
aggugagaauuugucagugug

SEQ ID NO: 21150 - RNA, 21 nt, Artificial Sequence
  Synthetic
ggugagaauuugucagugugg

SEQ ID NO: 21151 - RNA, 21 nt, Artificial Sequence
  Synthetic
gugagaauuugucaguguggc

SEQ ID NO: 21152 - RNA, 21 nt, Artificial Sequence
  Synthetic
ugagaauuugucaguguggcu

SEQ ID NO: 21153 - RNA, 21 nt, Artificial Sequence
  Synthetic
gagaauuugucaguguggcuu

SEQ ID NO: 21154 - RNA, 21 nt, Artificial Sequence
  Synthetic
agaauuugucaguguggcuuc

SEQ ID NO: 21155 - RNA, 21 nt, Artificial Sequence
  Synthetic
gaauuugucaguguggcuuca

SEQ ID NO: 21156 - RNA, 21 nt, Artificial Sequence
  Synthetic
aauuugucaguguggcuucau

SEQ ID NO: 21157 - RNA, 21 nt, Artificial Sequence
  Synthetic
auuugucaguguggcuucauc

SEQ ID NO: 21158 - RNA, 21 nt, Artificial Sequence
  Synthetic
uuugucaguguggcuucauca

SEQ ID NO: 21159 - RNA, 21 nt, Artificial Sequence
  Synthetic
uugucaguguggcuucaucac

SEQ ID NO: 21160 - RNA, 21 nt, Artificial Sequence
  Synthetic
ugucaguguggcuucaucacu

SEQ ID NO: 21161 - RNA, 21 nt, Artificial Sequence
  Synthetic
gucaguguggcuucaucacua

SEQ ID NO: 21162 - RNA, 21 nt, Artificial Sequence
  Synthetic
ucaguguggcuucaucacuac

SEQ ID NO: 21163 - RNA, 21 nt, Artificial Sequence
  Synthetic
caguguggcuucaucacuacc

SEQ ID NO: 21164 - RNA, 21 nt, Artificial Sequence
  Synthetic
aguguggcuucaucacuaccu

SEQ ID NO: 21165 - RNA, 21 nt, Artificial Sequence
  Synthetic
guguggcuucaucacuaccua

SEQ ID NO: 21166 - RNA, 21 nt, Artificial Sequence
  Synthetic
uguggcuucaucacuaccuau

SEQ ID NO: 21167 - RNA, 21 nt, Artificial Sequence
  Synthetic
guggcuucaucacuaccuauu

SEQ ID NO: 21168 - RNA, 21 nt, Artificial Sequence
  Synthetic
uggcuucaucacuaccuauug

SEQ ID NO: 21169 - RNA, 21 nt, Artificial Sequence
  Synthetic
ggcuucaucacuaccuauugg

SEQ ID NO: 21170 - RNA, 21 nt, Artificial Sequence
  Synthetic
gcuucaucacuaccuauuggu

SEQ ID NO: 21171 - RNA, 21 nt, Artificial Sequence
  Synthetic
cuucaucacuaccuauuggug

SEQ ID NO: 21172 - RNA, 21 nt, Artificial Sequence
  Synthetic
uucaucacuaccuauuggugg

SEQ ID NO: 21173 - RNA, 21 nt, Artificial Sequence
  Synthetic
ucaucacuaccuauuggugga

SEQ ID NO: 21174 - RNA, 21 nt, Artificial Sequence
  Synthetic
caucacuaccuauugguggaa

SEQ ID NO: 21175 - RNA, 21 nt, Artificial Sequence
  Synthetic
aucacuaccuauugguggaag

SEQ ID NO: 21176 - RNA, 21 nt, Artificial Sequence
  Synthetic
ucacuaccuauugguggaaga

SEQ ID NO: 21177 - RNA, 21 nt, Artificial Sequence
  Synthetic
cacuaccuauugguggaagac

SEQ ID NO: 21178 - RNA, 21 nt, Artificial Sequence
  Synthetic
acuaccuauugguggaagaca

SEQ ID NO: 21179 - RNA, 21 nt, Artificial Sequence
  Synthetic
cuaccuauugguggaagacac

SEQ ID NO: 21180 - RNA, 21 nt, Artificial Sequence
  Synthetic
uaccuauugguggaagacaca

SEQ ID NO: 21181 - RNA, 21 nt, Artificial Sequence
  Synthetic
accuauugguggaagacacau

SEQ ID NO: 21182 - RNA, 21 nt, Artificial Sequence
  Synthetic
ccuauugguggaagacacaua

SEQ ID NO: 21183 - RNA, 21 nt, Artificial Sequence
  Synthetic
cuauugguggaagacacauac

SEQ ID NO: 21184 - RNA, 21 nt, Artificial Sequence
  Synthetic
uauugguggaagacacauacc

SEQ ID NO: 21185 - RNA, 21 nt, Artificial Sequence
  Synthetic
auugguggaagacacauaccu

SEQ ID NO: 21186 - RNA, 21 nt, Artificial Sequence
  Synthetic
uugguggaagacacauaccug

SEQ ID NO: 21187 - RNA, 21 nt, Artificial Sequence
  Synthetic
ugguggaagacacauaccuga

SEQ ID NO: 21188 - RNA, 21 nt, Artificial Sequence
  Synthetic
gguggaagacacauaccugau

SEQ ID NO: 21189 - RNA, 21 nt, Artificial Sequence
  Synthetic
guggaagacacauaccugaua

SEQ ID NO: 21190 - RNA, 21 nt, Artificial Sequence
  Synthetic
uggaagacacauaccugauaa

SEQ ID NO: 21191 - RNA, 21 nt, Artificial Sequence
  Synthetic
ggaagacacauaccugauaac

SEQ ID NO: 21192 - RNA, 21 nt, Artificial Sequence
  Synthetic
gaagacacauaccugauaacu

SEQ ID NO: 21193 - RNA, 21 nt, Artificial Sequence
  Synthetic
aagacacauaccugauaacua

SEQ ID NO: 21194 - RNA, 21 nt, Artificial Sequence
  Synthetic
agacacauaccugauaacuac

SEQ ID NO: 21195 - RNA, 21 nt, Artificial Sequence
  Synthetic
gacacauaccugauaacuacu

SEQ ID NO: 21196 - RNA, 21 nt, Artificial Sequence
  Synthetic
acacauaccugauaacuacuu

SEQ ID NO: 21197 - RNA, 21 nt, Artificial Sequence
  Synthetic
cacauaccugauaacuacuuu

SEQ ID NO: 21198 - RNA, 21 nt, Artificial Sequence
  Synthetic
acauaccugauaacuacuuug

SEQ ID NO: 21199 - RNA, 21 nt, Artificial Sequence
  Synthetic
cauaccugauaacuacuuugc

SEQ ID NO: 21200 - RNA, 21 nt, Artificial Sequence
  Synthetic
auaccugauaacuacuuugcu

SEQ ID NO: 21201 - RNA, 21 nt, Artificial Sequence
  Synthetic
uaccugauaacuacuuugcua

SEQ ID NO: 21202 - RNA, 21 nt, Artificial Sequence
  Synthetic
accugauaacuacuuugcuag

SEQ ID NO: 21203 - RNA, 21 nt, Artificial Sequence
  Synthetic
ccugauaacuacuuugcuagu

SEQ ID NO: 21204 - RNA, 21 nt, Artificial Sequence
  Synthetic
cugauaacuacuuugcuaguu

SEQ ID NO: 21205 - RNA, 21 nt, Artificial Sequence
  Synthetic
ugauaacuacuuugcuaguuc

SEQ ID NO: 21206 - RNA, 21 nt, Artificial Sequence
  Synthetic
gauaacuacuuugcuaguucu

SEQ ID NO: 21207 - RNA, 21 nt, Artificial Sequence
  Synthetic
auaacuacuuugcuaguucuu

SEQ ID NO: 21208 - RNA, 21 nt, Artificial Sequence
  Synthetic
uaacuacuuugcuaguucuua

SEQ ID NO: 21209 - RNA, 21 nt, Artificial Sequence
  Synthetic
aacuacuuugcuaguucuuag

SEQ ID NO: 21210 - RNA, 21 nt, Artificial Sequence
  Synthetic
acuacuuugcuaguucuuagc

SEQ ID NO: 21211 - RNA, 21 nt, Artificial Sequence
  Synthetic
cuacuuugcuaguucuuagca

SEQ ID NO: 21212 - RNA, 21 nt, Artificial Sequence
  Synthetic
uacuuugcuaguucuuagcac

SEQ ID NO: 21213 - RNA, 21 nt, Artificial Sequence
  Synthetic
acuuugcuaguucuuagcaca

SEQ ID NO: 21214 - RNA, 21 nt, Artificial Sequence
  Synthetic
cuuugcuaguucuuagcacau

SEQ ID NO: 21215 - RNA, 21 nt, Artificial Sequence
  Synthetic
uuugcuaguucuuagcacauc

SEQ ID NO: 21216 - RNA, 21 nt, Artificial Sequence
  Synthetic
uugcuaguucuuagcacauca

SEQ ID NO: 21217 - RNA, 21 nt, Artificial Sequence
  Synthetic
ugcuaguucuuagcacaucag

SEQ ID NO: 21218 - RNA, 21 nt, Artificial Sequence
  Synthetic
gcuaguucuuagcacaucagg

SEQ ID NO: 21219 - RNA, 21 nt, Artificial Sequence
  Synthetic
cuaguucuuagcacaucaggg

SEQ ID NO: 21220 - RNA, 21 nt, Artificial Sequence
  Synthetic
uaguucuuagcacaucagggc

SEQ ID NO: 21221 - RNA, 21 nt, Artificial Sequence
  Synthetic
aguucuuagcacaucagggcc

SEQ ID NO: 21222 - RNA, 21 nt, Artificial Sequence
  Synthetic
guucuuagcacaucagggcca

SEQ ID NO: 21223 - RNA, 21 nt, Artificial Sequence
  Synthetic
uucuuagcacaucagggccau

SEQ ID NO: 21224 - RNA, 21 nt, Artificial Sequence
  Synthetic
ucuuagcacaucagggccauu

SEQ ID NO: 21225 - RNA, 21 nt, Artificial Sequence
  Synthetic
cuuagcacaucagggccauuu

SEQ ID NO: 21226 - RNA, 21 nt, Artificial Sequence
  Synthetic
uuagcacaucagggccauuuu

SEQ ID NO: 21227 - RNA, 21 nt, Artificial Sequence
  Synthetic
uagcacaucagggccauuuuc

SEQ ID NO: 21228 - RNA, 21 nt, Artificial Sequence
  Synthetic
agcacaucagggccauuuucu

SEQ ID NO: 21229 - RNA, 21 nt, Artificial Sequence
  Synthetic
gcacaucagggccauuuucug

SEQ ID NO: 21230 - RNA, 21 nt, Artificial Sequence
  Synthetic
cacaucagggccauuuucugg

SEQ ID NO: 21231 - RNA, 21 nt, Artificial Sequence
  Synthetic
acaucagggccauuuucugga

SEQ ID NO: 21232 - RNA, 21 nt, Artificial Sequence
  Synthetic
caucagggccauuuucuggag

SEQ ID NO: 21233 - RNA, 21 nt, Artificial Sequence
  Synthetic
aucagggccauuuucuggagg

SEQ ID NO: 21234 - RNA, 21 nt, Artificial Sequence
  Synthetic
ucagggccauuuucuggaggc

SEQ ID NO: 21235 - RNA, 21 nt, Artificial Sequence
  Synthetic
cagggccauuuucuggaggca

SEQ ID NO: 21236 - RNA, 21 nt, Artificial Sequence
  Synthetic
agggccauuuucuggaggcau

SEQ ID NO: 21237 - RNA, 21 nt, Artificial Sequence
  Synthetic
gggccauuuucuggaggcaua

SEQ ID NO: 21238 - RNA, 21 nt, Artificial Sequence
  Synthetic
ggccauuuucuggaggcauaa

SEQ ID NO: 21239 - RNA, 21 nt, Artificial Sequence
  Synthetic
gccauuuucuggaggcauaau

SEQ ID NO: 21240 - RNA, 21 nt, Artificial Sequence
  Synthetic
ccauuuucuggaggcauaaug

SEQ ID NO: 21241 - RNA, 21 nt, Artificial Sequence
  Synthetic
cauuuucuggaggcauaaugu

SEQ ID NO: 21242 - RNA, 21 nt, Artificial Sequence
  Synthetic
auuuucuggaggcauaaugua

SEQ ID NO: 21243 - RNA, 21 nt, Artificial Sequence
  Synthetic
uuuucuggaggcauaauguaa

SEQ ID NO: 21244 - RNA, 21 nt, Artificial Sequence
  Synthetic
uuucuggaggcauaauguaau

SEQ ID NO: 21245 - RNA, 21 nt, Artificial Sequence
  Synthetic
uucuggaggcauaauguaauc

SEQ ID NO: 21246 - RNA, 21 nt, Artificial Sequence
  Synthetic
ucuggaggcauaauguaaucu

SEQ ID NO: 21247 - RNA, 21 nt, Artificial Sequence
  Synthetic
cuggaggcauaauguaaucua

SEQ ID NO: 21248 - RNA, 21 nt, Artificial Sequence
  Synthetic
uggaggcauaauguaaucuac

SEQ ID NO: 21249 - RNA, 21 nt, Artificial Sequence
  Synthetic
ggaggcauaauguaaucuaca

SEQ ID NO: 21250 - RNA, 21 nt, Artificial Sequence
  Synthetic
gaggcauaauguaaucuacag

SEQ ID NO: 21251 - RNA, 21 nt, Artificial Sequence
  Synthetic
aggcauaauguaaucuacaga

SEQ ID NO: 21252 - RNA, 21 nt, Artificial Sequence
  Synthetic
ggcauaauguaaucuacagaa

SEQ ID NO: 21253 - RNA, 21 nt, Artificial Sequence
  Synthetic
gcauaauguaaucuacagaaa

SEQ ID NO: 21254 - RNA, 21 nt, Artificial Sequence
  Synthetic
cauaauguaaucuacagaaac

SEQ ID NO: 21255 - RNA, 21 nt, Artificial Sequence
  Synthetic
auaauguaaucuacagaaaca

SEQ ID NO: 21256 - RNA, 21 nt, Artificial Sequence
  Synthetic
uaauguaaucuacagaaacag

SEQ ID NO: 21257 - RNA, 21 nt, Artificial Sequence
  Synthetic
aauguaaucuacagaaacagc

SEQ ID NO: 21258 - RNA, 21 nt, Artificial Sequence
  Synthetic
auguaaucuacagaaacagcu

SEQ ID NO: 21259 - RNA, 21 nt, Artificial Sequence
  Synthetic
uguaaucuacagaaacagcuc

SEQ ID NO: 21260 - RNA, 21 nt, Artificial Sequence
  Synthetic
guaaucuacagaaacagcucu

SEQ ID NO: 21261 - RNA, 21 nt, Artificial Sequence
  Synthetic
uaaucuacagaaacagcucuc

SEQ ID NO: 21262 - RNA, 21 nt, Artificial Sequence
  Synthetic
aaucuacagaaacagcucuca

SEQ ID NO: 21263 - RNA, 21 nt, Artificial Sequence
  Synthetic
aucuacagaaacagcucucaa

SEQ ID NO: 21264 - RNA, 21 nt, Artificial Sequence
  Synthetic
ucuacagaaacagcucucaag

SEQ ID NO: 21265 - RNA, 21 nt, Artificial Sequence
  Synthetic
cuacagaaacagcucucaagc

SEQ ID NO: 21266 - RNA, 21 nt, Artificial Sequence
  Synthetic
uacagaaacagcucucaagcc

SEQ ID NO: 21267 - RNA, 21 nt, Artificial Sequence
  Synthetic
acagaaacagcucucaagccu

SEQ ID NO: 21268 - RNA, 21 nt, Artificial Sequence
  Synthetic
cagaaacagcucucaagccug

SEQ ID NO: 21269 - RNA, 21 nt, Artificial Sequence
  Synthetic
agaaacagcucucaagccuga

SEQ ID NO: 21270 - RNA, 21 nt, Artificial Sequence
  Synthetic
gaaacagcucucaagccugac

SEQ ID NO: 21271 - RNA, 21 nt, Artificial Sequence
  Synthetic
aaacagcucucaagccugacc

SEQ ID NO: 21272 - RNA, 21 nt, Artificial Sequence
  Synthetic
aacagcucucaagccugaccu

SEQ ID NO: 21273 - RNA, 21 nt, Artificial Sequence
  Synthetic
acagcucucaagccugaccuu

SEQ ID NO: 21274 - RNA, 21 nt, Artificial Sequence
  Synthetic
cagcucucaagccugaccuuu

SEQ ID NO: 21275 - RNA, 21 nt, Artificial Sequence
  Synthetic
agcucucaagccugaccuuug

SEQ ID NO: 21276 - RNA, 21 nt, Artificial Sequence
  Synthetic
gcucucaagccugaccuuugc

SEQ ID NO: 21277 - RNA, 21 nt, Artificial Sequence
  Synthetic
cucucaagccugaccuuugcu

SEQ ID NO: 21278 - RNA, 21 nt, Artificial Sequence
  Synthetic
ucucaagccugaccuuugcuc

SEQ ID NO: 21279 - RNA, 21 nt, Artificial Sequence
  Synthetic
cucaagccugaccuuugcucu

SEQ ID NO: 21280 - RNA, 21 nt, Artificial Sequence
  Synthetic
ucaagccugaccuuugcucua

SEQ ID NO: 21281 - RNA, 21 nt, Artificial Sequence
  Synthetic
caagccugaccuuugcucuac

SEQ ID NO: 21282 - RNA, 21 nt, Artificial Sequence
  Synthetic
aagccugaccuuugcucuaca

SEQ ID NO: 21283 - RNA, 21 nt, Artificial Sequence
  Synthetic
agccugaccuuugcucuacag

SEQ ID NO: 21284 - RNA, 21 nt, Artificial Sequence
  Synthetic
gccugaccuuugcucuacaga

SEQ ID NO: 21285 - RNA, 21 nt, Artificial Sequence
  Synthetic
ccugaccuuugcucuacagau

SEQ ID NO: 21286 - RNA, 21 nt, Artificial Sequence
  Synthetic
cugaccuuugcucuacagaua

SEQ ID NO: 21287 - RNA, 21 nt, Artificial Sequence
  Synthetic
ugaccuuugcucuacagauag

SEQ ID NO: 21288 - RNA, 21 nt, Artificial Sequence
  Synthetic
gaccuuugcucuacagauagc

SEQ ID NO: 21289 - RNA, 21 nt, Artificial Sequence
  Synthetic
accuuugcucuacagauagcc

SEQ ID NO: 21290 - RNA, 21 nt, Artificial Sequence
  Synthetic
ccuuugcucuacagauagccu

SEQ ID NO: 21291 - RNA, 21 nt, Artificial Sequence
  Synthetic
cuuugcucuacagauagccuc

SEQ ID NO: 21292 - RNA, 21 nt, Artificial Sequence
  Synthetic
uuugcucuacagauagccuca

SEQ ID NO: 21293 - RNA, 21 nt, Artificial Sequence
  Synthetic
uugcucuacagauagccucag

SEQ ID NO: 21294 - RNA, 21 nt, Artificial Sequence
  Synthetic
ugcucuacagauagccucagu

SEQ ID NO: 21295 - RNA, 21 nt, Artificial Sequence
  Synthetic
gcucuacagauagccucagua

SEQ ID NO: 21296 - RNA, 21 nt, Artificial Sequence
  Synthetic
cucuacagauagccucaguau

SEQ ID NO: 21297 - RNA, 21 nt, Artificial Sequence
  Synthetic
ucuacagauagccucaguauu

SEQ ID NO: 21298 - RNA, 21 nt, Artificial Sequence
  Synthetic
cuacagauagccucaguauuc

SEQ ID NO: 21299 - RNA, 21 nt, Artificial Sequence
  Synthetic
uacagauagccucaguauuca

SEQ ID NO: 21300 - RNA, 21 nt, Artificial Sequence
  Synthetic
acagauagccucaguauucac

SEQ ID NO: 21301 - RNA, 21 nt, Artificial Sequence
  Synthetic
cagauagccucaguauucacc

SEQ ID NO: 21302 - RNA, 21 nt, Artificial Sequence
  Synthetic
agauagccucaguauucaccu

SEQ ID NO: 21303 - RNA, 21 nt, Artificial Sequence
  Synthetic
gauagccucaguauucaccuc

SEQ ID NO: 21304 - RNA, 21 nt, Artificial Sequence
  Synthetic
auagccucaguauucaccucu

SEQ ID NO: 21305 - RNA, 21 nt, Artificial Sequence
  Synthetic
uagccucaguauucaccucug

SEQ ID NO: 21306 - RNA, 21 nt, Artificial Sequence
  Synthetic
agccucaguauucaccucuga

SEQ ID NO: 21307 - RNA, 21 nt, Artificial Sequence
  Synthetic
gccucaguauucaccucugau

SEQ ID NO: 21308 - RNA, 21 nt, Artificial Sequence
  Synthetic
ccucaguauucaccucugauu

SEQ ID NO: 21309 - RNA, 21 nt, Artificial Sequence
  Synthetic
cucaguauucaccucugauua

SEQ ID NO: 21310 - RNA, 21 nt, Artificial Sequence
  Synthetic
ucaguauucaccucugauuau

SEQ ID NO: 21311 - RNA, 21 nt, Artificial Sequence
  Synthetic
caguauucaccucugauuaug

SEQ ID NO: 21312 - RNA, 21 nt, Artificial Sequence
  Synthetic
aguauucaccucugauuaugu

SEQ ID NO: 21313 - RNA, 21 nt, Artificial Sequence
  Synthetic
guauucaccucugauuaugug

SEQ ID NO: 21314 - RNA, 21 nt, Artificial Sequence
  Synthetic
uauucaccucugauuaugugu

SEQ ID NO: 21315 - RNA, 21 nt, Artificial Sequence
  Synthetic
auucaccucugauuauguguc

SEQ ID NO: 21316 - RNA, 21 nt, Artificial Sequence
  Synthetic
uucaccucugauuaugugucc

SEQ ID NO: 21317 - RNA, 21 nt, Artificial Sequence
  Synthetic
ucaccucugauuaugugucca

SEQ ID NO: 21318 - RNA, 21 nt, Artificial Sequence
  Synthetic
caccucugauuauguguccag

SEQ ID NO: 21319 - RNA, 21 nt, Artificial Sequence
  Synthetic
accucugauuauguguccaga

SEQ ID NO: 21320 - RNA, 21 nt, Artificial Sequence
  Synthetic
ccucugauuauguguccagau

SEQ ID NO: 21321 - RNA, 21 nt, Artificial Sequence
  Synthetic
cucugauuauguguccagauu

SEQ ID NO: 21322 - RNA, 21 nt, Artificial Sequence
  Synthetic
ucugauuauguguccagauug

SEQ ID NO: 21323 - RNA, 21 nt, Artificial Sequence
  Synthetic
cugauuauguguccagauugc

SEQ ID NO: 21324 - RNA, 21 nt, Artificial Sequence
  Synthetic
ugauuauguguccagauugca

SEQ ID NO: 21325 - RNA, 21 nt, Artificial Sequence
  Synthetic
gauuauguguccagauugcag

SEQ ID NO: 21326 - RNA, 21 nt, Artificial Sequence
  Synthetic
auuauguguccagauugcagu

SEQ ID NO: 21327 - RNA, 21 nt, Artificial Sequence
  Synthetic
uuauguguccagauugcaguu

SEQ ID NO: 21328 - RNA, 21 nt, Artificial Sequence
  Synthetic
uauguguccagauugcaguuu

SEQ ID NO: 21329 - RNA, 21 nt, Artificial Sequence
  Synthetic
auguguccagauugcaguuuc

SEQ ID NO: 21330 - RNA, 21 nt, Artificial Sequence
  Synthetic
uguguccagauugcaguuuca

SEQ ID NO: 21331 - RNA, 21 nt, Artificial Sequence
  Synthetic
guguccagauugcaguuucau

SEQ ID NO: 21332 - RNA, 21 nt, Artificial Sequence
  Synthetic
uguccagauugcaguuucauu

SEQ ID NO: 21333 - RNA, 21 nt, Artificial Sequence
  Synthetic
guccagauugcaguuucauuc

SEQ ID NO: 21334 - RNA, 21 nt, Artificial Sequence
  Synthetic
uccagauugcaguuucauucc

SEQ ID NO: 21335 - RNA, 21 nt, Artificial Sequence
  Synthetic
ccagauugcaguuucauuccu

SEQ ID NO: 21336 - RNA, 21 nt, Artificial Sequence
  Synthetic
cagauugcaguuucauuccug

SEQ ID NO: 21337 - RNA, 21 nt, Artificial Sequence
  Synthetic
agauugcaguuucauuccugu

SEQ ID NO: 21338 - RNA, 21 nt, Artificial Sequence
  Synthetic
gauugcaguuucauuccuguu

SEQ ID NO: 21339 - RNA, 21 nt, Artificial Sequence
  Synthetic
auugcaguuucauuccuguug

SEQ ID NO: 21340 - RNA, 21 nt, Artificial Sequence
  Synthetic
uugcaguuucauuccuguuga

SEQ ID NO: 21341 - RNA, 21 nt, Artificial Sequence
  Synthetic
ugcaguuucauuccuguugau

SEQ ID NO: 21342 - RNA, 21 nt, Artificial Sequence
  Synthetic
gcaguuucauuccuguugaua

SEQ ID NO: 21343 - RNA, 21 nt, Artificial Sequence
  Synthetic
caguuucauuccuguugauac

SEQ ID NO: 21344 - RNA, 21 nt, Artificial Sequence
  Synthetic
aguuucauuccuguugauacg

SEQ ID NO: 21345 - RNA, 21 nt, Artificial Sequence
  Synthetic
guuucauuccuguugauacgc

SEQ ID NO: 21346 - RNA, 21 nt, Artificial Sequence
  Synthetic
uuucauuccuguugauacgcc

SEQ ID NO: 21347 - RNA, 21 nt, Artificial Sequence
  Synthetic
uucauuccuguugauacgccu

SEQ ID NO: 21348 - RNA, 21 nt, Artificial Sequence
  Synthetic
ucauuccuguugauacgccug

SEQ ID NO: 21349 - RNA, 21 nt, Artificial Sequence
  Synthetic
cauuccuguugauacgccugg

SEQ ID NO: 21350 - RNA, 21 nt, Artificial Sequence
  Synthetic
auuccuguugauacgccuggc

SEQ ID NO: 21351 - RNA, 21 nt, Artificial Sequence
  Synthetic
uuccuguugauacgccuggcu

SEQ ID NO: 21352 - RNA, 21 nt, Artificial Sequence
  Synthetic
uccuguugauacgccuggcuu

SEQ ID NO: 21353 - RNA, 21 nt, Artificial Sequence
  Synthetic
ccuguugauacgccuggcuug

SEQ ID NO: 21354 - RNA, 21 nt, Artificial Sequence
  Synthetic
cuguugauacgccuggcuugg

SEQ ID NO: 21355 - RNA, 21 nt, Artificial Sequence
  Synthetic
uguugauacgccuggcuuggg

SEQ ID NO: 21356 - RNA, 21 nt, Artificial Sequence
  Synthetic
guugauacgccuggcuugggu

SEQ ID NO: 21357 - RNA, 21 nt, Artificial Sequence
  Synthetic
uugauacgccuggcuugggug

SEQ ID NO: 21358 - RNA, 21 nt, Artificial Sequence
  Synthetic
ugauacgccuggcuugggugg

SEQ ID NO: 21359 - RNA, 21 nt, Artificial Sequence
  Synthetic
gauacgccuggcuuggguggg

SEQ ID NO: 21360 - RNA, 21 nt, Artificial Sequence
  Synthetic
auacgccuggcuugggugggg

SEQ ID NO: 21361 - RNA, 21 nt, Artificial Sequence
  Synthetic
uacgccuggcuugggugggga

SEQ ID NO: 21362 - RNA, 21 nt, Artificial Sequence
  Synthetic
acgccuggcuuggguggggac

SEQ ID NO: 21363 - RNA, 21 nt, Artificial Sequence
  Synthetic
cgccuggcuuggguggggacc

SEQ ID NO: 21364 - RNA, 21 nt, Artificial Sequence
  Synthetic
gccuggcuuggguggggaccu

SEQ ID NO: 21365 - RNA, 21 nt, Artificial Sequence
  Synthetic
ccuggcuuggguggggaccuu

SEQ ID NO: 21366 - RNA, 21 nt, Artificial Sequence
  Synthetic
cuggcuuggguggggaccuuc

SEQ ID NO: 21367 - RNA, 21 nt, Artificial Sequence
  Synthetic
uggcuuggguggggaccuucc

SEQ ID NO: 21368 - RNA, 21 nt, Artificial Sequence
  Synthetic
ggcuuggguggggaccuuccu

SEQ ID NO: 21369 - RNA, 21 nt, Artificial Sequence
  Synthetic
gcuuggguggggaccuuccuu

SEQ ID NO: 21370 - RNA, 21 nt, Artificial Sequence
  Synthetic
cuuggguggggaccuuccuuc

SEQ ID NO: 21371 - RNA, 21 nt, Artificial Sequence
  Synthetic
uuggguggggaccuuccuucc

SEQ ID NO: 21372 - RNA, 21 nt, Artificial Sequence
  Synthetic
uggguggggaccuuccuucca

SEQ ID NO: 21373 - RNA, 21 nt, Artificial Sequence
  Synthetic
ggguggggaccuuccuuccag

SEQ ID NO: 21374 - RNA, 21 nt, Artificial Sequence
  Synthetic
gguggggaccuuccuuccaga

SEQ ID NO: 21375 - RNA, 21 nt, Artificial Sequence
  Synthetic
guggggaccuuccuuccagau

SEQ ID NO: 21376 - RNA, 21 nt, Artificial Sequence
  Synthetic
uggggaccuuccuuccagauc

SEQ ID NO: 21377 - RNA, 21 nt, Artificial Sequence
  Synthetic
ggggaccuuccuuccagaucc

SEQ ID NO: 21378 - RNA, 21 nt, Artificial Sequence
  Synthetic
gggaccuuccuuccagauccu

SEQ ID NO: 21379 - RNA, 21 nt, Artificial Sequence
  Synthetic
ggaccuuccuuccagauccuc

SEQ ID NO: 21380 - RNA, 21 nt, Artificial Sequence
  Synthetic
gaccuuccuuccagauccucu

SEQ ID NO: 21381 - RNA, 21 nt, Artificial Sequence
  Synthetic
accuuccuuccagauccucua

SEQ ID NO: 21382 - RNA, 21 nt, Artificial Sequence
  Synthetic
ccuuccuuccagauccucuaa

SEQ ID NO: 21383 - RNA, 21 nt, Artificial Sequence
  Synthetic
cuuccuuccagauccucuaag

SEQ ID NO: 21384 - RNA, 21 nt, Artificial Sequence
  Synthetic
uuccuuccagauccucuaagu

SEQ ID NO: 21385 - RNA, 21 nt, Artificial Sequence
  Synthetic
uccuuccagauccucuaaguu

SEQ ID NO: 21386 - RNA, 21 nt, Artificial Sequence
  Synthetic
ccuuccagauccucuaaguuc

SEQ ID NO: 21387 - RNA, 21 nt, Artificial Sequence
  Synthetic
cuuccagauccucuaaguucu

SEQ ID NO: 21388 - RNA, 21 nt, Artificial Sequence
  Synthetic
uuccagauccucuaaguucuc

SEQ ID NO: 21389 - RNA, 21 nt, Artificial Sequence
  Synthetic
uccagauccucuaaguucucu

SEQ ID NO: 21390 - RNA, 21 nt, Artificial Sequence
  Synthetic
ccagauccucuaaguucucuu

SEQ ID NO: 21391 - RNA, 21 nt, Artificial Sequence
  Synthetic
cagauccucuaaguucucuuu

SEQ ID NO: 21392 - RNA, 21 nt, Artificial Sequence
  Synthetic
agauccucuaaguucucuuuc

SEQ ID NO: 21393 - RNA, 21 nt, Artificial Sequence
  Synthetic
gauccucuaaguucucuuuca

SEQ ID NO: 21394 - RNA, 21 nt, Artificial Sequence
  Synthetic
auccucuaaguucucuuucau

SEQ ID NO: 21395 - RNA, 21 nt, Artificial Sequence
  Synthetic
uccucuaaguucucuuucaua

SEQ ID NO: 21396 - RNA, 21 nt, Artificial Sequence
  Synthetic
ccucuaaguucucuuucauau

SEQ ID NO: 21397 - RNA, 21 nt, Artificial Sequence
  Synthetic
cucuaaguucucuuucauaug

SEQ ID NO: 21398 - RNA, 21 nt, Artificial Sequence
  Synthetic
ucuaaguucucuuucauaugc

SEQ ID NO: 21399 - RNA, 21 nt, Artificial Sequence
  Synthetic
cuaaguucucuuucauaugca

SEQ ID NO: 21400 - RNA, 21 nt, Artificial Sequence
  Synthetic
uaaguucucuuucauaugcau

SEQ ID NO: 21401 - RNA, 21 nt, Artificial Sequence
  Synthetic
aaguucucuuucauaugcauc

SEQ ID NO: 21402 - RNA, 21 nt, Artificial Sequence
  Synthetic
aguucucuuucauaugcaucu

SEQ ID NO: 21403 - RNA, 21 nt, Artificial Sequence
  Synthetic
guucucuuucauaugcaucuc

SEQ ID NO: 21404 - RNA, 21 nt, Artificial Sequence
  Synthetic
uucucuuucauaugcaucuca

SEQ ID NO: 21405 - RNA, 21 nt, Artificial Sequence
  Synthetic
ucucuuucauaugcaucucau

SEQ ID NO: 21406 - RNA, 21 nt, Artificial Sequence
  Synthetic
cucuuucauaugcaucucauu

SEQ ID NO: 21407 - RNA, 21 nt, Artificial Sequence
  Synthetic
ucuuucauaugcaucucauuc

SEQ ID NO: 21408 - RNA, 21 nt, Artificial Sequence
  Synthetic
cuuucauaugcaucucauucc

SEQ ID NO: 21409 - RNA, 21 nt, Artificial Sequence
  Synthetic
uuucauaugcaucucauucca

SEQ ID NO: 21410 - RNA, 21 nt, Artificial Sequence
  Synthetic
uucauaugcaucucauuccag

SEQ ID NO: 21411 - RNA, 21 nt, Artificial Sequence
  Synthetic
ucauaugcaucucauuccagg

SEQ ID NO: 21412 - RNA, 21 nt, Artificial Sequence
  Synthetic
cauaugcaucucauuccaggg

SEQ ID NO: 21413 - RNA, 21 nt, Artificial Sequence
  Synthetic
auaugcaucucauuccaggga

SEQ ID NO: 21414 - RNA, 21 nt, Artificial Sequence
  Synthetic
uaugcaucucauuccagggag

SEQ ID NO: 21415 - RNA, 21 nt, Artificial Sequence
  Synthetic
augcaucucauuccagggaga

SEQ ID NO: 21416 - RNA, 21 nt, Artificial Sequence
  Synthetic
ugcaucucauuccagggagaa

SEQ ID NO: 21417 - RNA, 21 nt, Artificial Sequence
  Synthetic
gcaucucauuccagggagaag

SEQ ID NO: 21418 - RNA, 21 nt, Artificial Sequence
  Synthetic
caucucauuccagggagaagg

SEQ ID NO: 21419 - RNA, 21 nt, Artificial Sequence
  Synthetic
aucucauuccagggagaaggg

SEQ ID NO: 21420 - RNA, 21 nt, Artificial Sequence
  Synthetic
ucucauuccagggagaagggg

SEQ ID NO: 21421 - RNA, 21 nt, Artificial Sequence
  Synthetic
cucauuccagggagaagggga

SEQ ID NO: 21422 - RNA, 21 nt, Artificial Sequence
  Synthetic
ucauuccagggagaaggggag

SEQ ID NO: 21423 - RNA, 21 nt, Artificial Sequence
  Synthetic
cauuccagggagaaggggaga

SEQ ID NO: 21424 - RNA, 21 nt, Artificial Sequence
  Synthetic
auuccagggagaaggggagag

SEQ ID NO: 21425 - RNA, 21 nt, Artificial Sequence
  Synthetic
uuccagggagaaggggagagu

SEQ ID NO: 21426 - RNA, 21 nt, Artificial Sequence
  Synthetic
uccagggagaaggggagaguu

SEQ ID NO: 21427 - RNA, 21 nt, Artificial Sequence
  Synthetic
ccagggagaaggggagaguuc

SEQ ID NO: 21428 - RNA, 21 nt, Artificial Sequence
  Synthetic
cagggagaaggggagaguucu

SEQ ID NO: 21429 - RNA, 21 nt, Artificial Sequence
  Synthetic
agggagaaggggagaguucua

SEQ ID NO: 21430 - RNA, 21 nt, Artificial Sequence
  Synthetic
gggagaaggggagaguucuaa

SEQ ID NO: 21431 - RNA, 21 nt, Artificial Sequence
  Synthetic
ggagaaggggagaguucuaag

SEQ ID NO: 21432 - RNA, 21 nt, Artificial Sequence
  Synthetic
gagaaggggagaguucuaagu

SEQ ID NO: 21433 - RNA, 21 nt, Artificial Sequence
  Synthetic
agaaggggagaguucuaaguc

SEQ ID NO: 21434 - RNA, 21 nt, Artificial Sequence
  Synthetic
gaaggggagaguucuaagucc

SEQ ID NO: 21435 - RNA, 21 nt, Artificial Sequence
  Synthetic
aaggggagaguucuaaguccc

SEQ ID NO: 21436 - RNA, 21 nt, Artificial Sequence
  Synthetic
aggggagaguucuaaguccca

SEQ ID NO: 21437 - RNA, 21 nt, Artificial Sequence
  Synthetic
ggggagaguucuaagucccaa

SEQ ID NO: 21438 - RNA, 21 nt, Artificial Sequence
  Synthetic
gggagaguucuaagucccaag

SEQ ID NO: 21439 - RNA, 21 nt, Artificial Sequence
  Synthetic
ggagaguucuaagucccaagu

SEQ ID NO: 21440 - RNA, 21 nt, Artificial Sequence
  Synthetic
gagaguucuaagucccaaguu

SEQ ID NO: 21441 - RNA, 21 nt, Artificial Sequence
  Synthetic
agaguucuaagucccaaguuc

SEQ ID NO: 21442 - RNA, 21 nt, Artificial Sequence
  Synthetic
gaguucuaagucccaaguucu

SEQ ID NO: 21443 - RNA, 21 nt, Artificial Sequence
  Synthetic
aguucuaagucccaaguucua

SEQ ID NO: 21444 - RNA, 21 nt, Artificial Sequence
  Synthetic
guucuaagucccaaguucuaa

SEQ ID NO: 21445 - RNA, 21 nt, Artificial Sequence
  Synthetic
uucuaagucccaaguucuaag

SEQ ID NO: 21446 - RNA, 21 nt, Artificial Sequence
  Synthetic
ucuaagucccaaguucuaaga

SEQ ID NO: 21447 - RNA, 21 nt, Artificial Sequence
  Synthetic
cuaagucccaaguucuaagac

SEQ ID NO: 21448 - RNA, 21 nt, Artificial Sequence
  Synthetic
uaagucccaaguucuaagaca

SEQ ID NO: 21449 - RNA, 21 nt, Artificial Sequence
  Synthetic
aagucccaaguucuaagacac

SEQ ID NO: 21450 - RNA, 21 nt, Artificial Sequence
  Synthetic
agucccaaguucuaagacaca

SEQ ID NO: 21451 - RNA, 21 nt, Artificial Sequence
  Synthetic
gucccaaguucuaagacacau

SEQ ID NO: 21452 - RNA, 21 nt, Artificial Sequence
  Synthetic
ucccaaguucuaagacacaua

SEQ ID NO: 21453 - RNA, 21 nt, Artificial Sequence
  Synthetic
cccaaguucuaagacacauac

SEQ ID NO: 21454 - RNA, 21 nt, Artificial Sequence
  Synthetic
ccaaguucuaagacacauaca

SEQ ID NO: 21455 - RNA, 21 nt, Artificial Sequence
  Synthetic
caaguucuaagacacauacag

SEQ ID NO: 21456 - RNA, 21 nt, Artificial Sequence
  Synthetic
aaguucuaagacacauacagg

SEQ ID NO: 21457 - RNA, 21 nt, Artificial Sequence
  Synthetic
aguucuaagacacauacaggu

SEQ ID NO: 21458 - RNA, 21 nt, Artificial Sequence
  Synthetic
guucuaagacacauacaggua

SEQ ID NO: 21459 - RNA, 21 nt, Artificial Sequence
  Synthetic
uucuaagacacauacagguac

SEQ ID NO: 21460 - RNA, 21 nt, Artificial Sequence
  Synthetic
ucuaagacacauacagguaca

SEQ ID NO: 21461 - RNA, 21 nt, Artificial Sequence
  Synthetic
cuaagacacauacagguacac

SEQ ID NO: 21462 - RNA, 21 nt, Artificial Sequence
  Synthetic
uaagacacauacagguacaca

SEQ ID NO: 21463 - RNA, 21 nt, Artificial Sequence
  Synthetic
aagacacauacagguacacac

SEQ ID NO: 21464 - RNA, 21 nt, Artificial Sequence
  Synthetic
agacacauacagguacacacc

SEQ ID NO: 21465 - RNA, 21 nt, Artificial Sequence
  Synthetic
gacacauacagguacacaccc

SEQ ID NO: 21466 - RNA, 21 nt, Artificial Sequence
  Synthetic
acacauacagguacacaccca

SEQ ID NO: 21467 - RNA, 21 nt, Artificial Sequence
  Synthetic
cacauacagguacacacccac

SEQ ID NO: 21468 - RNA, 21 nt, Artificial Sequence
  Synthetic
acauacagguacacacccaca

SEQ ID NO: 21469 - RNA, 21 nt, Artificial Sequence
  Synthetic
cauacagguacacacccacac

SEQ ID NO: 21470 - RNA, 21 nt, Artificial Sequence
  Synthetic
auacagguacacacccacaca

SEQ ID NO: 21471 - RNA, 21 nt, Artificial Sequence
  Synthetic
uacagguacacacccacacau

SEQ ID NO: 21472 - RNA, 21 nt, Artificial Sequence
  Synthetic
acagguacacacccacacaua

SEQ ID NO: 21473 - RNA, 21 nt, Artificial Sequence
  Synthetic
cagguacacacccacacauac

SEQ ID NO: 21474 - RNA, 21 nt, Artificial Sequence
  Synthetic
agguacacacccacacauaca

SEQ ID NO: 21475 - RNA, 21 nt, Artificial Sequence
  Synthetic
gguacacacccacacauacaa

SEQ ID NO: 21476 - RNA, 21 nt, Artificial Sequence
  Synthetic
guacacacccacacauacaag

SEQ ID NO: 21477 - RNA, 21 nt, Artificial Sequence
  Synthetic
uacacacccacacauacaagc

SEQ ID NO: 21478 - RNA, 21 nt, Artificial Sequence
  Synthetic
acacacccacacauacaagca

SEQ ID NO: 21479 - RNA, 21 nt, Artificial Sequence
  Synthetic
cacacccacacauacaagcac

SEQ ID NO: 21480 - RNA, 21 nt, Artificial Sequence
  Synthetic
acacccacacauacaagcacc

SEQ ID NO: 21481 - RNA, 21 nt, Artificial Sequence
  Synthetic
cacccacacauacaagcaccc

SEQ ID NO: 21482 - RNA, 21 nt, Artificial Sequence
  Synthetic
acccacacauacaagcaccca

SEQ ID NO: 21483 - RNA, 21 nt, Artificial Sequence
  Synthetic
cccacacauacaagcacccac

SEQ ID NO: 21484 - RNA, 21 nt, Artificial Sequence
  Synthetic
ccacacauacaagcacccacc

SEQ ID NO: 21485 - RNA, 21 nt, Artificial Sequence
  Synthetic
cacacauacaagcacccaccc

SEQ ID NO: 21486 - RNA, 21 nt, Artificial Sequence
  Synthetic
acacauacaagcacccacccu

SEQ ID NO: 21487 - RNA, 21 nt, Artificial Sequence
  Synthetic
cacauacaagcacccacccuc

SEQ ID NO: 21488 - RNA, 21 nt, Artificial Sequence
  Synthetic
acauacaagcacccacccuca

SEQ ID NO: 21489 - RNA, 21 nt, Artificial Sequence
  Synthetic
cauacaagcacccacccucac

SEQ ID NO: 21490 - RNA, 21 nt, Artificial Sequence
  Synthetic
auacaagcacccacccucacu

SEQ ID NO: 21491 - RNA, 21 nt, Artificial Sequence
  Synthetic
uacaagcacccacccucacuu

SEQ ID NO: 21492 - RNA, 21 nt, Artificial Sequence
  Synthetic
acaagcacccacccucacuuu

SEQ ID NO: 21493 - RNA, 21 nt, Artificial Sequence
  Synthetic
caagcacccacccucacuuua

SEQ ID NO: 21494 - RNA, 21 nt, Artificial Sequence
  Synthetic
aagcacccacccucacuuuau

SEQ ID NO: 21495 - RNA, 21 nt, Artificial Sequence
  Synthetic
agcacccacccucacuuuaug

SEQ ID NO: 21496 - RNA, 21 nt, Artificial Sequence
  Synthetic
gcacccacccucacuuuaugg

SEQ ID NO: 21497 - RNA, 21 nt, Artificial Sequence
  Synthetic
cacccacccucacuuuaugga

SEQ ID NO: 21498 - RNA, 21 nt, Artificial Sequence
  Synthetic
acccacccucacuuuauggaa

SEQ ID NO: 21499 - RNA, 21 nt, Artificial Sequence
  Synthetic
cccacccucacuuuauggaaa

SEQ ID NO: 21500 - RNA, 21 nt, Artificial Sequence
  Synthetic
ccacccucacuuuauggaaag

SEQ ID NO: 21501 - RNA, 21 nt, Artificial Sequence
  Synthetic
cacccucacuuuauggaaagc

SEQ ID NO: 21502 - RNA, 21 nt, Artificial Sequence
  Synthetic
acccucacuuuauggaaagca

SEQ ID NO: 21503 - RNA, 21 nt, Artificial Sequence
  Synthetic
cccucacuuuauggaaagcau

SEQ ID NO: 21504 - RNA, 21 nt, Artificial Sequence
  Synthetic
ccucacuuuauggaaagcauc

SEQ ID NO: 21505 - RNA, 21 nt, Artificial Sequence
  Synthetic
cucacuuuauggaaagcaucc

SEQ ID NO: 21506 - RNA, 21 nt, Artificial Sequence
  Synthetic
ucacuuuauggaaagcaucca

SEQ ID NO: 21507 - RNA, 21 nt, Artificial Sequence
  Synthetic
cacuuuauggaaagcauccag

SEQ ID NO: 21508 - RNA, 21 nt, Artificial Sequence
  Synthetic
acuuuauggaaagcauccagu

SEQ ID NO: 21509 - RNA, 21 nt, Artificial Sequence
  Synthetic
cuuuauggaaagcauccagug

SEQ ID NO: 21510 - RNA, 21 nt, Artificial Sequence
  Synthetic
uuuauggaaagcauccagugg

SEQ ID NO: 21511 - RNA, 21 nt, Artificial Sequence
  Synthetic
uuauggaaagcauccaguggg

SEQ ID NO: 21512 - RNA, 21 nt, Artificial Sequence
  Synthetic
uauggaaagcauccagugggg

SEQ ID NO: 21513 - RNA, 21 nt, Artificial Sequence
  Synthetic
auggaaagcauccagugggga

SEQ ID NO: 21514 - RNA, 21 nt, Artificial Sequence
  Synthetic
uggaaagcauccaguggggag

SEQ ID NO: 21515 - RNA, 21 nt, Artificial Sequence
  Synthetic
ggaaagcauccaguggggaga

SEQ ID NO: 21516 - RNA, 21 nt, Artificial Sequence
  Synthetic
gaaagcauccaguggggagac

SEQ ID NO: 21517 - RNA, 21 nt, Artificial Sequence
  Synthetic
aaagcauccaguggggagacu

SEQ ID NO: 21518 - RNA, 21 nt, Artificial Sequence
  Synthetic
aagcauccaguggggagacuc

SEQ ID NO: 21519 - RNA, 21 nt, Artificial Sequence
  Synthetic
agcauccaguggggagacuca

SEQ ID NO: 21520 - RNA, 21 nt, Artificial Sequence
  Synthetic
gcauccaguggggagacucau

SEQ ID NO: 21521 - RNA, 21 nt, Artificial Sequence
  Synthetic
cauccaguggggagacucaug

SEQ ID NO: 21522 - RNA, 21 nt, Artificial Sequence
  Synthetic
auccaguggggagacucauga

SEQ ID NO: 21523 - RNA, 21 nt, Artificial Sequence
  Synthetic
uccaguggggagacucaugaa

SEQ ID NO: 21524 - RNA, 21 nt, Artificial Sequence
  Synthetic
ccaguggggagacucaugaac

SEQ ID NO: 21525 - RNA, 21 nt, Artificial Sequence
  Synthetic
caguggggagacucaugaaca

SEQ ID NO: 21526 - RNA, 21 nt, Artificial Sequence
  Synthetic
aguggggagacucaugaacau

SEQ ID NO: 21527 - RNA, 21 nt, Artificial Sequence
  Synthetic
guggggagacucaugaacauc

SEQ ID NO: 21528 - RNA, 21 nt, Artificial Sequence
  Synthetic
uggggagacucaugaacauca

SEQ ID NO: 21529 - RNA, 21 nt, Artificial Sequence
  Synthetic
ggggagacucaugaacaucag

SEQ ID NO: 21530 - RNA, 21 nt, Artificial Sequence
  Synthetic
gggagacucaugaacaucagu

SEQ ID NO: 21531 - RNA, 21 nt, Artificial Sequence
  Synthetic
ggagacucaugaacaucaguc

SEQ ID NO: 21532 - RNA, 21 nt, Artificial Sequence
  Synthetic
gagacucaugaacaucaguca

SEQ ID NO: 21533 - RNA, 21 nt, Artificial Sequence
  Synthetic
agacucaugaacaucagucau

SEQ ID NO: 21534 - RNA, 21 nt, Artificial Sequence
  Synthetic
gacucaugaacaucagucauu

SEQ ID NO: 21535 - RNA, 21 nt, Artificial Sequence
  Synthetic
acucaugaacaucagucauuc

SEQ ID NO: 21536 - RNA, 21 nt, Artificial Sequence
  Synthetic
cucaugaacaucagucauucu

SEQ ID NO: 21537 - RNA, 21 nt, Artificial Sequence
  Synthetic
ucaugaacaucagucauucug

SEQ ID NO: 21538 - RNA, 21 nt, Artificial Sequence
  Synthetic
caugaacaucagucauucuga

SEQ ID NO: 21539 - RNA, 21 nt, Artificial Sequence
  Synthetic
augaacaucagucauucugag

SEQ ID NO: 21540 - RNA, 21 nt, Artificial Sequence
  Synthetic
ugaacaucagucauucugagg

SEQ ID NO: 21541 - RNA, 21 nt, Artificial Sequence
  Synthetic
gaacaucagucauucugaggc

SEQ ID NO: 21542 - RNA, 21 nt, Artificial Sequence
  Synthetic
aacaucagucauucugaggcc

SEQ ID NO: 21543 - RNA, 21 nt, Artificial Sequence
  Synthetic
acaucagucauucugaggcca

SEQ ID NO: 21544 - RNA, 21 nt, Artificial Sequence
  Synthetic
caucagucauucugaggccac

SEQ ID NO: 21545 - RNA, 21 nt, Artificial Sequence
  Synthetic
aucagucauucugaggccaca

SEQ ID NO: 21546 - RNA, 21 nt, Artificial Sequence
  Synthetic
ucagucauucugaggccacau

SEQ ID NO: 21547 - RNA, 21 nt, Artificial Sequence
  Synthetic
cagucauucugaggccacauc

SEQ ID NO: 21548 - RNA, 21 nt, Artificial Sequence
  Synthetic
agucauucugaggccacaucc

SEQ ID NO: 21549 - RNA, 21 nt, Artificial Sequence
  Synthetic
gucauucugaggccacauccu

SEQ ID NO: 21550 - RNA, 21 nt, Artificial Sequence
  Synthetic
ucauucugaggccacauccuu

SEQ ID NO: 21551 - RNA, 21 nt, Artificial Sequence
  Synthetic
cauucugaggccacauccuuc

SEQ ID NO: 21552 - RNA, 21 nt, Artificial Sequence
  Synthetic
auucugaggccacauccuucu

SEQ ID NO: 21553 - RNA, 21 nt, Artificial Sequence
  Synthetic
uucugaggccacauccuucua

SEQ ID NO: 21554 - RNA, 21 nt, Artificial Sequence
  Synthetic
ucugaggccacauccuucuac

SEQ ID NO: 21555 - RNA, 21 nt, Artificial Sequence
  Synthetic
cugaggccacauccuucuacu

SEQ ID NO: 21556 - RNA, 21 nt, Artificial Sequence
  Synthetic
ugaggccacauccuucuacua

SEQ ID NO: 21557 - RNA, 21 nt, Artificial Sequence
  Synthetic
gaggccacauccuucuacuaa

SEQ ID NO: 21558 - RNA, 21 nt, Artificial Sequence
  Synthetic
aggccacauccuucuacuaaa

SEQ ID NO: 21559 - RNA, 21 nt, Artificial Sequence
  Synthetic
ggccacauccuucuacuaaac

SEQ ID NO: 21560 - RNA, 21 nt, Artificial Sequence
  Synthetic
gccacauccuucuacuaaacu

SEQ ID NO: 21561 - RNA, 21 nt, Artificial Sequence
  Synthetic
ccacauccuucuacuaaacua

SEQ ID NO: 21562 - RNA, 21 nt, Artificial Sequence
  Synthetic
cacauccuucuacuaaacuaa

SEQ ID NO: 21563 - RNA, 21 nt, Artificial Sequence
  Synthetic
acauccuucuacuaaacuaau

SEQ ID NO: 21564 - RNA, 21 nt, Artificial Sequence
  Synthetic
cauccuucuacuaaacuaauc

SEQ ID NO: 21565 - RNA, 21 nt, Artificial Sequence
  Synthetic
auccuucuacuaaacuaauca

SEQ ID NO: 21566 - RNA, 21 nt, Artificial Sequence
  Synthetic
uccuucuacuaaacuaaucau

SEQ ID NO: 21567 - RNA, 21 nt, Artificial Sequence
  Synthetic
ccuucuacuaaacuaaucauu

SEQ ID NO: 21568 - RNA, 21 nt, Artificial Sequence
  Synthetic
cuucuacuaaacuaaucauuc

SEQ ID NO: 21569 - RNA, 21 nt, Artificial Sequence
  Synthetic
uucuacuaaacuaaucauucc

SEQ ID NO: 21570 - RNA, 21 nt, Artificial Sequence
  Synthetic
ucuacuaaacuaaucauuccg

SEQ ID NO: 21571 - RNA, 21 nt, Artificial Sequence
  Synthetic
cuacuaaacuaaucauuccgc

SEQ ID NO: 21572 - RNA, 21 nt, Artificial Sequence
  Synthetic
uacuaaacuaaucauuccgca

SEQ ID NO: 21573 - RNA, 21 nt, Artificial Sequence
  Synthetic
acuaaacuaaucauuccgcag

SEQ ID NO: 21574 - RNA, 21 nt, Artificial Sequence
  Synthetic
cuaaacuaaucauuccgcaga

SEQ ID NO: 21575 - RNA, 21 nt, Artificial Sequence
  Synthetic
uaaacuaaucauuccgcagac

SEQ ID NO: 21576 - RNA, 21 nt, Artificial Sequence
  Synthetic
aaacuaaucauuccgcagacu

SEQ ID NO: 21577 - RNA, 21 nt, Artificial Sequence
  Synthetic
aacuaaucauuccgcagacuu

SEQ ID NO: 21578 - RNA, 21 nt, Artificial Sequence
  Synthetic
acuaaucauuccgcagacuug

SEQ ID NO: 21579 - RNA, 21 nt, Artificial Sequence
  Synthetic
cuaaucauuccgcagacuugg

SEQ ID NO: 21580 - RNA, 21 nt, Artificial Sequence
  Synthetic
uaaucauuccgcagacuugga

SEQ ID NO: 21581 - RNA, 21 nt, Artificial Sequence
  Synthetic
aaucauuccgcagacuuggau

SEQ ID NO: 21582 - RNA, 21 nt, Artificial Sequence
  Synthetic
aucauuccgcagacuuggaug

SEQ ID NO: 21583 - RNA, 21 nt, Artificial Sequence
  Synthetic
ucauuccgcagacuuggaugc

SEQ ID NO: 21584 - RNA, 21 nt, Artificial Sequence
  Synthetic
cauuccgcagacuuggaugca

SEQ ID NO: 21585 - RNA, 21 nt, Artificial Sequence
  Synthetic
auuccgcagacuuggaugcac

SEQ ID NO: 21586 - RNA, 21 nt, Artificial Sequence
  Synthetic
uuccgcagacuuggaugcacc

SEQ ID NO: 21587 - RNA, 21 nt, Artificial Sequence
  Synthetic
uccgcagacuuggaugcaccc

SEQ ID NO: 21588 - RNA, 21 nt, Artificial Sequence
  Synthetic
ccgcagacuuggaugcacccc

SEQ ID NO: 21589 - RNA, 21 nt, Artificial Sequence
  Synthetic
cgcagacuuggaugcaccccg

SEQ ID NO: 21590 - RNA, 21 nt, Artificial Sequence
  Synthetic
gcagacuuggaugcaccccgc

SEQ ID NO: 21591 - RNA, 21 nt, Artificial Sequence
  Synthetic
cagacuuggaugcaccccgcu

SEQ ID NO: 21592 - RNA, 21 nt, Artificial Sequence
  Synthetic
agacuuggaugcaccccgcuu

SEQ ID NO: 21593 - RNA, 21 nt, Artificial Sequence
  Synthetic
gacuuggaugcaccccgcuuc

SEQ ID NO: 21594 - RNA, 21 nt, Artificial Sequence
  Synthetic
acuuggaugcaccccgcuucc

SEQ ID NO: 21595 - RNA, 21 nt, Artificial Sequence
  Synthetic
cuuggaugcaccccgcuucca

SEQ ID NO: 21596 - RNA, 21 nt, Artificial Sequence
  Synthetic
uuggaugcaccccgcuuccac

SEQ ID NO: 21597 - RNA, 21 nt, Artificial Sequence
  Synthetic
uggaugcaccccgcuuccaca

SEQ ID NO: 21598 - RNA, 21 nt, Artificial Sequence
  Synthetic
ggaugcaccccgcuuccacau

SEQ ID NO: 21599 - RNA, 21 nt, Artificial Sequence
  Synthetic
gaugcaccccgcuuccacaug

SEQ ID NO: 21600 - RNA, 21 nt, Artificial Sequence
  Synthetic
augcaccccgcuuccacaugg

SEQ ID NO: 21601 - RNA, 21 nt, Artificial Sequence
  Synthetic
ugcaccccgcuuccacaugga

SEQ ID NO: 21602 - RNA, 21 nt, Artificial Sequence
  Synthetic
gcaccccgcuuccacauggac

SEQ ID NO: 21603 - RNA, 21 nt, Artificial Sequence
  Synthetic
caccccgcuuccacauggacu

SEQ ID NO: 21604 - RNA, 21 nt, Artificial Sequence
  Synthetic
accccgcuuccacauggacuu

SEQ ID NO: 21605 - RNA, 21 nt, Artificial Sequence
  Synthetic
ccccgcuuccacauggacuuu

SEQ ID NO: 21606 - RNA, 21 nt, Artificial Sequence
  Synthetic
cccgcuuccacauggacuuua

SEQ ID NO: 21607 - RNA, 21 nt, Artificial Sequence
  Synthetic
ccgcuuccacauggacuuuac

SEQ ID NO: 21608 - RNA, 21 nt, Artificial Sequence
  Synthetic
cgcuuccacauggacuuuacc

SEQ ID NO: 21609 - RNA, 21 nt, Artificial Sequence
  Synthetic
gcuuccacauggacuuuacca

SEQ ID NO: 21610 - RNA, 21 nt, Artificial Sequence
  Synthetic
cuuccacauggacuuuaccau

SEQ ID NO: 21611 - RNA, 21 nt, Artificial Sequence
  Synthetic
uuccacauggacuuuaccauc

SEQ ID NO: 21612 - RNA, 21 nt, Artificial Sequence
  Synthetic
uccacauggacuuuaccaucc

SEQ ID NO: 21613 - RNA, 21 nt, Artificial Sequence
  Synthetic
ccacauggacuuuaccaucca

SEQ ID NO: 21614 - RNA, 21 nt, Artificial Sequence
  Synthetic
cacauggacuuuaccauccac

SEQ ID NO: 21615 - RNA, 21 nt, Artificial Sequence
  Synthetic
acauggacuuuaccauccaca

SEQ ID NO: 21616 - RNA, 21 nt, Artificial Sequence
  Synthetic
cauggacuuuaccauccacaa

SEQ ID NO: 21617 - RNA, 21 nt, Artificial Sequence
  Synthetic
auggacuuuaccauccacaac

SEQ ID NO: 21618 - RNA, 21 nt, Artificial Sequence
  Synthetic
uggacuuuaccauccacaacu

SEQ ID NO: 21619 - RNA, 21 nt, Artificial Sequence
  Synthetic
ggacuuuaccauccacaacuu

SEQ ID NO: 21620 - RNA, 21 nt, Artificial Sequence
  Synthetic
gacuuuaccauccacaacuua

SEQ ID NO: 21621 - RNA, 21 nt, Artificial Sequence
  Synthetic
acuuuaccauccacaacuuac

SEQ ID NO: 21622 - RNA, 21 nt, Artificial Sequence
  Synthetic
cuuuaccauccacaacuuacc

SEQ ID NO: 21623 - RNA, 21 nt, Artificial Sequence
  Synthetic
uuuaccauccacaacuuacca

SEQ ID NO: 21624 - RNA, 21 nt, Artificial Sequence
  Synthetic
uuaccauccacaacuuaccag

SEQ ID NO: 21625 - RNA, 21 nt, Artificial Sequence
  Synthetic
uaccauccacaacuuaccagc

SEQ ID NO: 21626 - RNA, 21 nt, Artificial Sequence
  Synthetic
accauccacaacuuaccagca

SEQ ID NO: 21627 - RNA, 21 nt, Artificial Sequence
  Synthetic
ccauccacaacuuaccagcaa

SEQ ID NO: 21628 - RNA, 21 nt, Artificial Sequence
  Synthetic
cauccacaacuuaccagcaag

SEQ ID NO: 21629 - RNA, 21 nt, Artificial Sequence
  Synthetic
auccacaacuuaccagcaaga

SEQ ID NO: 21630 - RNA, 21 nt, Artificial Sequence
  Synthetic
uccacaacuuaccagcaagaa

SEQ ID NO: 21631 - RNA, 21 nt, Artificial Sequence
  Synthetic
ccacaacuuaccagcaagaau

SEQ ID NO: 21632 - RNA, 21 nt, Artificial Sequence
  Synthetic
cacaacuuaccagcaagaauu

SEQ ID NO: 21633 - RNA, 21 nt, Artificial Sequence
  Synthetic
acaacuuaccagcaagaauuu

SEQ ID NO: 21634 - RNA, 21 nt, Artificial Sequence
  Synthetic
caacuuaccagcaagaauuug

SEQ ID NO: 21635 - RNA, 21 nt, Artificial Sequence
  Synthetic
aacuuaccagcaagaauuugg

SEQ ID NO: 21636 - RNA, 21 nt, Artificial Sequence
  Synthetic
acuuaccagcaagaauuugga

SEQ ID NO: 21637 - RNA, 21 nt, Artificial Sequence
  Synthetic
cuuaccagcaagaauuuggaa

SEQ ID NO: 21638 - RNA, 21 nt, Artificial Sequence
  Synthetic
uuaccagcaagaauuuggaag

SEQ ID NO: 21639 - RNA, 21 nt, Artificial Sequence
  Synthetic
uaccagcaagaauuuggaaga

SEQ ID NO: 21640 - RNA, 21 nt, Artificial Sequence
  Synthetic
accagcaagaauuuggaagau

SEQ ID NO: 21641 - RNA, 21 nt, Artificial Sequence
  Synthetic
ccagcaagaauuuggaagauu

SEQ ID NO: 21642 - RNA, 21 nt, Artificial Sequence
  Synthetic
cagcaagaauuuggaagauuc

SEQ ID NO: 21643 - RNA, 21 nt, Artificial Sequence
  Synthetic
agcaagaauuuggaagauucc

SEQ ID NO: 21644 - RNA, 21 nt, Artificial Sequence
  Synthetic
gcaagaauuuggaagauucca

SEQ ID NO: 21645 - RNA, 21 nt, Artificial Sequence
  Synthetic
caagaauuuggaagauuccag

SEQ ID NO: 21646 - RNA, 21 nt, Artificial Sequence
  Synthetic
aagaauuuggaagauuccagu

SEQ ID NO: 21647 - RNA, 21 nt, Artificial Sequence
  Synthetic
agaauuuggaagauuccagug

SEQ ID NO: 21648 - RNA, 21 nt, Artificial Sequence
  Synthetic
gaauuuggaagauuccaguga

SEQ ID NO: 21649 - RNA, 21 nt, Artificial Sequence
  Synthetic
aauuuggaagauuccagugau

SEQ ID NO: 21650 - RNA, 21 nt, Artificial Sequence
  Synthetic
auuuggaagauuccagugaug

SEQ ID NO: 21651 - RNA, 21 nt, Artificial Sequence
  Synthetic
uuuggaagauuccagugaugu

SEQ ID NO: 21652 - RNA, 21 nt, Artificial Sequence
  Synthetic
uuggaagauuccagugaugua

SEQ ID NO: 21653 - RNA, 21 nt, Artificial Sequence
  Synthetic
uggaagauuccagugauguaa

SEQ ID NO: 21654 - RNA, 21 nt, Artificial Sequence
  Synthetic
ggaagauuccagugauguaaa

SEQ ID NO: 21655 - RNA, 21 nt, Artificial Sequence
  Synthetic
gaagauuccagugauguaaaa

SEQ ID NO: 21656 - RNA, 21 nt, Artificial Sequence
  Synthetic
aagauuccagugauguaaaac

SEQ ID NO: 21657 - RNA, 21 nt, Artificial Sequence
  Synthetic
agauuccagugauguaaaacc

SEQ ID NO: 21658 - RNA, 21 nt, Artificial Sequence
  Synthetic
gauuccagugauguaaaaccu

SEQ ID NO: 21659 - RNA, 21 nt, Artificial Sequence
  Synthetic
auuccagugauguaaaaccug

SEQ ID NO: 21660 - RNA, 21 nt, Artificial Sequence
  Synthetic
uuccagugauguaaaaccugc

SEQ ID NO: 21661 - RNA, 21 nt, Artificial Sequence
  Synthetic
uccagugauguaaaaccugcc

SEQ ID NO: 21662 - RNA, 21 nt, Artificial Sequence
  Synthetic
ccagugauguaaaaccugccc

SEQ ID NO: 21663 - RNA, 21 nt, Artificial Sequence
  Synthetic
cagugauguaaaaccugcccc

SEQ ID NO: 21664 - RNA, 21 nt, Artificial Sequence
  Synthetic
agugauguaaaaccugccccc

SEQ ID NO: 21665 - RNA, 21 nt, Artificial Sequence
  Synthetic
gugauguaaaaccugcccccc

SEQ ID NO: 21666 - RNA, 21 nt, Artificial Sequence
  Synthetic
ugauguaaaaccugccccccu

SEQ ID NO: 21667 - RNA, 21 nt, Artificial Sequence
  Synthetic
gauguaaaaccugccccccuu

SEQ ID NO: 21668 - RNA, 21 nt, Artificial Sequence
  Synthetic
auguaaaaccugccccccuug

SEQ ID NO: 21669 - RNA, 21 nt, Artificial Sequence
  Synthetic
uguaaaaccugccccccuugg

SEQ ID NO: 21670 - RNA, 21 nt, Artificial Sequence
  Synthetic
guaaaaccugccccccuuggu

SEQ ID NO: 21671 - RNA, 21 nt, Artificial Sequence
  Synthetic
uaaaaccugccccccuuggug

SEQ ID NO: 21672 - RNA, 21 nt, Artificial Sequence
  Synthetic
aaaaccugccccccuugguga

SEQ ID NO: 21673 - RNA, 21 nt, Artificial Sequence
  Synthetic
aaaccugccccccuuggugag

SEQ ID NO: 21674 - RNA, 21 nt, Artificial Sequence
  Synthetic
aaccugccccccuuggugagg

SEQ ID NO: 21675 - RNA, 21 nt, Artificial Sequence
  Synthetic
accugccccccuuggugaggg

SEQ ID NO: 21676 - RNA, 21 nt, Artificial Sequence
  Synthetic
ccugccccccuuggugagggu

SEQ ID NO: 21677 - RNA, 21 nt, Artificial Sequence
  Synthetic
cugccccccuuggugagggug

SEQ ID NO: 21678 - RNA, 21 nt, Artificial Sequence
  Synthetic
ugccccccuuggugaggguga

SEQ ID NO: 21679 - RNA, 21 nt, Artificial Sequence
  Synthetic
gccccccuuggugagggugaa

SEQ ID NO: 21680 - RNA, 21 nt, Artificial Sequence
  Synthetic
ccccccuuggugagggugaag

SEQ ID NO: 21681 - RNA, 21 nt, Artificial Sequence
  Synthetic
cccccuuggugagggugaaga

SEQ ID NO: 21682 - RNA, 21 nt, Artificial Sequence
  Synthetic
ccccuuggugagggugaagag

SEQ ID NO: 21683 - RNA, 21 nt, Artificial Sequence
  Synthetic
cccuuggugagggugaagagu

SEQ ID NO: 21684 - RNA, 21 nt, Artificial Sequence
  Synthetic
ccuuggugagggugaagaguu

SEQ ID NO: 21685 - RNA, 21 nt, Artificial Sequence
  Synthetic
cuuggugagggugaagaguug

SEQ ID NO: 21686 - RNA, 21 nt, Artificial Sequence
  Synthetic
uuggugagggugaagaguugg

SEQ ID NO: 21687 - RNA, 21 nt, Artificial Sequence
  Synthetic
uggugagggugaagaguuggc

SEQ ID NO: 21688 - RNA, 21 nt, Artificial Sequence
  Synthetic
ggugagggugaagaguuggca

SEQ ID NO: 21689 - RNA, 21 nt, Artificial Sequence
  Synthetic
gugagggugaagaguuggcag

SEQ ID NO: 21690 - RNA, 21 nt, Artificial Sequence
  Synthetic
ugagggugaagaguuggcaga

SEQ ID NO: 21691 - RNA, 21 nt, Artificial Sequence
  Synthetic
gagggugaagaguuggcagaa

SEQ ID NO: 21692 - RNA, 21 nt, Artificial Sequence
  Synthetic
agggugaagaguuggcagaag

SEQ ID NO: 21693 - RNA, 21 nt, Artificial Sequence
  Synthetic
gggugaagaguuggcagaaga

SEQ ID NO: 21694 - RNA, 21 nt, Artificial Sequence
  Synthetic
ggugaagaguuggcagaagaa

SEQ ID NO: 21695 - RNA, 21 nt, Artificial Sequence
  Synthetic
gugaagaguuggcagaagaac

SEQ ID NO: 21696 - RNA, 21 nt, Artificial Sequence
  Synthetic
ugaagaguuggcagaagaaca

SEQ ID NO: 21697 - RNA, 21 nt, Artificial Sequence
  Synthetic
gaagaguuggcagaagaacag

SEQ ID NO: 21698 - RNA, 21 nt, Artificial Sequence
  Synthetic
aagaguuggcagaagaacagg

SEQ ID NO: 21699 - RNA, 21 nt, Artificial Sequence
  Synthetic
agaguuggcagaagaacagga

SEQ ID NO: 21700 - RNA, 21 nt, Artificial Sequence
  Synthetic
gaguuggcagaagaacaggaa

SEQ ID NO: 21701 - RNA, 21 nt, Artificial Sequence
  Synthetic
aguuggcagaagaacaggaac

SEQ ID NO: 21702 - RNA, 21 nt, Artificial Sequence
  Synthetic
guuggcagaagaacaggaaca

SEQ ID NO: 21703 - RNA, 21 nt, Artificial Sequence
  Synthetic
uuggcagaagaacaggaacag

SEQ ID NO: 21704 - RNA, 21 nt, Artificial Sequence
  Synthetic
uggcagaagaacaggaacaga

SEQ ID NO: 21705 - RNA, 21 nt, Artificial Sequence
  Synthetic
ggcagaagaacaggaacagag

SEQ ID NO: 21706 - RNA, 21 nt, Artificial Sequence
  Synthetic
gcagaagaacaggaacagaga

SEQ ID NO: 21707 - RNA, 21 nt, Artificial Sequence
  Synthetic
cagaagaacaggaacagagac

SEQ ID NO: 21708 - RNA, 21 nt, Artificial Sequence
  Synthetic
agaagaacaggaacagagaca

SEQ ID NO: 21709 - RNA, 21 nt, Artificial Sequence
  Synthetic
gaagaacaggaacagagacag

SEQ ID NO: 21710 - RNA, 21 nt, Artificial Sequence
  Synthetic
aagaacaggaacagagacaga

SEQ ID NO: 21711 - RNA, 21 nt, Artificial Sequence
  Synthetic
agaacaggaacagagacagaa

SEQ ID NO: 21712 - RNA, 21 nt, Artificial Sequence
  Synthetic
gaacaggaacagagacagaau

SEQ ID NO: 21713 - RNA, 21 nt, Artificial Sequence
  Synthetic
aacaggaacagagacagaaug

SEQ ID NO: 21714 - RNA, 21 nt, Artificial Sequence
  Synthetic
acaggaacagagacagaaugc

SEQ ID NO: 21715 - RNA, 21 nt, Artificial Sequence
  Synthetic
caggaacagagacagaaugcu

SEQ ID NO: 21716 - RNA, 21 nt, Artificial Sequence
  Synthetic
aggaacagagacagaaugcug

SEQ ID NO: 21717 - RNA, 21 nt, Artificial Sequence
  Synthetic
ggaacagagacagaaugcuga

SEQ ID NO: 21718 - RNA, 21 nt, Artificial Sequence
  Synthetic
gaacagagacagaaugcugaa

SEQ ID NO: 21719 - RNA, 21 nt, Artificial Sequence
  Synthetic
aacagagacagaaugcugaag

SEQ ID NO: 21720 - RNA, 21 nt, Artificial Sequence
  Synthetic
acagagacagaaugcugaaga

SEQ ID NO: 21721 - RNA, 21 nt, Artificial Sequence
  Synthetic
cagagacagaaugcugaagau

SEQ ID NO: 21722 - RNA, 21 nt, Artificial Sequence
  Synthetic
agagacagaaugcugaagaug

SEQ ID NO: 21723 - RNA, 21 nt, Artificial Sequence
  Synthetic
gagacagaaugcugaagauga

SEQ ID NO: 21724 - RNA, 21 nt, Artificial Sequence
  Synthetic
agacagaaugcugaagaugau

SEQ ID NO: 21725 - RNA, 21 nt, Artificial Sequence
  Synthetic
gacagaaugcugaagaugauc

SEQ ID NO: 21726 - RNA, 21 nt, Artificial Sequence
  Synthetic
acagaaugcugaagaugaucg

SEQ ID NO: 21727 - RNA, 21 nt, Artificial Sequence
  Synthetic
cagaaugcugaagaugaucga

SEQ ID NO: 21728 - RNA, 21 nt, Artificial Sequence
  Synthetic
agaaugcugaagaugaucgac

SEQ ID NO: 21729 - RNA, 21 nt, Artificial Sequence
  Synthetic
gaaugcugaagaugaucgaca

SEQ ID NO: 21730 - RNA, 21 nt, Artificial Sequence
  Synthetic
aaugcugaagaugaucgacag

SEQ ID NO: 21731 - RNA, 21 nt, Artificial Sequence
  Synthetic
augcugaagaugaucgacagg

SEQ ID NO: 21732 - RNA, 21 nt, Artificial Sequence
  Synthetic
ugcugaagaugaucgacagga

SEQ ID NO: 21733 - RNA, 21 nt, Artificial Sequence
  Synthetic
gcugaagaugaucgacaggau

SEQ ID NO: 21734 - RNA, 21 nt, Artificial Sequence
  Synthetic
cugaagaugaucgacaggauc

SEQ ID NO: 21735 - RNA, 21 nt, Artificial Sequence
  Synthetic
ugaagaugaucgacaggauca

SEQ ID NO: 21736 - RNA, 21 nt, Artificial Sequence
  Synthetic
gaagaugaucgacaggaucau

SEQ ID NO: 21737 - RNA, 21 nt, Artificial Sequence
  Synthetic
aagaugaucgacaggaucaug

SEQ ID NO: 21738 - RNA, 21 nt, Artificial Sequence
  Synthetic
agaugaucgacaggaucaugg

SEQ ID NO: 21739 - RNA, 21 nt, Artificial Sequence
  Synthetic
gaugaucgacaggaucauggu

SEQ ID NO: 21740 - RNA, 21 nt, Artificial Sequence
  Synthetic
augaucgacaggaucauggug

SEQ ID NO: 21741 - RNA, 21 nt, Artificial Sequence
  Synthetic
ugaucgacaggaucauggugg

SEQ ID NO: 21742 - RNA, 21 nt, Artificial Sequence
  Synthetic
gaucgacaggaucaugguggc

SEQ ID NO: 21743 - RNA, 21 nt, Artificial Sequence
  Synthetic
aucgacaggaucaugguggcc

SEQ ID NO: 21744 - RNA, 21 nt, Artificial Sequence
  Synthetic
ucgacaggaucaugguggccu

SEQ ID NO: 21745 - RNA, 21 nt, Artificial Sequence
  Synthetic
cgacaggaucaugguggccug

SEQ ID NO: 21746 - RNA, 21 nt, Artificial Sequence
  Synthetic
gacaggaucaugguggccugg

SEQ ID NO: 21747 - RNA, 21 nt, Artificial Sequence
  Synthetic
acaggaucaugguggccugga

SEQ ID NO: 21748 - RNA, 21 nt, Artificial Sequence
  Synthetic
caggaucaugguggccuggac

SEQ ID NO: 21749 - RNA, 21 nt, Artificial Sequence
  Synthetic
aggaucaugguggccuggaca

SEQ ID NO: 21750 - RNA, 21 nt, Artificial Sequence
  Synthetic
ggaucaugguggccuggacag

SEQ ID NO: 21751 - RNA, 21 nt, Artificial Sequence
  Synthetic
gaucaugguggccuggacaga

SEQ ID NO: 21752 - RNA, 21 nt, Artificial Sequence
  Synthetic
aucaugguggccuggacagac

SEQ ID NO: 21753 - RNA, 21 nt, Artificial Sequence
  Synthetic
ucaugguggccuggacagacu

SEQ ID NO: 21754 - RNA, 21 nt, Artificial Sequence
  Synthetic
caugguggccuggacagacug

SEQ ID NO: 21755 - RNA, 21 nt, Artificial Sequence
  Synthetic
augguggccuggacagacugc

SEQ ID NO: 21756 - RNA, 21 nt, Artificial Sequence
  Synthetic
ugguggccuggacagacugca

SEQ ID NO: 21757 - RNA, 21 nt, Artificial Sequence
  Synthetic
gguggccuggacagacugcag

SEQ ID NO: 21758 - RNA, 21 nt, Artificial Sequence
  Synthetic
guggccuggacagacugcagc

SEQ ID NO: 21759 - RNA, 21 nt, Artificial Sequence
  Synthetic
uggccuggacagacugcagcc

SEQ ID NO: 21760 - RNA, 21 nt, Artificial Sequence
  Synthetic
ggccuggacagacugcagcca

SEQ ID NO: 21761 - RNA, 21 nt, Artificial Sequence
  Synthetic
gccuggacagacugcagccau

SEQ ID NO: 21762 - RNA, 21 nt, Artificial Sequence
  Synthetic
ccuggacagacugcagccauu

SEQ ID NO: 21763 - RNA, 21 nt, Artificial Sequence
  Synthetic
cuggacagacugcagccauuc

SEQ ID NO: 21764 - RNA, 21 nt, Artificial Sequence
  Synthetic
uggacagacugcagccauucg

SEQ ID NO: 21765 - RNA, 21 nt, Artificial Sequence
  Synthetic
ggacagacugcagccauucgu

SEQ ID NO: 21766 - RNA, 21 nt, Artificial Sequence
  Synthetic
gacagacugcagccauucguu

SEQ ID NO: 21767 - RNA, 21 nt, Artificial Sequence
  Synthetic
acagacugcagccauucguuu

SEQ ID NO: 21768 - RNA, 21 nt, Artificial Sequence
  Synthetic
cagacugcagccauucguuug

SEQ ID NO: 21769 - RNA, 21 nt, Artificial Sequence
  Synthetic
agacugcagccauucguuugg

SEQ ID NO: 21770 - RNA, 21 nt, Artificial Sequence
  Synthetic
gacugcagccauucguuuggu

SEQ ID NO: 21771 - RNA, 21 nt, Artificial Sequence
  Synthetic
acugcagccauucguuuggug

SEQ ID NO: 21772 - RNA, 21 nt, Artificial Sequence
  Synthetic
cugcagccauucguuugguga

SEQ ID NO: 21773 - RNA, 21 nt, Artificial Sequence
  Synthetic
ugcagccauucguuuggugau

SEQ ID NO: 21774 - RNA, 21 nt, Artificial Sequence
  Synthetic
gcagccauucguuuggugaug

SEQ ID NO: 21775 - RNA, 21 nt, Artificial Sequence
  Synthetic
cagccauucguuuggugauga

SEQ ID NO: 21776 - RNA, 21 nt, Artificial Sequence
  Synthetic
agccauucguuuggugaugau

SEQ ID NO: 21777 - RNA, 21 nt, Artificial Sequence
  Synthetic
gccauucguuuggugaugaug

SEQ ID NO: 21778 - RNA, 21 nt, Artificial Sequence
  Synthetic
ccauucguuuggugaugauga

SEQ ID NO: 21779 - RNA, 21 nt, Artificial Sequence
  Synthetic
cauucguuuggugaugaugag

SEQ ID NO: 21780 - RNA, 21 nt, Artificial Sequence
  Synthetic
auucguuuggugaugaugaga

SEQ ID NO: 21781 - RNA, 21 nt, Artificial Sequence
  Synthetic
uucguuuggugaugaugagaa

SEQ ID NO: 21782 - RNA, 21 nt, Artificial Sequence
  Synthetic
ucguuuggugaugaugagaaa

SEQ ID NO: 21783 - RNA, 21 nt, Artificial Sequence
  Synthetic
cguuuggugaugaugagaaac

SEQ ID NO: 21784 - RNA, 21 nt, Artificial Sequence
  Synthetic
guuuggugaugaugagaaaca

SEQ ID NO: 21785 - RNA, 21 nt, Artificial Sequence
  Synthetic
uuuggugaugaugagaaacag

SEQ ID NO: 21786 - RNA, 21 nt, Artificial Sequence
  Synthetic
uuggugaugaugagaaacagu

SEQ ID NO: 21787 - RNA, 21 nt, Artificial Sequence
  Synthetic
uggugaugaugagaaacagug

SEQ ID NO: 21788 - RNA, 21 nt, Artificial Sequence
  Synthetic
ggugaugaugagaaacagugg

SEQ ID NO: 21789 - RNA, 21 nt, Artificial Sequence
  Synthetic
gugaugaugagaaacaguggu

SEQ ID NO: 21790 - RNA, 21 nt, Artificial Sequence
  Synthetic
ugaugaugagaaacaguggug

SEQ ID NO: 21791 - RNA, 21 nt, Artificial Sequence
  Synthetic
gaugaugagaaacaguggugg

SEQ ID NO: 21792 - RNA, 21 nt, Artificial Sequence
  Synthetic
augaugagaaacaguggugga

SEQ ID NO: 21793 - RNA, 21 nt, Artificial Sequence
  Synthetic
ugaugagaaacagugguggac

SEQ ID NO: 21794 - RNA, 21 nt, Artificial Sequence
  Synthetic
gaugagaaacagugguggaca

SEQ ID NO: 21795 - RNA, 21 nt, Artificial Sequence
  Synthetic
augagaaacagugguggacau

SEQ ID NO: 21796 - RNA, 21 nt, Artificial Sequence
  Synthetic
ugagaaacagugguggacauu

SEQ ID NO: 21797 - RNA, 21 nt, Artificial Sequence
  Synthetic
gagaaacagugguggacauuu

SEQ ID NO: 21798 - RNA, 21 nt, Artificial Sequence
  Synthetic
agaaacagugguggacauuuc

SEQ ID NO: 21799 - RNA, 21 nt, Artificial Sequence
  Synthetic
gaaacagugguggacauuucc

SEQ ID NO: 21800 - RNA, 21 nt, Artificial Sequence
  Synthetic
aaacagugguggacauuuccu

SEQ ID NO: 21801 - RNA, 21 nt, Artificial Sequence
  Synthetic
aacagugguggacauuuccug

SEQ ID NO: 21802 - RNA, 21 nt, Artificial Sequence
  Synthetic
acagugguggacauuuccuga

SEQ ID NO: 21803 - RNA, 21 nt, Artificial Sequence
  Synthetic
cagugguggacauuuccugag

SEQ ID NO: 21804 - RNA, 21 nt, Artificial Sequence
  Synthetic
agugguggacauuuccugagg

SEQ ID NO: 21805 - RNA, 21 nt, Artificial Sequence
  Synthetic
gugguggacauuuccugagga

SEQ ID NO: 21806 - RNA, 21 nt, Artificial Sequence
  Synthetic
ugguggacauuuccugaggaa

SEQ ID NO: 21807 - RNA, 21 nt, Artificial Sequence
  Synthetic
gguggacauuuccugaggaag

SEQ ID NO: 21808 - RNA, 21 nt, Artificial Sequence
  Synthetic
guggacauuuccugaggaaga

SEQ ID NO: 21809 - RNA, 21 nt, Artificial Sequence
  Synthetic
uggacauuuccugaggaagag

SEQ ID NO: 21810 - RNA, 21 nt, Artificial Sequence
  Synthetic
ggacauuuccugaggaagagg

SEQ ID NO: 21811 - RNA, 21 nt, Artificial Sequence
  Synthetic
gacauuuccugaggaagaggu

SEQ ID NO: 21812 - RNA, 21 nt, Artificial Sequence
  Synthetic
acauuuccugaggaagaggug

SEQ ID NO: 21813 - RNA, 21 nt, Artificial Sequence
  Synthetic
cauuuccugaggaagaggugc

SEQ ID NO: 21814 - RNA, 21 nt, Artificial Sequence
  Synthetic
auuuccugaggaagaggugcu

SEQ ID NO: 21815 - RNA, 21 nt, Artificial Sequence
  Synthetic
uuuccugaggaagaggugcua

SEQ ID NO: 21816 - RNA, 21 nt, Artificial Sequence
  Synthetic
uuccugaggaagaggugcuac

SEQ ID NO: 21817 - RNA, 21 nt, Artificial Sequence
  Synthetic
uccugaggaagaggugcuaca

SEQ ID NO: 21818 - RNA, 21 nt, Artificial Sequence
  Synthetic
ccugaggaagaggugcuacag

SEQ ID NO: 21819 - RNA, 21 nt, Artificial Sequence
  Synthetic
cugaggaagaggugcuacagu

SEQ ID NO: 21820 - RNA, 21 nt, Artificial Sequence
  Synthetic
ugaggaagaggugcuacaguu

SEQ ID NO: 21821 - RNA, 21 nt, Artificial Sequence
  Synthetic
gaggaagaggugcuacaguuc

SEQ ID NO: 21822 - RNA, 21 nt, Artificial Sequence
  Synthetic
aggaagaggugcuacaguucu

SEQ ID NO: 21823 - RNA, 21 nt, Artificial Sequence
  Synthetic
ggaagaggugcuacaguucug

SEQ ID NO: 21824 - RNA, 21 nt, Artificial Sequence
  Synthetic
gaagaggugcuacaguucugc

SEQ ID NO: 21825 - RNA, 21 nt, Artificial Sequence
  Synthetic
aagaggugcuacaguucugcc

SEQ ID NO: 21826 - RNA, 21 nt, Artificial Sequence
  Synthetic
agaggugcuacaguucugcca

SEQ ID NO: 21827 - RNA, 21 nt, Artificial Sequence
  Synthetic
gaggugcuacaguucugccag

SEQ ID NO: 21828 - RNA, 21 nt, Artificial Sequence
  Synthetic
aggugcuacaguucugccaga

SEQ ID NO: 21829 - RNA, 21 nt, Artificial Sequence
  Synthetic
ggugcuacaguucugccagag

SEQ ID NO: 21830 - RNA, 21 nt, Artificial Sequence
  Synthetic
gugcuacaguucugccagaga

SEQ ID NO: 21831 - RNA, 21 nt, Artificial Sequence
  Synthetic
ugcuacaguucugccagagau

SEQ ID NO: 21832 - RNA, 21 nt, Artificial Sequence
  Synthetic
gcuacaguucugccagagauc

SEQ ID NO: 21833 - RNA, 21 nt, Artificial Sequence
  Synthetic
cuacaguucugccagagauca

SEQ ID NO: 21834 - RNA, 21 nt, Artificial Sequence
  Synthetic
uacaguucugccagagaucag

SEQ ID NO: 21835 - RNA, 21 nt, Artificial Sequence
  Synthetic
acaguucugccagagaucagu

SEQ ID NO: 21836 - RNA, 21 nt, Artificial Sequence
  Synthetic
caguucugccagagaucaguu

SEQ ID NO: 21837 - RNA, 21 nt, Artificial Sequence
  Synthetic
aguucugccagagaucaguug

SEQ ID NO: 21838 - RNA, 21 nt, Artificial Sequence
  Synthetic
guucugccagagaucaguugc

SEQ ID NO: 21839 - RNA, 21 nt, Artificial Sequence
  Synthetic
uucugccagagaucaguugcg

SEQ ID NO: 21840 - RNA, 21 nt, Artificial Sequence
  Synthetic
ucugccagagaucaguugcgu

SEQ ID NO: 21841 - RNA, 21 nt, Artificial Sequence
  Synthetic
cugccagagaucaguugcgug

SEQ ID NO: 21842 - RNA, 21 nt, Artificial Sequence
  Synthetic
ugccagagaucaguugcgugu

SEQ ID NO: 21843 - RNA, 21 nt, Artificial Sequence
  Synthetic
gccagagaucaguugcguguc

SEQ ID NO: 21844 - RNA, 21 nt, Artificial Sequence
  Synthetic
ccagagaucaguugcgugucc

SEQ ID NO: 21845 - RNA, 21 nt, Artificial Sequence
  Synthetic
cagagaucaguugcgugucca

SEQ ID NO: 21846 - RNA, 21 nt, Artificial Sequence
  Synthetic
agagaucaguugcguguccau

SEQ ID NO: 21847 - RNA, 21 nt, Artificial Sequence
  Synthetic
gagaucaguugcguguccauu

SEQ ID NO: 21848 - RNA, 21 nt, Artificial Sequence
  Synthetic
agaucaguugcguguccauug

SEQ ID NO: 21849 - RNA, 21 nt, Artificial Sequence
  Synthetic
gaucaguugcguguccauugc

SEQ ID NO: 21850 - RNA, 21 nt, Artificial Sequence
  Synthetic
aucaguugcguguccauugcc

SEQ ID NO: 21851 - RNA, 21 nt, Artificial Sequence
  Synthetic
ucaguugcguguccauugccc

SEQ ID NO: 21852 - RNA, 21 nt, Artificial Sequence
  Synthetic
caguugcguguccauugccca

SEQ ID NO: 21853 - RNA, 21 nt, Artificial Sequence
  Synthetic
aguugcguguccauugcccac

SEQ ID NO: 21854 - RNA, 21 nt, Artificial Sequence
  Synthetic
guugcguguccauugcccacg

SEQ ID NO: 21855 - RNA, 21 nt, Artificial Sequence
  Synthetic
uugcguguccauugcccacga

SEQ ID NO: 21856 - RNA, 21 nt, Artificial Sequence
  Synthetic
ugcguguccauugcccacgau

SEQ ID NO: 21857 - RNA, 21 nt, Artificial Sequence
  Synthetic
gcguguccauugcccacgauc

SEQ ID NO: 21858 - RNA, 21 nt, Artificial Sequence
  Synthetic
cguguccauugcccacgaucc

SEQ ID NO: 21859 - RNA, 21 nt, Artificial Sequence
  Synthetic
guguccauugcccacgaucca

SEQ ID NO: 21860 - RNA, 21 nt, Artificial Sequence
  Synthetic
uguccauugcccacgauccau

SEQ ID NO: 21861 - RNA, 21 nt, Artificial Sequence
  Synthetic
guccauugcccacgauccauu

SEQ ID NO: 21862 - RNA, 21 nt, Artificial Sequence
  Synthetic
uccauugcccacgauccauug

SEQ ID NO: 21863 - RNA, 21 nt, Artificial Sequence
  Synthetic
ccauugcccacgauccauugg

SEQ ID NO: 21864 - RNA, 21 nt, Artificial Sequence
  Synthetic
cauugcccacgauccauuggc

SEQ ID NO: 21865 - RNA, 21 nt, Artificial Sequence
  Synthetic
auugcccacgauccauuggcu

SEQ ID NO: 21866 - RNA, 21 nt, Artificial Sequence
  Synthetic
uugcccacgauccauuggcug

SEQ ID NO: 21867 - RNA, 21 nt, Artificial Sequence
  Synthetic
ugcccacgauccauuggcuga

SEQ ID NO: 21868 - RNA, 21 nt, Artificial Sequence
  Synthetic
gcccacgauccauuggcugac

SEQ ID NO: 21869 - RNA, 21 nt, Artificial Sequence
  Synthetic
cccacgauccauuggcugacg

SEQ ID NO: 21870 - RNA, 21 nt, Artificial Sequence
  Synthetic
ccacgauccauuggcugacga

SEQ ID NO: 21871 - RNA, 21 nt, Artificial Sequence
  Synthetic
cacgauccauuggcugacgau

SEQ ID NO: 21872 - RNA, 21 nt, Artificial Sequence
  Synthetic
acgauccauuggcugacgauc

SEQ ID NO: 21873 - RNA, 21 nt, Artificial Sequence
  Synthetic
cgauccauuggcugacgaucg

SEQ ID NO: 21874 - RNA, 21 nt, Artificial Sequence
  Synthetic
gauccauuggcugacgaucgu

SEQ ID NO: 21875 - RNA, 21 nt, Artificial Sequence
  Synthetic
auccauuggcugacgaucgug

SEQ ID NO: 21876 - RNA, 21 nt, Artificial Sequence
  Synthetic
uccauuggcugacgaucgugg

SEQ ID NO: 21877 - RNA, 21 nt, Artificial Sequence
  Synthetic
ccauuggcugacgaucgugga

SEQ ID NO: 21878 - RNA, 21 nt, Artificial Sequence
  Synthetic
cauuggcugacgaucguggag

SEQ ID NO: 21879 - RNA, 21 nt, Artificial Sequence
  Synthetic
auuggcugacgaucguggaga

SEQ ID NO: 21880 - RNA, 21 nt, Artificial Sequence
  Synthetic
uuggcugacgaucguggagac

SEQ ID NO: 21881 - RNA, 21 nt, Artificial Sequence
  Synthetic
uggcugacgaucguggagacg

SEQ ID NO: 21882 - RNA, 21 nt, Artificial Sequence
  Synthetic
ggcugacgaucguggagacga

SEQ ID NO: 21883 - RNA, 21 nt, Artificial Sequence
  Synthetic
gcugacgaucguggagacgaa

SEQ ID NO: 21884 - RNA, 21 nt, Artificial Sequence
  Synthetic
cugacgaucguggagacgaac

SEQ ID NO: 21885 - RNA, 21 nt, Artificial Sequence
  Synthetic
ugacgaucguggagacgaaca

SEQ ID NO: 21886 - RNA, 21 nt, Artificial Sequence
  Synthetic
gacgaucguggagacgaacag

SEQ ID NO: 21887 - RNA, 21 nt, Artificial Sequence
  Synthetic
acgaucguggagacgaacagc

SEQ ID NO: 21888 - RNA, 21 nt, Artificial Sequence
  Synthetic
cgaucguggagacgaacagca

SEQ ID NO: 21889 - RNA, 21 nt, Artificial Sequence
  Synthetic
gaucguggagacgaacagcag

SEQ ID NO: 21890 - RNA, 21 nt, Artificial Sequence
  Synthetic
aucguggagacgaacagcagc

SEQ ID NO: 21891 - RNA, 21 nt, Artificial Sequence
  Synthetic
ucguggagacgaacagcagca

SEQ ID NO: 21892 - RNA, 21 nt, Artificial Sequence
  Synthetic
cguggagacgaacagcagcac

SEQ ID NO: 21893 - RNA, 21 nt, Artificial Sequence
  Synthetic
guggagacgaacagcagcacc

SEQ ID NO: 21894 - RNA, 21 nt, Artificial Sequence
  Synthetic
uggagacgaacagcagcacca

SEQ ID NO: 21895 - RNA, 21 nt, Artificial Sequence
  Synthetic
ggagacgaacagcagcaccag

SEQ ID NO: 21896 - RNA, 21 nt, Artificial Sequence
  Synthetic
gagacgaacagcagcaccagc

SEQ ID NO: 21897 - RNA, 21 nt, Artificial Sequence
  Synthetic
agacgaacagcagcaccagca

SEQ ID NO: 21898 - RNA, 21 nt, Artificial Sequence
  Synthetic
gacgaacagcagcaccagcac

SEQ ID NO: 21899 - RNA, 21 nt, Artificial Sequence
  Synthetic
acgaacagcagcaccagcacc

SEQ ID NO: 21900 - RNA, 21 nt, Artificial Sequence
  Synthetic
cgaacagcagcaccagcaccg

SEQ ID NO: 21901 - RNA, 21 nt, Artificial Sequence
  Synthetic
gaacagcagcaccagcaccgc

SEQ ID NO: 21902 - RNA, 21 nt, Artificial Sequence
  Synthetic
aacagcagcaccagcaccgcg

SEQ ID NO: 21903 - RNA, 21 nt, Artificial Sequence
  Synthetic
acagcagcaccagcaccgcga

SEQ ID NO: 21904 - RNA, 21 nt, Artificial Sequence
  Synthetic
cagcagcaccagcaccgcgac

SEQ ID NO: 21905 - RNA, 21 nt, Artificial Sequence
  Synthetic
agcagcaccagcaccgcgacg

SEQ ID NO: 21906 - RNA, 21 nt, Artificial Sequence
  Synthetic
gcagcaccagcaccgcgacgu

SEQ ID NO: 21907 - RNA, 21 nt, Artificial Sequence
  Synthetic
cagcaccagcaccgcgacgug

SEQ ID NO: 21908 - RNA, 21 nt, Artificial Sequence
  Synthetic
agcaccagcaccgcgacgugg

SEQ ID NO: 21909 - RNA, 21 nt, Artificial Sequence
  Synthetic
gcaccagcaccgcgacgugga

SEQ ID NO: 21910 - RNA, 21 nt, Artificial Sequence
  Synthetic
caccagcaccgcgacguggag

SEQ ID NO: 21911 - RNA, 21 nt, Artificial Sequence
  Synthetic
accagcaccgcgacguggagg

SEQ ID NO: 21912 - RNA, 21 nt, Artificial Sequence
  Synthetic
ccagcaccgcgacguggagga

SEQ ID NO: 21913 - RNA, 21 nt, Artificial Sequence
  Synthetic
cagcaccgcgacguggaggac

SEQ ID NO: 21914 - RNA, 21 nt, Artificial Sequence
  Synthetic
agcaccgcgacguggaggacg

SEQ ID NO: 21915 - RNA, 21 nt, Artificial Sequence
  Synthetic
gcaccgcgacguggaggacga

SEQ ID NO: 21916 - RNA, 21 nt, Artificial Sequence
  Synthetic
caccgcgacguggaggacgau

SEQ ID NO: 21917 - RNA, 21 nt, Artificial Sequence
  Synthetic
accgcgacguggaggacgaug

SEQ ID NO: 21918 - RNA, 21 nt, Artificial Sequence
  Synthetic
ccgcgacguggaggacgauga

SEQ ID NO: 21919 - RNA, 21 nt, Artificial Sequence
  Synthetic
cgcgacguggaggacgaugau

SEQ ID NO: 21920 - RNA, 21 nt, Artificial Sequence
  Synthetic
gcgacguggaggacgaugaua

SEQ ID NO: 21921 - RNA, 21 nt, Artificial Sequence
  Synthetic
cgacguggaggacgaugauac

SEQ ID NO: 21922 - RNA, 21 nt, Artificial Sequence
  Synthetic
gacguggaggacgaugauacu

SEQ ID NO: 21923 - RNA, 21 nt, Artificial Sequence
  Synthetic
acguggaggacgaugauacuc

SEQ ID NO: 21924 - RNA, 21 nt, Artificial Sequence
  Synthetic
cguggaggacgaugauacuca

SEQ ID NO: 21925 - RNA, 21 nt, Artificial Sequence
  Synthetic
guggaggacgaugauacucag

SEQ ID NO: 21926 - RNA, 21 nt, Artificial Sequence
  Synthetic
uggaggacgaugauacucagc

SEQ ID NO: 21927 - RNA, 21 nt, Artificial Sequence
  Synthetic
ggaggacgaugauacucagca

SEQ ID NO: 21928 - RNA, 21 nt, Artificial Sequence
  Synthetic
gaggacgaugauacucagcaa

SEQ ID NO: 21929 - RNA, 21 nt, Artificial Sequence
  Synthetic
aggacgaugauacucagcaac

SEQ ID NO: 21930 - RNA, 21 nt, Artificial Sequence
  Synthetic
ggacgaugauacucagcaaca

SEQ ID NO: 21931 - RNA, 21 nt, Artificial Sequence
  Synthetic
gacgaugauacucagcaacag

SEQ ID NO: 21932 - RNA, 21 nt, Artificial Sequence
  Synthetic
acgaugauacucagcaacagg

SEQ ID NO: 21933 - RNA, 21 nt, Artificial Sequence
  Synthetic
cgaugauacucagcaacagga

SEQ ID NO: 21934 - RNA, 21 nt, Artificial Sequence
  Synthetic
gaugauacucagcaacaggag

SEQ ID NO: 21935 - RNA, 21 nt, Artificial Sequence
  Synthetic
augauacucagcaacaggagg

SEQ ID NO: 21936 - RNA, 21 nt, Artificial Sequence
  Synthetic
ugauacucagcaacaggagga

SEQ ID NO: 21937 - RNA, 21 nt, Artificial Sequence
  Synthetic
gauacucagcaacaggaggag

SEQ ID NO: 21938 - RNA, 21 nt, Artificial Sequence
  Synthetic
auacucagcaacaggaggagc

SEQ ID NO: 21939 - RNA, 21 nt, Artificial Sequence
  Synthetic
uacucagcaacaggaggagca

SEQ ID NO: 21940 - RNA, 21 nt, Artificial Sequence
  Synthetic
acucagcaacaggaggagcau

SEQ ID NO: 21941 - RNA, 21 nt, Artificial Sequence
  Synthetic
cucagcaacaggaggagcauu

SEQ ID NO: 21942 - RNA, 21 nt, Artificial Sequence
  Synthetic
ucagcaacaggaggagcauuc

SEQ ID NO: 21943 - RNA, 21 nt, Artificial Sequence
  Synthetic
cagcaacaggaggagcauucu

SEQ ID NO: 21944 - RNA, 21 nt, Artificial Sequence
  Synthetic
agcaacaggaggagcauucug

SEQ ID NO: 21945 - RNA, 21 nt, Artificial Sequence
  Synthetic
gcaacaggaggagcauucugg

SEQ ID NO: 21946 - RNA, 21 nt, Artificial Sequence
  Synthetic
caacaggaggagcauucuggc

SEQ ID NO: 21947 - RNA, 21 nt, Artificial Sequence
  Synthetic
aacaggaggagcauucuggcg

SEQ ID NO: 21948 - RNA, 21 nt, Artificial Sequence
  Synthetic
acaggaggagcauucuggcgg

SEQ ID NO: 21949 - RNA, 21 nt, Artificial Sequence
  Synthetic
caggaggagcauucuggcggc

SEQ ID NO: 21950 - RNA, 21 nt, Artificial Sequence
  Synthetic
aggaggagcauucuggcggca

SEQ ID NO: 21951 - RNA, 21 nt, Artificial Sequence
  Synthetic
ggaggagcauucuggcggcaa

SEQ ID NO: 21952 - RNA, 21 nt, Artificial Sequence
  Synthetic
gaggagcauucuggcggcaag

SEQ ID NO: 21953 - RNA, 21 nt, Artificial Sequence
  Synthetic
aggagcauucuggcggcaagu

SEQ ID NO: 21954 - RNA, 21 nt, Artificial Sequence
  Synthetic
ggagcauucuggcggcaaguu

SEQ ID NO: 21955 - RNA, 21 nt, Artificial Sequence
  Synthetic
gagcauucuggcggcaaguuc

SEQ ID NO: 21956 - RNA, 21 nt, Artificial Sequence
  Synthetic
agcauucuggcggcaaguucu

SEQ ID NO: 21957 - RNA, 21 nt, Artificial Sequence
  Synthetic
gcauucuggcggcaaguucug

SEQ ID NO: 21958 - RNA, 21 nt, Artificial Sequence
  Synthetic
cauucuggcggcaaguucugc

SEQ ID NO: 21959 - RNA, 21 nt, Artificial Sequence
  Synthetic
auucuggcggcaaguucugcu

SEQ ID NO: 21960 - RNA, 21 nt, Artificial Sequence
  Synthetic
uucuggcggcaaguucugcuc

SEQ ID NO: 21961 - RNA, 21 nt, Artificial Sequence
  Synthetic
ucuggcggcaaguucugcuca

SEQ ID NO: 21962 - RNA, 21 nt, Artificial Sequence
  Synthetic
cuggcggcaaguucugcucag

SEQ ID NO: 21963 - RNA, 21 nt, Artificial Sequence
  Synthetic
uggcggcaaguucugcucagc

SEQ ID NO: 21964 - RNA, 21 nt, Artificial Sequence
  Synthetic
ggcggcaaguucugcucagcg

SEQ ID NO: 21965 - RNA, 21 nt, Artificial Sequence
  Synthetic
gcggcaaguucugcucagcgg

SEQ ID NO: 21966 - RNA, 21 nt, Artificial Sequence
  Synthetic
cggcaaguucugcucagcgga

SEQ ID NO: 21967 - RNA, 21 nt, Artificial Sequence
  Synthetic
ggcaaguucugcucagcggag

SEQ ID NO: 21968 - RNA, 21 nt, Artificial Sequence
  Synthetic
gcaaguucugcucagcggagu

SEQ ID NO: 21969 - RNA, 21 nt, Artificial Sequence
  Synthetic
caaguucugcucagcggaguu

SEQ ID NO: 21970 - RNA, 21 nt, Artificial Sequence
  Synthetic
aaguucugcucagcggaguuu

SEQ ID NO: 21971 - RNA, 21 nt, Artificial Sequence
  Synthetic
aguucugcucagcggaguuuc

SEQ ID NO: 21972 - RNA, 21 nt, Artificial Sequence
  Synthetic
guucugcucagcggaguuucu

SEQ ID NO: 21973 - RNA, 21 nt, Artificial Sequence
  Synthetic
uucugcucagcggaguuucug

SEQ ID NO: 21974 - RNA, 21 nt, Artificial Sequence
  Synthetic
ucugcucagcggaguuucugc

SEQ ID NO: 21975 - RNA, 21 nt, Artificial Sequence
  Synthetic
cugcucagcggaguuucugca

SEQ ID NO: 21976 - RNA, 21 nt, Artificial Sequence
  Synthetic
ugcucagcggaguuucugcag

SEQ ID NO: 21977 - RNA, 21 nt, Artificial Sequence
  Synthetic
gcucagcggaguuucugcagc

SEQ ID NO: 21978 - RNA, 21 nt, Artificial Sequence
  Synthetic
cucagcggaguuucugcagcc

SEQ ID NO: 21979 - RNA, 21 nt, Artificial Sequence
  Synthetic
ucagcggaguuucugcagccc

SEQ ID NO: 21980 - RNA, 21 nt, Artificial Sequence
  Synthetic
cagcggaguuucugcagccca

SEQ ID NO: 21981 - RNA, 21 nt, Artificial Sequence
  Synthetic
agcggaguuucugcagcccaa

SEQ ID NO: 21982 - RNA, 21 nt, Artificial Sequence
  Synthetic
gcggaguuucugcagcccaaa

SEQ ID NO: 21983 - RNA, 21 nt, Artificial Sequence
  Synthetic
cggaguuucugcagcccaaag

SEQ ID NO: 21984 - RNA, 21 nt, Artificial Sequence
  Synthetic
ggaguuucugcagcccaaagg

SEQ ID NO: 21985 - RNA, 21 nt, Artificial Sequence
  Synthetic
gaguuucugcagcccaaagga

SEQ ID NO: 21986 - RNA, 21 nt, Artificial Sequence
  Synthetic
aguuucugcagcccaaaggaa

SEQ ID NO: 21987 - RNA, 21 nt, Artificial Sequence
  Synthetic
guuucugcagcccaaaggaac

SEQ ID NO: 21988 - RNA, 21 nt, Artificial Sequence
  Synthetic
uuucugcagcccaaaggaaca

SEQ ID NO: 21989 - RNA, 21 nt, Artificial Sequence
  Synthetic
uucugcagcccaaaggaacag

SEQ ID NO: 21990 - RNA, 21 nt, Artificial Sequence
  Synthetic
ucugcagcccaaaggaacagc

SEQ ID NO: 21991 - RNA, 21 nt, Artificial Sequence
  Synthetic
cugcagcccaaaggaacagcu

SEQ ID NO: 21992 - RNA, 21 nt, Artificial Sequence
  Synthetic
ugcagcccaaaggaacagcug

SEQ ID NO: 21993 - RNA, 21 nt, Artificial Sequence
  Synthetic
gcagcccaaaggaacagcugu

SEQ ID NO: 21994 - RNA, 21 nt, Artificial Sequence
  Synthetic
cagcccaaaggaacagcuguc

SEQ ID NO: 21995 - RNA, 21 nt, Artificial Sequence
  Synthetic
agcccaaaggaacagcugucc

SEQ ID NO: 21996 - RNA, 21 nt, Artificial Sequence
  Synthetic
gcccaaaggaacagcuguccc

SEQ ID NO: 21997 - RNA, 21 nt, Artificial Sequence
  Synthetic
cccaaaggaacagcugucccg

SEQ ID NO: 21998 - RNA, 21 nt, Artificial Sequence
  Synthetic
ccaaaggaacagcugucccga

SEQ ID NO: 21999 - RNA, 21 nt, Artificial Sequence
  Synthetic
caaaggaacagcugucccgau

SEQ ID NO: 22000 - RNA, 21 nt, Artificial Sequence
  Synthetic
aaaggaacagcugucccgauc

SEQ ID NO: 22001 - RNA, 21 nt, Artificial Sequence
  Synthetic
aaggaacagcugucccgaucc

SEQ ID NO: 22002 - RNA, 21 nt, Artificial Sequence
  Synthetic
aggaacagcugucccgauccu

SEQ ID NO: 22003 - RNA, 21 nt, Artificial Sequence
  Synthetic
ggaacagcugucccgauccuc

SEQ ID NO: 22004 - RNA, 21 nt, Artificial Sequence
  Synthetic
gaacagcugucccgauccuca

SEQ ID NO: 22005 - RNA, 21 nt, Artificial Sequence
  Synthetic
aacagcugucccgauccucag

SEQ ID NO: 22006 - RNA, 21 nt, Artificial Sequence
  Synthetic
acagcugucccgauccucagg

SEQ ID NO: 22007 - RNA, 21 nt, Artificial Sequence
  Synthetic
cagcugucccgauccucaggg

SEQ ID NO: 22008 - RNA, 21 nt, Artificial Sequence
  Synthetic
agcugucccgauccucagggu

SEQ ID NO: 22009 - RNA, 21 nt, Artificial Sequence
  Synthetic
gcugucccgauccucagggug

SEQ ID NO: 22010 - RNA, 21 nt, Artificial Sequence
  Synthetic
cugucccgauccucagggugg

SEQ ID NO: 22011 - RNA, 21 nt, Artificial Sequence
  Synthetic
ugucccgauccucaggguggc

SEQ ID NO: 22012 - RNA, 21 nt, Artificial Sequence
  Synthetic
gucccgauccucaggguggcc

SEQ ID NO: 22013 - RNA, 21 nt, Artificial Sequence
  Synthetic
ucccgauccucaggguggccu

SEQ ID NO: 22014 - RNA, 21 nt, Artificial Sequence
  Synthetic
cccgauccucaggguggccuc

SEQ ID NO: 22015 - RNA, 21 nt, Artificial Sequence
  Synthetic
ccgauccucaggguggccuca

SEQ ID NO: 22016 - RNA, 21 nt, Artificial Sequence
  Synthetic
cgauccucaggguggccucaa

SEQ ID NO: 22017 - RNA, 21 nt, Artificial Sequence
  Synthetic
gauccucaggguggccucaaa

SEQ ID NO: 22018 - RNA, 21 nt, Artificial Sequence
  Synthetic
auccucaggguggccucaaac

SEQ ID NO: 22019 - RNA, 21 nt, Artificial Sequence
  Synthetic
uccucaggguggccucaaaca

SEQ ID NO: 22020 - RNA, 21 nt, Artificial Sequence
  Synthetic
ccucaggguggccucaaacac

SEQ ID NO: 22021 - RNA, 21 nt, Artificial Sequence
  Synthetic
cucaggguggccucaaacaca

SEQ ID NO: 22022 - RNA, 21 nt, Artificial Sequence
  Synthetic
ucaggguggccucaaacacaa

SEQ ID NO: 22023 - RNA, 21 nt, Artificial Sequence
  Synthetic
caggguggccucaaacacaaa

SEQ ID NO: 22024 - RNA, 21 nt, Artificial Sequence
  Synthetic
aggguggccucaaacacaaac

SEQ ID NO: 22025 - RNA, 21 nt, Artificial Sequence
  Synthetic
ggguggccucaaacacaaacu

SEQ ID NO: 22026 - RNA, 21 nt, Artificial Sequence
  Synthetic
gguggccucaaacacaaacuc

SEQ ID NO: 22027 - RNA, 21 nt, Artificial Sequence
  Synthetic
guggccucaaacacaaacucg

SEQ ID NO: 22028 - RNA, 21 nt, Artificial Sequence
  Synthetic
uggccucaaacacaaacucgg

SEQ ID NO: 22029 - RNA, 21 nt, Artificial Sequence
  Synthetic
ggccucaaacacaaacucggg

SEQ ID NO: 22030 - RNA, 21 nt, Artificial Sequence
  Synthetic
gccucaaacacaaacucgggu

SEQ ID NO: 22031 - RNA, 21 nt, Artificial Sequence
  Synthetic
ccucaaacacaaacucgggug

SEQ ID NO: 22032 - RNA, 21 nt, Artificial Sequence
  Synthetic
cucaaacacaaacucgggugc

SEQ ID NO: 22033 - RNA, 21 nt, Artificial Sequence
  Synthetic
ucaaacacaaacucgggugcg

SEQ ID NO: 22034 - RNA, 21 nt, Artificial Sequence
  Synthetic
caaacacaaacucgggugcgu

SEQ ID NO: 22035 - RNA, 21 nt, Artificial Sequence
  Synthetic
aaacacaaacucgggugcguu

SEQ ID NO: 22036 - RNA, 21 nt, Artificial Sequence
  Synthetic
aacacaaacucgggugcguug

SEQ ID NO: 22037 - RNA, 21 nt, Artificial Sequence
  Synthetic
acacaaacucgggugcguugg

SEQ ID NO: 22038 - RNA, 21 nt, Artificial Sequence
  Synthetic
cacaaacucgggugcguuggc

SEQ ID NO: 22039 - RNA, 21 nt, Artificial Sequence
  Synthetic
acaaacucgggugcguuggcu

SEQ ID NO: 22040 - RNA, 21 nt, Artificial Sequence
  Synthetic
caaacucgggugcguuggcuc

SEQ ID NO: 22041 - RNA, 21 nt, Artificial Sequence
  Synthetic
aaacucgggugcguuggcucc

SEQ ID NO: 22042 - RNA, 21 nt, Artificial Sequence
  Synthetic
aacucgggugcguuggcuccg

SEQ ID NO: 22043 - RNA, 21 nt, Artificial Sequence
  Synthetic
acucgggugcguuggcuccgc

SEQ ID NO: 22044 - RNA, 21 nt, Artificial Sequence
  Synthetic
cucgggugcguuggcuccgcu

SEQ ID NO: 22045 - RNA, 21 nt, Artificial Sequence
  Synthetic
ucgggugcguuggcuccgcug

SEQ ID NO: 22046 - RNA, 21 nt, Artificial Sequence
  Synthetic
cgggugcguuggcuccgcugc

SEQ ID NO: 22047 - RNA, 21 nt, Artificial Sequence
  Synthetic
gggugcguuggcuccgcugcu

SEQ ID NO: 22048 - RNA, 21 nt, Artificial Sequence
  Synthetic
ggugcguuggcuccgcugcug

SEQ ID NO: 22049 - RNA, 21 nt, Artificial Sequence
  Synthetic
gugcguuggcuccgcugcugg

SEQ ID NO: 22050 - RNA, 21 nt, Artificial Sequence
  Synthetic
ugcguuggcuccgcugcuggc

SEQ ID NO: 22051 - RNA, 21 nt, Artificial Sequence
  Synthetic
gcguuggcuccgcugcuggcg

SEQ ID NO: 22052 - RNA, 21 nt, Artificial Sequence
  Synthetic
cguuggcuccgcugcuggcgc

SEQ ID NO: 22053 - RNA, 21 nt, Artificial Sequence
  Synthetic
guuggcuccgcugcuggcgcc

SEQ ID NO: 22054 - RNA, 21 nt, Artificial Sequence
  Synthetic
uuggcuccgcugcuggcgccg

SEQ ID NO: 22055 - RNA, 21 nt, Artificial Sequence
  Synthetic
uggcuccgcugcuggcgccgc

SEQ ID NO: 22056 - RNA, 21 nt, Artificial Sequence
  Synthetic
ggcuccgcugcuggcgccgcc

SEQ ID NO: 22057 - RNA, 21 nt, Artificial Sequence
  Synthetic
gcuccgcugcuggcgccgcca

SEQ ID NO: 22058 - RNA, 21 nt, Artificial Sequence
  Synthetic
cuccgcugcuggcgccgccaa

SEQ ID NO: 22059 - RNA, 21 nt, Artificial Sequence
  Synthetic
uccgcugcuggcgccgccaaa

SEQ ID NO: 22060 - RNA, 21 nt, Artificial Sequence
  Synthetic
ccgcugcuggcgccgccaaag

SEQ ID NO: 22061 - RNA, 21 nt, Artificial Sequence
  Synthetic
cgcugcuggcgccgccaaagc

SEQ ID NO: 22062 - RNA, 21 nt, Artificial Sequence
  Synthetic
gcugcuggcgccgccaaagcu

SEQ ID NO: 22063 - RNA, 21 nt, Artificial Sequence
  Synthetic
cugcuggcgccgccaaagcug

SEQ ID NO: 22064 - RNA, 21 nt, Artificial Sequence
  Synthetic
ugcuggcgccgccaaagcugc

SEQ ID NO: 22065 - RNA, 21 nt, Artificial Sequence
  Synthetic
gcuggcgccgccaaagcugcg

SEQ ID NO: 22066 - RNA, 21 nt, Artificial Sequence
  Synthetic
cuggcgccgccaaagcugcgc

SEQ ID NO: 22067 - RNA, 21 nt, Artificial Sequence
  Synthetic
uggcgccgccaaagcugcgcu

SEQ ID NO: 22068 - RNA, 21 nt, Artificial Sequence
  Synthetic
ggcgccgccaaagcugcgcug

SEQ ID NO: 22069 - RNA, 21 nt, Artificial Sequence
  Synthetic
gcgccgccaaagcugcgcugc

SEQ ID NO: 22070 - RNA, 21 nt, Artificial Sequence
  Synthetic
cgccgccaaagcugcgcugcg

SEQ ID NO: 22071 - RNA, 21 nt, Artificial Sequence
  Synthetic
gccgccaaagcugcgcugcgg

SEQ ID NO: 22072 - RNA, 21 nt, Artificial Sequence
  Synthetic
ccgccaaagcugcgcugcggg

SEQ ID NO: 22073 - RNA, 21 nt, Artificial Sequence
  Synthetic
cgccaaagcugcgcugcgggg

SEQ ID NO: 22074 - RNA, 21 nt, Artificial Sequence
  Synthetic
gccaaagcugcgcugcggggc

SEQ ID NO: 22075 - RNA, 21 nt, Artificial Sequence
  Synthetic
ccaaagcugcgcugcggggcu

SEQ ID NO: 22076 - RNA, 21 nt, Artificial Sequence
  Synthetic
caaagcugcgcugcggggcug

SEQ ID NO: 22077 - RNA, 21 nt, Artificial Sequence
  Synthetic
aaagcugcgcugcggggcugc

SEQ ID NO: 22078 - RNA, 21 nt, Artificial Sequence
  Synthetic
aagcugcgcugcggggcugcg

SEQ ID NO: 22079 - RNA, 21 nt, Artificial Sequence
  Synthetic
agcugcgcugcggggcugcgc

SEQ ID NO: 22080 - RNA, 21 nt, Artificial Sequence
  Synthetic
gcugcgcugcggggcugcgcg

SEQ ID NO: 22081 - RNA, 21 nt, Artificial Sequence
  Synthetic
cugcgcugcggggcugcgcgc

SEQ ID NO: 22082 - RNA, 21 nt, Artificial Sequence
  Synthetic
ugcgcugcggggcugcgcgcg

SEQ ID NO: 22083 - RNA, 21 nt, Artificial Sequence
  Synthetic
gcgcugcggggcugcgcgcgc

SEQ ID NO: 22084 - RNA, 21 nt, Artificial Sequence
  Synthetic
cgcugcggggcugcgcgcgcg

SEQ ID NO: 22085 - RNA, 21 nt, Artificial Sequence
  Synthetic
gcugcggggcugcgcgcgcgc

SEQ ID NO: 22086 - RNA, 21 nt, Artificial Sequence
  Synthetic
cugcggggcugcgcgcgcgcg

SEQ ID NO: 22087 - RNA, 21 nt, Artificial Sequence
  Synthetic
ugcggggcugcgcgcgcgcga

SEQ ID NO: 22088 - RNA, 21 nt, Artificial Sequence
  Synthetic
gcggggcugcgcgcgcgcgaa

SEQ ID NO: 22089 - RNA, 21 nt, Artificial Sequence
  Synthetic
cggggcugcgcgcgcgcgaag

SEQ ID NO: 22090 - RNA, 21 nt, Artificial Sequence
  Synthetic
ggggcugcgcgcgcgcgaagc

SEQ ID NO: 22091 - RNA, 21 nt, Artificial Sequence
  Synthetic
gggcugcgcgcgcgcgaagca

SEQ ID NO: 22092 - RNA, 21 nt, Artificial Sequence
  Synthetic
ggcugcgcgcgcgcgaagcaa

SEQ ID NO: 22093 - RNA, 21 nt, Artificial Sequence
  Synthetic
gcugcgcgcgcgcgaagcaag

SEQ ID NO: 22094 - RNA, 21 nt, Artificial Sequence
  Synthetic
cugcgcgcgcgcgaagcaagg

SEQ ID NO: 22095 - RNA, 21 nt, Artificial Sequence
  Synthetic
ugcgcgcgcgcgaagcaaggg

SEQ ID NO: 22096 - RNA, 21 nt, Artificial Sequence
  Synthetic
gcgcgcgcgcgaagcaagggg

SEQ ID NO: 22097 - RNA, 21 nt, Artificial Sequence
  Synthetic
cgcgcgcgcgaagcaaggggg

SEQ ID NO: 22098 - RNA, 21 nt, Artificial Sequence
  Synthetic
gcgcgcgcgaagcaagggggc

SEQ ID NO: 22099 - RNA, 22 nt, Artificial Sequence
  Synthetic
gucacccccaggcuggagugca

SEQ ID NO: 22100 - RNA, 22 nt, Artificial Sequence
  Synthetic
ucacccccaggcuggagugcag

SEQ ID NO: 22101 - RNA, 22 nt, Artificial Sequence
  Synthetic
cacccccaggcuggagugcagu

SEQ ID NO: 22102 - RNA, 22 nt, Artificial Sequence
  Synthetic
acccccaggcuggagugcagug

SEQ ID NO: 22103 - RNA, 22 nt, Artificial Sequence
  Synthetic
cccccaggcuggagugcagugg

SEQ ID NO: 22104 - RNA, 22 nt, Artificial Sequence
  Synthetic
ccccaggcuggagugcaguggc

SEQ ID NO: 22105 - RNA, 22 nt, Artificial Sequence
  Synthetic
cccaggcuggagugcaguggca

SEQ ID NO: 22106 - RNA, 22 nt, Artificial Sequence
  Synthetic
ccaggcuggagugcaguggcau

SEQ ID NO: 22107 - RNA, 22 nt, Artificial Sequence
  Synthetic
caggcuggagugcaguggcaug

SEQ ID NO: 22108 - RNA, 22 nt, Artificial Sequence
  Synthetic
aggcuggagugcaguggcauga

SEQ ID NO: 22109 - RNA, 22 nt, Artificial Sequence
  Synthetic
ggcuggagugcaguggcaugau

SEQ ID NO: 22110 - RNA, 22 nt, Artificial Sequence
  Synthetic
gcuggagugcaguggcaugauc

SEQ ID NO: 22111 - RNA, 22 nt, Artificial Sequence
  Synthetic
cuggagugcaguggcaugaucu

SEQ ID NO: 22112 - RNA, 22 nt, Artificial Sequence
  Synthetic
uggagugcaguggcaugaucuu

SEQ ID NO: 22113 - RNA, 22 nt, Artificial Sequence
  Synthetic
ggagugcaguggcaugaucuug

SEQ ID NO: 22114 - RNA, 22 nt, Artificial Sequence
  Synthetic
gagugcaguggcaugaucuugg

SEQ ID NO: 22115 - RNA, 22 nt, Artificial Sequence
  Synthetic
agugcaguggcaugaucuuggc

SEQ ID NO: 22116 - RNA, 22 nt, Artificial Sequence
  Synthetic
gugcaguggcaugaucuuggcu

SEQ ID NO: 22117 - RNA, 22 nt, Artificial Sequence
  Synthetic
ugcaguggcaugaucuuggcuc

SEQ ID NO: 22118 - RNA, 22 nt, Artificial Sequence
  Synthetic
gcaguggcaugaucuuggcuca

SEQ ID NO: 22119 - RNA, 22 nt, Artificial Sequence
  Synthetic
caguggcaugaucuuggcucac

SEQ ID NO: 22120 - RNA, 22 nt, Artificial Sequence
  Synthetic
aguggcaugaucuuggcucacu

SEQ ID NO: 22121 - RNA, 22 nt, Artificial Sequence
  Synthetic
guggcaugaucuuggcucacug

SEQ ID NO: 22122 - RNA, 22 nt, Artificial Sequence
  Synthetic
uggcaugaucuuggcucacugc

SEQ ID NO: 22123 - RNA, 22 nt, Artificial Sequence
  Synthetic
ggcaugaucuuggcucacugca

SEQ ID NO: 22124 - RNA, 22 nt, Artificial Sequence
  Synthetic
gcaugaucuuggcucacugcaa

SEQ ID NO: 22125 - RNA, 22 nt, Artificial Sequence
  Synthetic
caugaucuuggcucacugcaac

SEQ ID NO: 22126 - RNA, 22 nt, Artificial Sequence
  Synthetic
augaucuuggcucacugcaacc

SEQ ID NO: 22127 - RNA, 22 nt, Artificial Sequence
  Synthetic
ugaucuuggcucacugcaaccu

SEQ ID NO: 22128 - RNA, 22 nt, Artificial Sequence
  Synthetic
gaucuuggcucacugcaaccuc

SEQ ID NO: 22129 - RNA, 22 nt, Artificial Sequence
  Synthetic
aucuuggcucacugcaaccucc

SEQ ID NO: 22130 - RNA, 22 nt, Artificial Sequence
  Synthetic
ucuuggcucacugcaaccucca

SEQ ID NO: 22131 - RNA, 22 nt, Artificial Sequence
  Synthetic
cuuggcucacugcaaccuccac

SEQ ID NO: 22132 - RNA, 22 nt, Artificial Sequence
  Synthetic
uuggcucacugcaaccuccacc

SEQ ID NO: 22133 - RNA, 22 nt, Artificial Sequence
  Synthetic
uggcucacugcaaccuccaccu

SEQ ID NO: 22134 - RNA, 22 nt, Artificial Sequence
  Synthetic
ggcucacugcaaccuccaccuc

SEQ ID NO: 22135 - RNA, 22 nt, Artificial Sequence
  Synthetic
gcucacugcaaccuccaccucc

SEQ ID NO: 22136 - RNA, 22 nt, Artificial Sequence
  Synthetic
cucacugcaaccuccaccuccu

SEQ ID NO: 22137 - RNA, 22 nt, Artificial Sequence
  Synthetic
ucacugcaaccuccaccuccua

SEQ ID NO: 22138 - RNA, 22 nt, Artificial Sequence
  Synthetic
cacugcaaccuccaccuccuag

SEQ ID NO: 22139 - RNA, 22 nt, Artificial Sequence
  Synthetic
acugcaaccuccaccuccuagg

SEQ ID NO: 22140 - RNA, 22 nt, Artificial Sequence
  Synthetic
cugcaaccuccaccuccuaggu

SEQ ID NO: 22141 - RNA, 22 nt, Artificial Sequence
  Synthetic
ugcaaccuccaccuccuagguu

SEQ ID NO: 22142 - RNA, 22 nt, Artificial Sequence
  Synthetic
gcaaccuccaccuccuagguuc

SEQ ID NO: 22143 - RNA, 22 nt, Artificial Sequence
  Synthetic
caaccuccaccuccuagguuca

SEQ ID NO: 22144 - RNA, 22 nt, Artificial Sequence
  Synthetic
aaccuccaccuccuagguucaa

SEQ ID NO: 22145 - RNA, 22 nt, Artificial Sequence
  Synthetic
accuccaccuccuagguucaag

SEQ ID NO: 22146 - RNA, 22 nt, Artificial Sequence
  Synthetic
ccuccaccuccuagguucaagu

SEQ ID NO: 22147 - RNA, 22 nt, Artificial Sequence
  Synthetic
cuccaccuccuagguucaagug

SEQ ID NO: 22148 - RNA, 22 nt, Artificial Sequence
  Synthetic
uccaccuccuagguucaaguga

SEQ ID NO: 22149 - RNA, 22 nt, Artificial Sequence
  Synthetic
ccaccuccuagguucaagugau

SEQ ID NO: 22150 - RNA, 22 nt, Artificial Sequence
  Synthetic
caccuccuagguucaagugauu

SEQ ID NO: 22151 - RNA, 22 nt, Artificial Sequence
  Synthetic
accuccuagguucaagugauuc

SEQ ID NO: 22152 - RNA, 22 nt, Artificial Sequence
  Synthetic
ccuccuagguucaagugauucu

SEQ ID NO: 22153 - RNA, 22 nt, Artificial Sequence
  Synthetic
cuccuagguucaagugauucuu

SEQ ID NO: 22154 - RNA, 22 nt, Artificial Sequence
  Synthetic
uccuagguucaagugauucuuc

SEQ ID NO: 22155 - RNA, 22 nt, Artificial Sequence
  Synthetic
ccuagguucaagugauucuucu

SEQ ID NO: 22156 - RNA, 22 nt, Artificial Sequence
  Synthetic
cuagguucaagugauucuucuc

SEQ ID NO: 22157 - RNA, 22 nt, Artificial Sequence
  Synthetic
uagguucaagugauucuucucu

SEQ ID NO: 22158 - RNA, 22 nt, Artificial Sequence
  Synthetic
agguucaagugauucuucucug

SEQ ID NO: 22159 - RNA, 22 nt, Artificial Sequence
  Synthetic
gguucaagugauucuucucugc

SEQ ID NO: 22160 - RNA, 22 nt, Artificial Sequence
  Synthetic
guucaagugauucuucucugcc

SEQ ID NO: 22161 - RNA, 22 nt, Artificial Sequence
  Synthetic
uucaagugauucuucucugccu

SEQ ID NO: 22162 - RNA, 22 nt, Artificial Sequence
  Synthetic
ucaagugauucuucucugccuc

SEQ ID NO: 22163 - RNA, 22 nt, Artificial Sequence
  Synthetic
caagugauucuucucugccuca

SEQ ID NO: 22164 - RNA, 22 nt, Artificial Sequence
  Synthetic
aagugauucuucucugccucag

SEQ ID NO: 22165 - RNA, 22 nt, Artificial Sequence
  Synthetic
agugauucuucucugccucagu

SEQ ID NO: 22166 - RNA, 22 nt, Artificial Sequence
  Synthetic
gugauucuucucugccucaguu

SEQ ID NO: 22167 - RNA, 22 nt, Artificial Sequence
  Synthetic
ugauucuucucugccucaguuu

SEQ ID NO: 22168 - RNA, 22 nt, Artificial Sequence
  Synthetic
gauucuucucugccucaguuuc

SEQ ID NO: 22169 - RNA, 22 nt, Artificial Sequence
  Synthetic
auucuucucugccucaguuucc

SEQ ID NO: 22170 - RNA, 22 nt, Artificial Sequence
  Synthetic
uucuucucugccucaguuuccc

SEQ ID NO: 22171 - RNA, 22 nt, Artificial Sequence
  Synthetic
ucuucucugccucaguuuccca

SEQ ID NO: 22172 - RNA, 22 nt, Artificial Sequence
  Synthetic
cuucucugccucaguuucccaa

SEQ ID NO: 22173 - RNA, 22 nt, Artificial Sequence
  Synthetic
uucucugccucaguuucccaag

SEQ ID NO: 22174 - RNA, 22 nt, Artificial Sequence
  Synthetic
ucucugccucaguuucccaagu

SEQ ID NO: 22175 - RNA, 22 nt, Artificial Sequence
  Synthetic
cucugccucaguuucccaagua

SEQ ID NO: 22176 - RNA, 22 nt, Artificial Sequence
  Synthetic
ucugccucaguuucccaaguag

SEQ ID NO: 22177 - RNA, 22 nt, Artificial Sequence
  Synthetic
cugccucaguuucccaaguagc

SEQ ID NO: 22178 - RNA, 22 nt, Artificial Sequence
  Synthetic
ugccucaguuucccaaguagcu

SEQ ID NO: 22179 - RNA, 22 nt, Artificial Sequence
  Synthetic
gccucaguuucccaaguagcug

SEQ ID NO: 22180 - RNA, 22 nt, Artificial Sequence
  Synthetic
ccucaguuucccaaguagcugg

SEQ ID NO: 22181 - RNA, 22 nt, Artificial Sequence
  Synthetic
cucaguuucccaaguagcuggg

SEQ ID NO: 22182 - RNA, 22 nt, Artificial Sequence
  Synthetic
ucaguuucccaaguagcuggga

SEQ ID NO: 22183 - RNA, 22 nt, Artificial Sequence
  Synthetic
caguuucccaaguagcugggac

SEQ ID NO: 22184 - RNA, 22 nt, Artificial Sequence
  Synthetic
aguuucccaaguagcugggacu

SEQ ID NO: 22185 - RNA, 22 nt, Artificial Sequence
  Synthetic
guuucccaaguagcugggacua

SEQ ID NO: 22186 - RNA, 22 nt, Artificial Sequence
  Synthetic
uuucccaaguagcugggacuac

SEQ ID NO: 22187 - RNA, 22 nt, Artificial Sequence
  Synthetic
uucccaaguagcugggacuaca

SEQ ID NO: 22188 - RNA, 22 nt, Artificial Sequence
  Synthetic
ucccaaguagcugggacuacag

SEQ ID NO: 22189 - RNA, 22 nt, Artificial Sequence
  Synthetic
cccaaguagcugggacuacagg

SEQ ID NO: 22190 - RNA, 22 nt, Artificial Sequence
  Synthetic
ccaaguagcugggacuacaggc

SEQ ID NO: 22191 - RNA, 22 nt, Artificial Sequence
  Synthetic
caaguagcugggacuacaggca

SEQ ID NO: 22192 - RNA, 22 nt, Artificial Sequence
  Synthetic
aaguagcugggacuacaggcac

SEQ ID NO: 22193 - RNA, 22 nt, Artificial Sequence
  Synthetic
aguagcugggacuacaggcacg

SEQ ID NO: 22194 - RNA, 22 nt, Artificial Sequence
  Synthetic
guagcugggacuacaggcacgc

SEQ ID NO: 22195 - RNA, 22 nt, Artificial Sequence
  Synthetic
uagcugggacuacaggcacgca

SEQ ID NO: 22196 - RNA, 22 nt, Artificial Sequence
  Synthetic
agcugggacuacaggcacgcac

SEQ ID NO: 22197 - RNA, 22 nt, Artificial Sequence
  Synthetic
gcugggacuacaggcacgcacc

SEQ ID NO: 22198 - RNA, 22 nt, Artificial Sequence
  Synthetic
cugggacuacaggcacgcacca

SEQ ID NO: 22199 - RNA, 22 nt, Artificial Sequence
  Synthetic
ugggacuacaggcacgcaccac

SEQ ID NO: 22200 - RNA, 22 nt, Artificial Sequence
  Synthetic
gggacuacaggcacgcaccacc

SEQ ID NO: 22201 - RNA, 22 nt, Artificial Sequence
  Synthetic
ggacuacaggcacgcaccacca

SEQ ID NO: 22202 - RNA, 22 nt, Artificial Sequence
  Synthetic
gacuacaggcacgcaccaccac

SEQ ID NO: 22203 - RNA, 22 nt, Artificial Sequence
  Synthetic
acuacaggcacgcaccaccacg

SEQ ID NO: 22204 - RNA, 22 nt, Artificial Sequence
  Synthetic
cuacaggcacgcaccaccacgc

SEQ ID NO: 22205 - RNA, 22 nt, Artificial Sequence
  Synthetic
uacaggcacgcaccaccacgcc

SEQ ID NO: 22206 - RNA, 22 nt, Artificial Sequence
  Synthetic
acaggcacgcaccaccacgccu

SEQ ID NO: 22207 - RNA, 22 nt, Artificial Sequence
  Synthetic
caggcacgcaccaccacgccug

SEQ ID NO: 22208 - RNA, 22 nt, Artificial Sequence
  Synthetic
aggcacgcaccaccacgccugg

SEQ ID NO: 22209 - RNA, 22 nt, Artificial Sequence
  Synthetic
ggcacgcaccaccacgccuggc

SEQ ID NO: 22210 - RNA, 22 nt, Artificial Sequence
  Synthetic
gcacgcaccaccacgccuggcu

SEQ ID NO: 22211 - RNA, 22 nt, Artificial Sequence
  Synthetic
cacgcaccaccacgccuggcua

SEQ ID NO: 22212 - RNA, 22 nt, Artificial Sequence
  Synthetic
acgcaccaccacgccuggcuau

SEQ ID NO: 22213 - RNA, 22 nt, Artificial Sequence
  Synthetic
cgcaccaccacgccuggcuauu

SEQ ID NO: 22214 - RNA, 22 nt, Artificial Sequence
  Synthetic
gcaccaccacgccuggcuauuu

SEQ ID NO: 22215 - RNA, 22 nt, Artificial Sequence
  Synthetic
caccaccacgccuggcuauuuu

SEQ ID NO: 22216 - RNA, 22 nt, Artificial Sequence
  Synthetic
accaccacgccuggcuauuuuu

SEQ ID NO: 22217 - RNA, 22 nt, Artificial Sequence
  Synthetic
ccaccacgccuggcuauuuuuu

SEQ ID NO: 22218 - RNA, 22 nt, Artificial Sequence
  Synthetic
caccacgccuggcuauuuuuuu

SEQ ID NO: 22219 - RNA, 22 nt, Artificial Sequence
  Synthetic
accacgccuggcuauuuuuuua

SEQ ID NO: 22220 - RNA, 22 nt, Artificial Sequence
  Synthetic
ccacgccuggcuauuuuuuuau

SEQ ID NO: 22221 - RNA, 22 nt, Artificial Sequence
  Synthetic
cacgccuggcuauuuuuuuauu

SEQ ID NO: 22222 - RNA, 22 nt, Artificial Sequence
  Synthetic
acgccuggcuauuuuuuuauuu

SEQ ID NO: 22223 - RNA, 22 nt, Artificial Sequence
  Synthetic
cgccuggcuauuuuuuuauuuu

SEQ ID NO: 22224 - RNA, 22 nt, Artificial Sequence
  Synthetic
gccuggcuauuuuuuuauuuuu

SEQ ID NO: 22225 - RNA, 22 nt, Artificial Sequence
  Synthetic
ccuggcuauuuuuuuauuuuua

SEQ ID NO: 22226 - RNA, 22 nt, Artificial Sequence
  Synthetic
cuggcuauuuuuuuauuuuuau

SEQ ID NO: 22227 - RNA, 22 nt, Artificial Sequence
  Synthetic
uggcuauuuuuuuauuuuuauu

SEQ ID NO: 22228 - RNA, 22 nt, Artificial Sequence
  Synthetic
ggcuauuuuuuuauuuuuauuu

SEQ ID NO: 22229 - RNA, 22 nt, Artificial Sequence
  Synthetic
gcuauuuuuuuauuuuuauuuu

SEQ ID NO: 22230 - RNA, 22 nt, Artificial Sequence
  Synthetic
cuauuuuuuuauuuuuauuuuu

SEQ ID NO: 22231 - RNA, 22 nt, Artificial Sequence
  Synthetic
uauuuuuuuauuuuuauuuuua

SEQ ID NO: 22232 - RNA, 22 nt, Artificial Sequence
  Synthetic
auuuuuuuauuuuuauuuuuag

SEQ ID NO: 22233 - RNA, 22 nt, Artificial Sequence
  Synthetic
uuuuuuuauuuuuauuuuuagu

SEQ ID NO: 22234 - RNA, 22 nt, Artificial Sequence
  Synthetic
uuuuuuauuuuuauuuuuagua

SEQ ID NO: 22235 - RNA, 22 nt, Artificial Sequence
  Synthetic
uuuuuauuuuuauuuuuaguag

SEQ ID NO: 22236 - RNA, 22 nt, Artificial Sequence
  Synthetic
uuuuauuuuuauuuuuaguaga

SEQ ID NO: 22237 - RNA, 22 nt, Artificial Sequence
  Synthetic
uuuauuuuuauuuuuaguagag

SEQ ID NO: 22238 - RNA, 22 nt, Artificial Sequence
  Synthetic
uuauuuuuauuuuuaguagaga

SEQ ID NO: 22239 - RNA, 22 nt, Artificial Sequence
  Synthetic
uauuuuuauuuuuaguagagac

SEQ ID NO: 22240 - RNA, 22 nt, Artificial Sequence
  Synthetic
auuuuuauuuuuaguagagaca

SEQ ID NO: 22241 - RNA, 22 nt, Artificial Sequence
  Synthetic
uuuuuauuuuuaguagagacag

SEQ ID NO: 22242 - RNA, 22 nt, Artificial Sequence
  Synthetic
uuuuauuuuuaguagagacagg

SEQ ID NO: 22243 - RNA, 22 nt, Artificial Sequence
  Synthetic
uuuauuuuuaguagagacaggg

SEQ ID NO: 22244 - RNA, 22 nt, Artificial Sequence
  Synthetic
uuauuuuuaguagagacagggu

SEQ ID NO: 22245 - RNA, 22 nt, Artificial Sequence
  Synthetic
uauuuuuaguagagacaggguu

SEQ ID NO: 22246 - RNA, 22 nt, Artificial Sequence
  Synthetic
auuuuuaguagagacaggguuu

SEQ ID NO: 22247 - RNA, 22 nt, Artificial Sequence
  Synthetic
uuuuuaguagagacaggguuuc

SEQ ID NO: 22248 - RNA, 22 nt, Artificial Sequence
  Synthetic
uuuuaguagagacaggguuuca

SEQ ID NO: 22249 - RNA, 22 nt, Artificial Sequence
  Synthetic
uuuaguagagacaggguuucac

SEQ ID NO: 22250 - RNA, 22 nt, Artificial Sequence
  Synthetic
uuaguagagacaggguuucacc

SEQ ID NO: 22251 - RNA, 22 nt, Artificial Sequence
  Synthetic
uaguagagacaggguuucacca

SEQ ID NO: 22252 - RNA, 22 nt, Artificial Sequence
  Synthetic
aguagagacaggguuucaccau

SEQ ID NO: 22253 - RNA, 22 nt, Artificial Sequence
  Synthetic
guagagacaggguuucaccaug

SEQ ID NO: 22254 - RNA, 22 nt, Artificial Sequence
  Synthetic
uagagacaggguuucaccaugu

SEQ ID NO: 22255 - RNA, 22 nt, Artificial Sequence
  Synthetic
agagacaggguuucaccauguu

SEQ ID NO: 22256 - RNA, 22 nt, Artificial Sequence
  Synthetic
gagacaggguuucaccauguug

SEQ ID NO: 22257 - RNA, 22 nt, Artificial Sequence
  Synthetic
agacaggguuucaccauguugg

SEQ ID NO: 22258 - RNA, 22 nt, Artificial Sequence
  Synthetic
gacaggguuucaccauguuggc

SEQ ID NO: 22259 - RNA, 22 nt, Artificial Sequence
  Synthetic
acaggguuucaccauguuggcc

SEQ ID NO: 22260 - RNA, 22 nt, Artificial Sequence
  Synthetic
caggguuucaccauguuggccg

SEQ ID NO: 22261 - RNA, 22 nt, Artificial Sequence
  Synthetic
aggguuucaccauguuggccgg

SEQ ID NO: 22262 - RNA, 22 nt, Artificial Sequence
  Synthetic
ggguuucaccauguuggccggg

SEQ ID NO: 22263 - RNA, 22 nt, Artificial Sequence
  Synthetic
gguuucaccauguuggccgggc

SEQ ID NO: 22264 - RNA, 22 nt, Artificial Sequence
  Synthetic
guuucaccauguuggccgggcu

SEQ ID NO: 22265 - RNA, 22 nt, Artificial Sequence
  Synthetic
uuucaccauguuggccgggcug

SEQ ID NO: 22266 - RNA, 22 nt, Artificial Sequence
  Synthetic
uucaccauguuggccgggcugg

SEQ ID NO: 22267 - RNA, 22 nt, Artificial Sequence
  Synthetic
ucaccauguuggccgggcuggu

SEQ ID NO: 22268 - RNA, 22 nt, Artificial Sequence
  Synthetic
caccauguuggccgggcugguc

SEQ ID NO: 22269 - RNA, 22 nt, Artificial Sequence
  Synthetic
accauguuggccgggcuggucu

SEQ ID NO: 22270 - RNA, 22 nt, Artificial Sequence
  Synthetic
ccauguuggccgggcuggucuu

SEQ ID NO: 22271 - RNA, 22 nt, Artificial Sequence
  Synthetic
cauguuggccgggcuggucuug

SEQ ID NO: 22272 - RNA, 22 nt, Artificial Sequence
  Synthetic
auguuggccgggcuggucuuga

SEQ ID NO: 22273 - RNA, 22 nt, Artificial Sequence
  Synthetic
uguuggccgggcuggucuugaa

SEQ ID NO: 22274 - RNA, 22 nt, Artificial Sequence
  Synthetic
guuggccgggcuggucuugaac

SEQ ID NO: 22275 - RNA, 22 nt, Artificial Sequence
  Synthetic
uuggccgggcuggucuugaacu

SEQ ID NO: 22276 - RNA, 22 nt, Artificial Sequence
  Synthetic
uggccgggcuggucuugaacuc

SEQ ID NO: 22277 - RNA, 22 nt, Artificial Sequence
  Synthetic
ggccgggcuggucuugaacucc

SEQ ID NO: 22278 - RNA, 22 nt, Artificial Sequence
  Synthetic
gccgggcuggucuugaacuccu

SEQ ID NO: 22279 - RNA, 22 nt, Artificial Sequence
  Synthetic
ccgggcuggucuugaacuccug

SEQ ID NO: 22280 - RNA, 22 nt, Artificial Sequence
  Synthetic
cgggcuggucuugaacuccuga

SEQ ID NO: 22281 - RNA, 22 nt, Artificial Sequence
  Synthetic
gggcuggucuugaacuccugac

SEQ ID NO: 22282 - RNA, 22 nt, Artificial Sequence
  Synthetic
ggcuggucuugaacuccugacc

SEQ ID NO: 22283 - RNA, 22 nt, Artificial Sequence
  Synthetic
gcuggucuugaacuccugaccu

SEQ ID NO: 22284 - RNA, 22 nt, Artificial Sequence
  Synthetic
cuggucuugaacuccugaccuc

SEQ ID NO: 22285 - RNA, 22 nt, Artificial Sequence
  Synthetic
uggucuugaacuccugaccuca

SEQ ID NO: 22286 - RNA, 22 nt, Artificial Sequence
  Synthetic
ggucuugaacuccugaccucaa

SEQ ID NO: 22287 - RNA, 22 nt, Artificial Sequence
  Synthetic
gucuugaacuccugaccucaag

SEQ ID NO: 22288 - RNA, 22 nt, Artificial Sequence
  Synthetic
ucuugaacuccugaccucaagu

SEQ ID NO: 22289 - RNA, 22 nt, Artificial Sequence
  Synthetic
cuugaacuccugaccucaagug

SEQ ID NO: 22290 - RNA, 22 nt, Artificial Sequence
  Synthetic
uugaacuccugaccucaaguga

SEQ ID NO: 22291 - RNA, 22 nt, Artificial Sequence
  Synthetic
ugaacuccugaccucaagugau

SEQ ID NO: 22292 - RNA, 22 nt, Artificial Sequence
  Synthetic
gaacuccugaccucaagugauc

SEQ ID NO: 22293 - RNA, 22 nt, Artificial Sequence
  Synthetic
aacuccugaccucaagugaucu

SEQ ID NO: 22294 - RNA, 22 nt, Artificial Sequence
  Synthetic
acuccugaccucaagugaucug

SEQ ID NO: 22295 - RNA, 22 nt, Artificial Sequence
  Synthetic
cuccugaccucaagugaucugc

SEQ ID NO: 22296 - RNA, 22 nt, Artificial Sequence
  Synthetic
uccugaccucaagugaucugcc

SEQ ID NO: 22297 - RNA, 22 nt, Artificial Sequence
  Synthetic
ccugaccucaagugaucugccc

SEQ ID NO: 22298 - RNA, 22 nt, Artificial Sequence
  Synthetic
cugaccucaagugaucugccca

SEQ ID NO: 22299 - RNA, 22 nt, Artificial Sequence
  Synthetic
ugaccucaagugaucugcccac

SEQ ID NO: 22300 - RNA, 22 nt, Artificial Sequence
  Synthetic
gaccucaagugaucugcccacc

SEQ ID NO: 22301 - RNA, 22 nt, Artificial Sequence
  Synthetic
accucaagugaucugcccaccu

SEQ ID NO: 22302 - RNA, 22 nt, Artificial Sequence
  Synthetic
ccucaagugaucugcccaccuc

SEQ ID NO: 22303 - RNA, 22 nt, Artificial Sequence
  Synthetic
cucaagugaucugcccaccuca

SEQ ID NO: 22304 - RNA, 22 nt, Artificial Sequence
  Synthetic
ucaagugaucugcccaccucag

SEQ ID NO: 22305 - RNA, 22 nt, Artificial Sequence
  Synthetic
caagugaucugcccaccucagc

SEQ ID NO: 22306 - RNA, 22 nt, Artificial Sequence
  Synthetic
aagugaucugcccaccucagcc

SEQ ID NO: 22307 - RNA, 22 nt, Artificial Sequence
  Synthetic
agugaucugcccaccucagccu

SEQ ID NO: 22308 - RNA, 22 nt, Artificial Sequence
  Synthetic
gugaucugcccaccucagccuc

SEQ ID NO: 22309 - RNA, 22 nt, Artificial Sequence
  Synthetic
ugaucugcccaccucagccucc

SEQ ID NO: 22310 - RNA, 22 nt, Artificial Sequence
  Synthetic
gaucugcccaccucagccuccc

SEQ ID NO: 22311 - RNA, 22 nt, Artificial Sequence
  Synthetic
aucugcccaccucagccuccca

SEQ ID NO: 22312 - RNA, 22 nt, Artificial Sequence
  Synthetic
ucugcccaccucagccucccaa

SEQ ID NO: 22313 - RNA, 22 nt, Artificial Sequence
  Synthetic
cugcccaccucagccucccaaa

SEQ ID NO: 22314 - RNA, 22 nt, Artificial Sequence
  Synthetic
ugcccaccucagccucccaaag

SEQ ID NO: 22315 - RNA, 22 nt, Artificial Sequence
  Synthetic
gcccaccucagccucccaaagu

SEQ ID NO: 22316 - RNA, 22 nt, Artificial Sequence
  Synthetic
cccaccucagccucccaaagug

SEQ ID NO: 22317 - RNA, 22 nt, Artificial Sequence
  Synthetic
ccaccucagccucccaaagugc

SEQ ID NO: 22318 - RNA, 22 nt, Artificial Sequence
  Synthetic
caccucagccucccaaagugcu

SEQ ID NO: 22319 - RNA, 22 nt, Artificial Sequence
  Synthetic
accucagccucccaaagugcug

SEQ ID NO: 22320 - RNA, 22 nt, Artificial Sequence
  Synthetic
ccucagccucccaaagugcugg

SEQ ID NO: 22321 - RNA, 22 nt, Artificial Sequence
  Synthetic
cucagccucccaaagugcuggg

SEQ ID NO: 22322 - RNA, 22 nt, Artificial Sequence
  Synthetic
ucagccucccaaagugcuggga

SEQ ID NO: 22323 - RNA, 22 nt, Artificial Sequence
  Synthetic
cagccucccaaagugcugggau

SEQ ID NO: 22324 - RNA, 22 nt, Artificial Sequence
  Synthetic
agccucccaaagugcugggauu

SEQ ID NO: 22325 - RNA, 22 nt, Artificial Sequence
  Synthetic
gccucccaaagugcugggauua

SEQ ID NO: 22326 - RNA, 22 nt, Artificial Sequence
  Synthetic
ccucccaaagugcugggauuac

SEQ ID NO: 22327 - RNA, 22 nt, Artificial Sequence
  Synthetic
cucccaaagugcugggauuaca

SEQ ID NO: 22328 - RNA, 22 nt, Artificial Sequence
  Synthetic
ucccaaagugcugggauuacag

SEQ ID NO: 22329 - RNA, 22 nt, Artificial Sequence
  Synthetic
cccaaagugcugggauuacagg

SEQ ID NO: 22330 - RNA, 22 nt, Artificial Sequence
  Synthetic
ccaaagugcugggauuacaggc

SEQ ID NO: 22331 - RNA, 22 nt, Artificial Sequence
  Synthetic
caaagugcugggauuacaggcg

SEQ ID NO: 22332 - RNA, 22 nt, Artificial Sequence
  Synthetic
aaagugcugggauuacaggcgu

SEQ ID NO: 22333 - RNA, 22 nt, Artificial Sequence
  Synthetic
aagugcugggauuacaggcgug

SEQ ID NO: 22334 - RNA, 22 nt, Artificial Sequence
  Synthetic
agugcugggauuacaggcguga

SEQ ID NO: 22335 - RNA, 22 nt, Artificial Sequence
  Synthetic
gugcugggauuacaggcgugag

SEQ ID NO: 22336 - RNA, 22 nt, Artificial Sequence
  Synthetic
ugcugggauuacaggcgugagc

SEQ ID NO: 22337 - RNA, 22 nt, Artificial Sequence
  Synthetic
gcugggauuacaggcgugagcc

SEQ ID NO: 22338 - RNA, 22 nt, Artificial Sequence
  Synthetic
cugggauuacaggcgugagcca

SEQ ID NO: 22339 - RNA, 22 nt, Artificial Sequence
  Synthetic
ugggauuacaggcgugagccac

SEQ ID NO: 22340 - RNA, 22 nt, Artificial Sequence
  Synthetic
gggauuacaggcgugagccacu

SEQ ID NO: 22341 - RNA, 22 nt, Artificial Sequence
  Synthetic
ggauuacaggcgugagccacug

SEQ ID NO: 22342 - RNA, 22 nt, Artificial Sequence
  Synthetic
gauuacaggcgugagccacugc

SEQ ID NO: 22343 - RNA, 22 nt, Artificial Sequence
  Synthetic
auuacaggcgugagccacugcg

SEQ ID NO: 22344 - RNA, 22 nt, Artificial Sequence
  Synthetic
uuacaggcgugagccacugcgc

SEQ ID NO: 22345 - RNA, 22 nt, Artificial Sequence
  Synthetic
uacaggcgugagccacugcgcc

SEQ ID NO: 22346 - RNA, 22 nt, Artificial Sequence
  Synthetic
acaggcgugagccacugcgccc

SEQ ID NO: 22347 - RNA, 22 nt, Artificial Sequence
  Synthetic
caggcgugagccacugcgcccc

SEQ ID NO: 22348 - RNA, 22 nt, Artificial Sequence
  Synthetic
aggcgugagccacugcgccccg

SEQ ID NO: 22349 - RNA, 22 nt, Artificial Sequence
  Synthetic
ggcgugagccacugcgccccgc

SEQ ID NO: 22350 - RNA, 22 nt, Artificial Sequence
  Synthetic
gcgugagccacugcgccccgcc

SEQ ID NO: 22351 - RNA, 22 nt, Artificial Sequence
  Synthetic
cgugagccacugcgccccgccc

SEQ ID NO: 22352 - RNA, 22 nt, Artificial Sequence
  Synthetic
gugagccacugcgccccgccca

SEQ ID NO: 22353 - RNA, 22 nt, Artificial Sequence
  Synthetic
ugagccacugcgccccgcccac

SEQ ID NO: 22354 - RNA, 22 nt, Artificial Sequence
  Synthetic
gagccacugcgccccgcccacu

SEQ ID NO: 22355 - RNA, 22 nt, Artificial Sequence
  Synthetic
agccacugcgccccgcccacug

SEQ ID NO: 22356 - RNA, 22 nt, Artificial Sequence
  Synthetic
gccacugcgccccgcccacugu

SEQ ID NO: 22357 - RNA, 22 nt, Artificial Sequence
  Synthetic
ccacugcgccccgcccacuguc

SEQ ID NO: 22358 - RNA, 22 nt, Artificial Sequence
  Synthetic
cacugcgccccgcccacugucu

SEQ ID NO: 22359 - RNA, 22 nt, Artificial Sequence
  Synthetic
acugcgccccgcccacugucuu

SEQ ID NO: 22360 - RNA, 22 nt, Artificial Sequence
  Synthetic
cugcgccccgcccacugucuuu

SEQ ID NO: 22361 - RNA, 22 nt, Artificial Sequence
  Synthetic
ugcgccccgcccacugucuuuu

SEQ ID NO: 22362 - RNA, 22 nt, Artificial Sequence
  Synthetic
gcgccccgcccacugucuuuuu

SEQ ID NO: 22363 - RNA, 22 nt, Artificial Sequence
  Synthetic
cgccccgcccacugucuuuuuu

SEQ ID NO: 22364 - RNA, 22 nt, Artificial Sequence
  Synthetic
gccccgcccacugucuuuuuuu

SEQ ID NO: 22365 - RNA, 22 nt, Artificial Sequence
  Synthetic
ccccgcccacugucuuuuuuuu

SEQ ID NO: 22366 - RNA, 22 nt, Artificial Sequence
  Synthetic
cccgcccacugucuuuuuuuuu

SEQ ID NO: 22367 - RNA, 22 nt, Artificial Sequence
  Synthetic
ccgcccacugucuuuuuuuuuu

SEQ ID NO: 22368 - RNA, 22 nt, Artificial Sequence
  Synthetic
cgcccacugucuuuuuuuuuuu

SEQ ID NO: 22369 - RNA, 22 nt, Artificial Sequence
  Synthetic
gcccacugucuuuuuuuuuuuu

SEQ ID NO: 22370 - RNA, 22 nt, Artificial Sequence
  Synthetic
cccacugucuuuuuuuuuuuuu

SEQ ID NO: 22371 - RNA, 22 nt, Artificial Sequence
  Synthetic
ccacugucuuuuuuuuuuuuuu

SEQ ID NO: 22372 - RNA, 22 nt, Artificial Sequence
  Synthetic
cacugucuuuuuuuuuuuuuua

SEQ ID NO: 22373 - RNA, 22 nt, Artificial Sequence
  Synthetic
acugucuuuuuuuuuuuuuuaa

SEQ ID NO: 22374 - RNA, 22 nt, Artificial Sequence
  Synthetic
cugucuuuuuuuuuuuuuuaaa

SEQ ID NO: 22375 - RNA, 22 nt, Artificial Sequence
  Synthetic
ugucuuuuuuuuuuuuuuaaag

SEQ ID NO: 22376 - RNA, 22 nt, Artificial Sequence
  Synthetic
gucuuuuuuuuuuuuuuaaagg

SEQ ID NO: 22377 - RNA, 22 nt, Artificial Sequence
  Synthetic
ucuuuuuuuuuuuuuuaaagga

SEQ ID NO: 22378 - RNA, 22 nt, Artificial Sequence
  Synthetic
cuuuuuuuuuuuuuuaaaggac

SEQ ID NO: 22379 - RNA, 22 nt, Artificial Sequence
  Synthetic
uuuuuuuuuuuuuuaaaggacc

SEQ ID NO: 22380 - RNA, 22 nt, Artificial Sequence
  Synthetic
uuuuuuuuuuuuuaaaggaccu

SEQ ID NO: 22381 - RNA, 22 nt, Artificial Sequence
  Synthetic
uuuuuuuuuuuuaaaggaccuc

SEQ ID NO: 22382 - RNA, 22 nt, Artificial Sequence
  Synthetic
uuuuuuuuuuuaaaggaccuca

SEQ ID NO: 22383 - RNA, 22 nt, Artificial Sequence
  Synthetic
uuuuuuuuuuaaaggaccucag

SEQ ID NO: 22384 - RNA, 22 nt, Artificial Sequence
  Synthetic
uuuuuuuuuaaaggaccucagg

SEQ ID NO: 22385 - RNA, 22 nt, Artificial Sequence
  Synthetic
uuuuuuuuaaaggaccucaggu

SEQ ID NO: 22386 - RNA, 22 nt, Artificial Sequence
  Synthetic
uuuuuuuaaaggaccucaggug

SEQ ID NO: 22387 - RNA, 22 nt, Artificial Sequence
  Synthetic
uuuuuuaaaggaccucagguga

SEQ ID NO: 22388 - RNA, 22 nt, Artificial Sequence
  Synthetic
uuuuuaaaggaccucaggugau

SEQ ID NO: 22389 - RNA, 22 nt, Artificial Sequence
  Synthetic
uuuuaaaggaccucaggugauu

SEQ ID NO: 22390 - RNA, 22 nt, Artificial Sequence
  Synthetic
uuuaaaggaccucaggugauuc

SEQ ID NO: 22391 - RNA, 22 nt, Artificial Sequence
  Synthetic
uuaaaggaccucaggugauucu

SEQ ID NO: 22392 - RNA, 22 nt, Artificial Sequence
  Synthetic
uaaaggaccucaggugauucug

SEQ ID NO: 22393 - RNA, 22 nt, Artificial Sequence
  Synthetic
aaaggaccucaggugauucuga

SEQ ID NO: 22394 - RNA, 22 nt, Artificial Sequence
  Synthetic
aaggaccucaggugauucugau

SEQ ID NO: 22395 - RNA, 22 nt, Artificial Sequence
  Synthetic
aggaccucaggugauucugaug

SEQ ID NO: 22396 - RNA, 22 nt, Artificial Sequence
  Synthetic
ggaccucaggugauucugaugc

SEQ ID NO: 22397 - RNA, 22 nt, Artificial Sequence
  Synthetic
gaccucaggugauucugaugca

SEQ ID NO: 22398 - RNA, 22 nt, Artificial Sequence
  Synthetic
accucaggugauucugaugcac

SEQ ID NO: 22399 - RNA, 22 nt, Artificial Sequence
  Synthetic
ccucaggugauucugaugcaca

SEQ ID NO: 22400 - RNA, 22 nt, Artificial Sequence
  Synthetic
cucaggugauucugaugcacag

SEQ ID NO: 22401 - RNA, 22 nt, Artificial Sequence
  Synthetic
ucaggugauucugaugcacagc

SEQ ID NO: 22402 - RNA, 22 nt, Artificial Sequence
  Synthetic
caggugauucugaugcacagcu

SEQ ID NO: 22403 - RNA, 22 nt, Artificial Sequence
  Synthetic
aggugauucugaugcacagcuc

SEQ ID NO: 22404 - RNA, 22 nt, Artificial Sequence
  Synthetic
ggugauucugaugcacagcuca

SEQ ID NO: 22405 - RNA, 22 nt, Artificial Sequence
  Synthetic
gugauucugaugcacagcucag

SEQ ID NO: 22406 - RNA, 22 nt, Artificial Sequence
  Synthetic
ugauucugaugcacagcucagg

SEQ ID NO: 22407 - RNA, 22 nt, Artificial Sequence
  Synthetic
gauucugaugcacagcucaggu

SEQ ID NO: 22408 - RNA, 22 nt, Artificial Sequence
  Synthetic
auucugaugcacagcucagguu

SEQ ID NO: 22409 - RNA, 22 nt, Artificial Sequence
  Synthetic
uucugaugcacagcucagguug

SEQ ID NO: 22410 - RNA, 22 nt, Artificial Sequence
  Synthetic
ucugaugcacagcucagguuga

SEQ ID NO: 22411 - RNA, 22 nt, Artificial Sequence
  Synthetic
cugaugcacagcucagguugaa

SEQ ID NO: 22412 - RNA, 22 nt, Artificial Sequence
  Synthetic
ugaugcacagcucagguugaaa

SEQ ID NO: 22413 - RNA, 22 nt, Artificial Sequence
  Synthetic
gaugcacagcucagguugaaag

SEQ ID NO: 22414 - RNA, 22 nt, Artificial Sequence
  Synthetic
augcacagcucagguugaaagc

SEQ ID NO: 22415 - RNA, 22 nt, Artificial Sequence
  Synthetic
ugcacagcucagguugaaagca

SEQ ID NO: 22416 - RNA, 22 nt, Artificial Sequence
  Synthetic
gcacagcucagguugaaagcac

SEQ ID NO: 22417 - RNA, 22 nt, Artificial Sequence
  Synthetic
cacagcucagguugaaagcacu

SEQ ID NO: 22418 - RNA, 22 nt, Artificial Sequence
  Synthetic
acagcucagguugaaagcacug

SEQ ID NO: 22419 - RNA, 22 nt, Artificial Sequence
  Synthetic
cagcucagguugaaagcacuga

SEQ ID NO: 22420 - RNA, 22 nt, Artificial Sequence
  Synthetic
agcucagguugaaagcacugaa

SEQ ID NO: 22421 - RNA, 22 nt, Artificial Sequence
  Synthetic
gcucagguugaaagcacugaac

SEQ ID NO: 22422 - RNA, 22 nt, Artificial Sequence
  Synthetic
cucagguugaaagcacugaacu

SEQ ID NO: 22423 - RNA, 22 nt, Artificial Sequence
  Synthetic
ucagguugaaagcacugaacua

SEQ ID NO: 22424 - RNA, 22 nt, Artificial Sequence
  Synthetic
cagguugaaagcacugaacuaa

SEQ ID NO: 22425 - RNA, 22 nt, Artificial Sequence
  Synthetic
agguugaaagcacugaacuaaa

SEQ ID NO: 22426 - RNA, 22 nt, Artificial Sequence
  Synthetic
gguugaaagcacugaacuaaag

SEQ ID NO: 22427 - RNA, 22 nt, Artificial Sequence
  Synthetic
guugaaagcacugaacuaaagg

SEQ ID NO: 22428 - RNA, 22 nt, Artificial Sequence
  Synthetic
uugaaagcacugaacuaaagga

SEQ ID NO: 22429 - RNA, 22 nt, Artificial Sequence
  Synthetic
ugaaagcacugaacuaaaggaa

SEQ ID NO: 22430 - RNA, 22 nt, Artificial Sequence
  Synthetic
gaaagcacugaacuaaaggaag

SEQ ID NO: 22431 - RNA, 22 nt, Artificial Sequence
  Synthetic
aaagcacugaacuaaaggaagg

SEQ ID NO: 22432 - RNA, 22 nt, Artificial Sequence
  Synthetic
aagcacugaacuaaaggaagga

SEQ ID NO: 22433 - RNA, 22 nt, Artificial Sequence
  Synthetic
agcacugaacuaaaggaaggag

SEQ ID NO: 22434 - RNA, 22 nt, Artificial Sequence
  Synthetic
gcacugaacuaaaggaaggagc

SEQ ID NO: 22435 - RNA, 22 nt, Artificial Sequence
  Synthetic
cacugaacuaaaggaaggagcc

SEQ ID NO: 22436 - RNA, 22 nt, Artificial Sequence
  Synthetic
acugaacuaaaggaaggagccu

SEQ ID NO: 22437 - RNA, 22 nt, Artificial Sequence
  Synthetic
cugaacuaaaggaaggagccuu

SEQ ID NO: 22438 - RNA, 22 nt, Artificial Sequence
  Synthetic
ugaacuaaaggaaggagccuuu

SEQ ID NO: 22439 - RNA, 22 nt, Artificial Sequence
  Synthetic
gaacuaaaggaaggagccuuuu

SEQ ID NO: 22440 - RNA, 22 nt, Artificial Sequence
  Synthetic
aacuaaaggaaggagccuuuug

SEQ ID NO: 22441 - RNA, 22 nt, Artificial Sequence
  Synthetic
acuaaaggaaggagccuuuuga

SEQ ID NO: 22442 - RNA, 22 nt, Artificial Sequence
  Synthetic
cuaaaggaaggagccuuuugau

SEQ ID NO: 22443 - RNA, 22 nt, Artificial Sequence
  Synthetic
uaaaggaaggagccuuuugaua

SEQ ID NO: 22444 - RNA, 22 nt, Artificial Sequence
  Synthetic
aaaggaaggagccuuuugauau

SEQ ID NO: 22445 - RNA, 22 nt, Artificial Sequence
  Synthetic
aaggaaggagccuuuugauaug

SEQ ID NO: 22446 - RNA, 22 nt, Artificial Sequence
  Synthetic
aggaaggagccuuuugauaugc

SEQ ID NO: 22447 - RNA, 22 nt, Artificial Sequence
  Synthetic
ggaaggagccuuuugauaugca

SEQ ID NO: 22448 - RNA, 22 nt, Artificial Sequence
  Synthetic
gaaggagccuuuugauaugcau

SEQ ID NO: 22449 - RNA, 22 nt, Artificial Sequence
  Synthetic
aaggagccuuuugauaugcauu

SEQ ID NO: 22450 - RNA, 22 nt, Artificial Sequence
  Synthetic
aggagccuuuugauaugcauuc

SEQ ID NO: 22451 - RNA, 22 nt, Artificial Sequence
  Synthetic
ggagccuuuugauaugcauuca

SEQ ID NO: 22452 - RNA, 22 nt, Artificial Sequence
  Synthetic
gagccuuuugauaugcauucag

SEQ ID NO: 22453 - RNA, 22 nt, Artificial Sequence
  Synthetic
agccuuuugauaugcauucagg

SEQ ID NO: 22454 - RNA, 22 nt, Artificial Sequence
  Synthetic
gccuuuugauaugcauucagga

SEQ ID NO: 22455 - RNA, 22 nt, Artificial Sequence
  Synthetic
ccuuuugauaugcauucaggaa

SEQ ID NO: 22456 - RNA, 22 nt, Artificial Sequence
  Synthetic
cuuuugauaugcauucaggaag

SEQ ID NO: 22457 - RNA, 22 nt, Artificial Sequence
  Synthetic
uuuugauaugcauucaggaagc

SEQ ID NO: 22458 - RNA, 22 nt, Artificial Sequence
  Synthetic
uuugauaugcauucaggaagca

SEQ ID NO: 22459 - RNA, 22 nt, Artificial Sequence
  Synthetic
uugauaugcauucaggaagcag

SEQ ID NO: 22460 - RNA, 22 nt, Artificial Sequence
  Synthetic
ugauaugcauucaggaagcagc

SEQ ID NO: 22461 - RNA, 22 nt, Artificial Sequence
  Synthetic
gauaugcauucaggaagcagcc

SEQ ID NO: 22462 - RNA, 22 nt, Artificial Sequence
  Synthetic
auaugcauucaggaagcagcca

SEQ ID NO: 22463 - RNA, 22 nt, Artificial Sequence
  Synthetic
uaugcauucaggaagcagccaa

SEQ ID NO: 22464 - RNA, 22 nt, Artificial Sequence
  Synthetic
augcauucaggaagcagccaac

SEQ ID NO: 22465 - RNA, 22 nt, Artificial Sequence
  Synthetic
ugcauucaggaagcagccaacc

SEQ ID NO: 22466 - RNA, 22 nt, Artificial Sequence
  Synthetic
gcauucaggaagcagccaaccu

SEQ ID NO: 22467 - RNA, 22 nt, Artificial Sequence
  Synthetic
cauucaggaagcagccaaccua

SEQ ID NO: 22468 - RNA, 22 nt, Artificial Sequence
  Synthetic
auucaggaagcagccaaccuaa

SEQ ID NO: 22469 - RNA, 22 nt, Artificial Sequence
  Synthetic
uucaggaagcagccaaccuaau

SEQ ID NO: 22470 - RNA, 22 nt, Artificial Sequence
  Synthetic
ucaggaagcagccaaccuaaug

SEQ ID NO: 22471 - RNA, 22 nt, Artificial Sequence
  Synthetic
caggaagcagccaaccuaaugc

SEQ ID NO: 22472 - RNA, 22 nt, Artificial Sequence
  Synthetic
aggaagcagccaaccuaaugca

SEQ ID NO: 22473 - RNA, 22 nt, Artificial Sequence
  Synthetic
ggaagcagccaaccuaaugcaa

SEQ ID NO: 22474 - RNA, 22 nt, Artificial Sequence
  Synthetic
gaagcagccaaccuaaugcaau

SEQ ID NO: 22475 - RNA, 22 nt, Artificial Sequence
  Synthetic
aagcagccaaccuaaugcaauc

SEQ ID NO: 22476 - RNA, 22 nt, Artificial Sequence
  Synthetic
agcagccaaccuaaugcaauca

SEQ ID NO: 22477 - RNA, 22 nt, Artificial Sequence
  Synthetic
gcagccaaccuaaugcaaucaa

SEQ ID NO: 22478 - RNA, 22 nt, Artificial Sequence
  Synthetic
cagccaaccuaaugcaaucaag

SEQ ID NO: 22479 - RNA, 22 nt, Artificial Sequence
  Synthetic
agccaaccuaaugcaaucaaga

SEQ ID NO: 22480 - RNA, 22 nt, Artificial Sequence
  Synthetic
gccaaccuaaugcaaucaagaa

SEQ ID NO: 22481 - RNA, 22 nt, Artificial Sequence
  Synthetic
ccaaccuaaugcaaucaagaag

SEQ ID NO: 22482 - RNA, 22 nt, Artificial Sequence
  Synthetic
caaccuaaugcaaucaagaaga

SEQ ID NO: 22483 - RNA, 22 nt, Artificial Sequence
  Synthetic
aaccuaaugcaaucaagaagag

SEQ ID NO: 22484 - RNA, 22 nt, Artificial Sequence
  Synthetic
accuaaugcaaucaagaagaga

SEQ ID NO: 22485 - RNA, 22 nt, Artificial Sequence
  Synthetic
ccuaaugcaaucaagaagagau

SEQ ID NO: 22486 - RNA, 22 nt, Artificial Sequence
  Synthetic
cuaaugcaaucaagaagagaua

SEQ ID NO: 22487 - RNA, 22 nt, Artificial Sequence
  Synthetic
uaaugcaaucaagaagagauag

SEQ ID NO: 22488 - RNA, 22 nt, Artificial Sequence
  Synthetic
aaugcaaucaagaagagauagu

SEQ ID NO: 22489 - RNA, 22 nt, Artificial Sequence
  Synthetic
augcaaucaagaagagauaguu

SEQ ID NO: 22490 - RNA, 22 nt, Artificial Sequence
  Synthetic
ugcaaucaagaagagauaguuc

SEQ ID NO: 22491 - RNA, 22 nt, Artificial Sequence
  Synthetic
gcaaucaagaagagauaguucc

SEQ ID NO: 22492 - RNA, 22 nt, Artificial Sequence
  Synthetic
caaucaagaagagauaguuccu

SEQ ID NO: 22493 - RNA, 22 nt, Artificial Sequence
  Synthetic
aaucaagaagagauaguuccua

SEQ ID NO: 22494 - RNA, 22 nt, Artificial Sequence
  Synthetic
aucaagaagagauaguuccuaa

SEQ ID NO: 22495 - RNA, 22 nt, Artificial Sequence
  Synthetic
ucaagaagagauaguuccuaac

SEQ ID NO: 22496 - RNA, 22 nt, Artificial Sequence
  Synthetic
caagaagagauaguuccuaacu

SEQ ID NO: 22497 - RNA, 22 nt, Artificial Sequence
  Synthetic
aagaagagauaguuccuaacug

SEQ ID NO: 22498 - RNA, 22 nt, Artificial Sequence
  Synthetic
agaagagauaguuccuaacugu

SEQ ID NO: 22499 - RNA, 22 nt, Artificial Sequence
  Synthetic
gaagagauaguuccuaacuguc

SEQ ID NO: 22500 - RNA, 22 nt, Artificial Sequence
  Synthetic
aagagauaguuccuaacuguca

SEQ ID NO: 22501 - RNA, 22 nt, Artificial Sequence
  Synthetic
agagauaguuccuaacugucag

SEQ ID NO: 22502 - RNA, 22 nt, Artificial Sequence
  Synthetic
gagauaguuccuaacugucagc

SEQ ID NO: 22503 - RNA, 22 nt, Artificial Sequence
  Synthetic
agauaguuccuaacugucagcc

SEQ ID NO: 22504 - RNA, 22 nt, Artificial Sequence
  Synthetic
gauaguuccuaacugucagccu

SEQ ID NO: 22505 - RNA, 22 nt, Artificial Sequence
  Synthetic
auaguuccuaacugucagccuu

SEQ ID NO: 22506 - RNA, 22 nt, Artificial Sequence
  Synthetic
uaguuccuaacugucagccuug

SEQ ID NO: 22507 - RNA, 22 nt, Artificial Sequence
  Synthetic
aguuccuaacugucagccuugu

SEQ ID NO: 22508 - RNA, 22 nt, Artificial Sequence
  Synthetic
guuccuaacugucagccuugug

SEQ ID NO: 22509 - RNA, 22 nt, Artificial Sequence
  Synthetic
uuccuaacugucagccuugugg

SEQ ID NO: 22510 - RNA, 22 nt, Artificial Sequence
  Synthetic
uccuaacugucagccuuguggc

SEQ ID NO: 22511 - RNA, 22 nt, Artificial Sequence
  Synthetic
ccuaacugucagccuuguggcu

SEQ ID NO: 22512 - RNA, 22 nt, Artificial Sequence
  Synthetic
cuaacugucagccuuguggcua

SEQ ID NO: 22513 - RNA, 22 nt, Artificial Sequence
  Synthetic
uaacugucagccuuguggcuaa

SEQ ID NO: 22514 - RNA, 22 nt, Artificial Sequence
  Synthetic
aacugucagccuuguggcuaag

SEQ ID NO: 22515 - RNA, 22 nt, Artificial Sequence
  Synthetic
acugucagccuuguggcuaagu

SEQ ID NO: 22516 - RNA, 22 nt, Artificial Sequence
  Synthetic
cugucagccuuguggcuaagug

SEQ ID NO: 22517 - RNA, 22 nt, Artificial Sequence
  Synthetic
ugucagccuuguggcuaaguga

SEQ ID NO: 22518 - RNA, 22 nt, Artificial Sequence
  Synthetic
gucagccuuguggcuaagugag

SEQ ID NO: 22519 - RNA, 22 nt, Artificial Sequence
  Synthetic
ucagccuuguggcuaagugagg

SEQ ID NO: 22520 - RNA, 22 nt, Artificial Sequence
  Synthetic
cagccuuguggcuaagugagga

SEQ ID NO: 22521 - RNA, 22 nt, Artificial Sequence
  Synthetic
agccuuguggcuaagugaggaa

SEQ ID NO: 22522 - RNA, 22 nt, Artificial Sequence
  Synthetic
gccuuguggcuaagugaggaag

SEQ ID NO: 22523 - RNA, 22 nt, Artificial Sequence
  Synthetic
ccuuguggcuaagugaggaaga

SEQ ID NO: 22524 - RNA, 22 nt, Artificial Sequence
  Synthetic
cuuguggcuaagugaggaagag

SEQ ID NO: 22525 - RNA, 22 nt, Artificial Sequence
  Synthetic
uuguggcuaagugaggaagaga

SEQ ID NO: 22526 - RNA, 22 nt, Artificial Sequence
  Synthetic
uguggcuaagugaggaagagau

SEQ ID NO: 22527 - RNA, 22 nt, Artificial Sequence
  Synthetic
guggcuaagugaggaagagaua

SEQ ID NO: 22528 - RNA, 22 nt, Artificial Sequence
  Synthetic
uggcuaagugaggaagagauaa

SEQ ID NO: 22529 - RNA, 22 nt, Artificial Sequence
  Synthetic
ggcuaagugaggaagagauaau

SEQ ID NO: 22530 - RNA, 22 nt, Artificial Sequence
  Synthetic
gcuaagugaggaagagauaauu

SEQ ID NO: 22531 - RNA, 22 nt, Artificial Sequence
  Synthetic
cuaagugaggaagagauaauuu

SEQ ID NO: 22532 - RNA, 22 nt, Artificial Sequence
  Synthetic
uaagugaggaagagauaauuug

SEQ ID NO: 22533 - RNA, 22 nt, Artificial Sequence
  Synthetic
aagugaggaagagauaauuugg

SEQ ID NO: 22534 - RNA, 22 nt, Artificial Sequence
  Synthetic
agugaggaagagauaauuuggc

SEQ ID NO: 22535 - RNA, 22 nt, Artificial Sequence
  Synthetic
gugaggaagagauaauuuggca

SEQ ID NO: 22536 - RNA, 22 nt, Artificial Sequence
  Synthetic
ugaggaagagauaauuuggcaa

SEQ ID NO: 22537 - RNA, 22 nt, Artificial Sequence
  Synthetic
gaggaagagauaauuuggcaaa

SEQ ID NO: 22538 - RNA, 22 nt, Artificial Sequence
  Synthetic
aggaagagauaauuuggcaaac

SEQ ID NO: 22539 - RNA, 22 nt, Artificial Sequence
  Synthetic
ggaagagauaauuuggcaaacc

SEQ ID NO: 22540 - RNA, 22 nt, Artificial Sequence
  Synthetic
gaagagauaauuuggcaaacca

SEQ ID NO: 22541 - RNA, 22 nt, Artificial Sequence
  Synthetic
aagagauaauuuggcaaaccau

SEQ ID NO: 22542 - RNA, 22 nt, Artificial Sequence
  Synthetic
agagauaauuuggcaaaccaug

SEQ ID NO: 22543 - RNA, 22 nt, Artificial Sequence
  Synthetic
gagauaauuuggcaaaccaugg

SEQ ID NO: 22544 - RNA, 22 nt, Artificial Sequence
  Synthetic
agauaauuuggcaaaccaugga

SEQ ID NO: 22545 - RNA, 22 nt, Artificial Sequence
  Synthetic
gauaauuuggcaaaccauggag

SEQ ID NO: 22546 - RNA, 22 nt, Artificial Sequence
  Synthetic
auaauuuggcaaaccauggaga

SEQ ID NO: 22547 - RNA, 22 nt, Artificial Sequence
  Synthetic
uaauuuggcaaaccauggagac

SEQ ID NO: 22548 - RNA, 22 nt, Artificial Sequence
  Synthetic
aauuuggcaaaccauggagacc

SEQ ID NO: 22549 - RNA, 22 nt, Artificial Sequence
  Synthetic
auuuggcaaaccauggagaccc

SEQ ID NO: 22550 - RNA, 22 nt, Artificial Sequence
  Synthetic
uuuggcaaaccauggagacccc

SEQ ID NO: 22551 - RNA, 22 nt, Artificial Sequence
  Synthetic
uuggcaaaccauggagacccca

SEQ ID NO: 22552 - RNA, 22 nt, Artificial Sequence
  Synthetic
uggcaaaccauggagaccccac

SEQ ID NO: 22553 - RNA, 22 nt, Artificial Sequence
  Synthetic
ggcaaaccauggagaccccaca

SEQ ID NO: 22554 - RNA, 22 nt, Artificial Sequence
  Synthetic
gcaaaccauggagaccccacac

SEQ ID NO: 22555 - RNA, 22 nt, Artificial Sequence
  Synthetic
caaaccauggagaccccacaca

SEQ ID NO: 22556 - RNA, 22 nt, Artificial Sequence
  Synthetic
aaaccauggagaccccacacaa

SEQ ID NO: 22557 - RNA, 22 nt, Artificial Sequence
  Synthetic
aaccauggagaccccacacaac

SEQ ID NO: 22558 - RNA, 22 nt, Artificial Sequence
  Synthetic
accauggagaccccacacaaca

SEQ ID NO: 22559 - RNA, 22 nt, Artificial Sequence
  Synthetic
ccauggagaccccacacaacac

SEQ ID NO: 22560 - RNA, 22 nt, Artificial Sequence
  Synthetic
cauggagaccccacacaacaca

SEQ ID NO: 22561 - RNA, 22 nt, Artificial Sequence
  Synthetic
auggagaccccacacaacacac

SEQ ID NO: 22562 - RNA, 22 nt, Artificial Sequence
  Synthetic
uggagaccccacacaacacaca

SEQ ID NO: 22563 - RNA, 22 nt, Artificial Sequence
  Synthetic
ggagaccccacacaacacacag

SEQ ID NO: 22564 - RNA, 22 nt, Artificial Sequence
  Synthetic
gagaccccacacaacacacaga

SEQ ID NO: 22565 - RNA, 22 nt, Artificial Sequence
  Synthetic
agaccccacacaacacacagag

SEQ ID NO: 22566 - RNA, 22 nt, Artificial Sequence
  Synthetic
gaccccacacaacacacagagc

SEQ ID NO: 22567 - RNA, 22 nt, Artificial Sequence
  Synthetic
accccacacaacacacagagcu

SEQ ID NO: 22568 - RNA, 22 nt, Artificial Sequence
  Synthetic
ccccacacaacacacagagcug

SEQ ID NO: 22569 - RNA, 22 nt, Artificial Sequence
  Synthetic
cccacacaacacacagagcugu

SEQ ID NO: 22570 - RNA, 22 nt, Artificial Sequence
  Synthetic
ccacacaacacacagagcugua

SEQ ID NO: 22571 - RNA, 22 nt, Artificial Sequence
  Synthetic
cacacaacacacagagcuguaa

SEQ ID NO: 22572 - RNA, 22 nt, Artificial Sequence
  Synthetic
acacaacacacagagcuguaau

SEQ ID NO: 22573 - RNA, 22 nt, Artificial Sequence
  Synthetic
cacaacacacagagcuguaauc

SEQ ID NO: 22574 - RNA, 22 nt, Artificial Sequence
  Synthetic
acaacacacagagcuguaaucu

SEQ ID NO: 22575 - RNA, 22 nt, Artificial Sequence
  Synthetic
caacacacagagcuguaaucua

SEQ ID NO: 22576 - RNA, 22 nt, Artificial Sequence
  Synthetic
aacacacagagcuguaaucuag

SEQ ID NO: 22577 - RNA, 22 nt, Artificial Sequence
  Synthetic
acacacagagcuguaaucuaga

SEQ ID NO: 22578 - RNA, 22 nt, Artificial Sequence
  Synthetic
cacacagagcuguaaucuagag

SEQ ID NO: 22579 - RNA, 22 nt, Artificial Sequence
  Synthetic
acacagagcuguaaucuagagc

SEQ ID NO: 22580 - RNA, 22 nt, Artificial Sequence
  Synthetic
cacagagcuguaaucuagagca

SEQ ID NO: 22581 - RNA, 22 nt, Artificial Sequence
  Synthetic
acagagcuguaaucuagagcaa

SEQ ID NO: 22582 - RNA, 22 nt, Artificial Sequence
  Synthetic
cagagcuguaaucuagagcaag

SEQ ID NO: 22583 - RNA, 22 nt, Artificial Sequence
  Synthetic
agagcuguaaucuagagcaagg

SEQ ID NO: 22584 - RNA, 22 nt, Artificial Sequence
  Synthetic
gagcuguaaucuagagcaagga

SEQ ID NO: 22585 - RNA, 22 nt, Artificial Sequence
  Synthetic
agcuguaaucuagagcaaggag

SEQ ID NO: 22586 - RNA, 22 nt, Artificial Sequence
  Synthetic
gcuguaaucuagagcaaggaga

SEQ ID NO: 22587 - RNA, 22 nt, Artificial Sequence
  Synthetic
cuguaaucuagagcaaggagac

SEQ ID NO: 22588 - RNA, 22 nt, Artificial Sequence
  Synthetic
uguaaucuagagcaaggagaca

SEQ ID NO: 22589 - RNA, 22 nt, Artificial Sequence
  Synthetic
guaaucuagagcaaggagacag

SEQ ID NO: 22590 - RNA, 22 nt, Artificial Sequence
  Synthetic
uaaucuagagcaaggagacaga

SEQ ID NO: 22591 - RNA, 22 nt, Artificial Sequence
  Synthetic
aaucuagagcaaggagacagac

SEQ ID NO: 22592 - RNA, 22 nt, Artificial Sequence
  Synthetic
aucuagagcaaggagacagaca

SEQ ID NO: 22593 - RNA, 22 nt, Artificial Sequence
  Synthetic
ucuagagcaaggagacagacaa

SEQ ID NO: 22594 - RNA, 22 nt, Artificial Sequence
  Synthetic
cuagagcaaggagacagacaac

SEQ ID NO: 22595 - RNA, 22 nt, Artificial Sequence
  Synthetic
uagagcaaggagacagacaacu

SEQ ID NO: 22596 - RNA, 22 nt, Artificial Sequence
  Synthetic
agagcaaggagacagacaacuc

SEQ ID NO: 22597 - RNA, 22 nt, Artificial Sequence
  Synthetic
gagcaaggagacagacaacucc

SEQ ID NO: 22598 - RNA, 22 nt, Artificial Sequence
  Synthetic
agcaaggagacagacaacuccc

SEQ ID NO: 22599 - RNA, 22 nt, Artificial Sequence
  Synthetic
gcaaggagacagacaacuccca

SEQ ID NO: 22600 - RNA, 22 nt, Artificial Sequence
  Synthetic
caaggagacagacaacucccaa

SEQ ID NO: 22601 - RNA, 22 nt, Artificial Sequence
  Synthetic
aaggagacagacaacucccaaa

SEQ ID NO: 22602 - RNA, 22 nt, Artificial Sequence
  Synthetic
aggagacagacaacucccaaac

SEQ ID NO: 22603 - RNA, 22 nt, Artificial Sequence
  Synthetic
ggagacagacaacucccaaacc

SEQ ID NO: 22604 - RNA, 22 nt, Artificial Sequence
  Synthetic
gagacagacaacucccaaaccu

SEQ ID NO: 22605 - RNA, 22 nt, Artificial Sequence
  Synthetic
agacagacaacucccaaaccua

SEQ ID NO: 22606 - RNA, 22 nt, Artificial Sequence
  Synthetic
gacagacaacucccaaaccuac

SEQ ID NO: 22607 - RNA, 22 nt, Artificial Sequence
  Synthetic
acagacaacucccaaaccuaca

SEQ ID NO: 22608 - RNA, 22 nt, Artificial Sequence
  Synthetic
cagacaacucccaaaccuacag

SEQ ID NO: 22609 - RNA, 22 nt, Artificial Sequence
  Synthetic
agacaacucccaaaccuacagu

SEQ ID NO: 22610 - RNA, 22 nt, Artificial Sequence
  Synthetic
gacaacucccaaaccuacaguc

SEQ ID NO: 22611 - RNA, 22 nt, Artificial Sequence
  Synthetic
acaacucccaaaccuacaguca

SEQ ID NO: 22612 - RNA, 22 nt, Artificial Sequence
  Synthetic
caacucccaaaccuacagucag

SEQ ID NO: 22613 - RNA, 22 nt, Artificial Sequence
  Synthetic
aacucccaaaccuacagucagc

SEQ ID NO: 22614 - RNA, 22 nt, Artificial Sequence
  Synthetic
acucccaaaccuacagucagcu

SEQ ID NO: 22615 - RNA, 22 nt, Artificial Sequence
  Synthetic
cucccaaaccuacagucagcuc

SEQ ID NO: 22616 - RNA, 22 nt, Artificial Sequence
  Synthetic
ucccaaaccuacagucagcucc

SEQ ID NO: 22617 - RNA, 22 nt, Artificial Sequence
  Synthetic
cccaaaccuacagucagcucca

SEQ ID NO: 22618 - RNA, 22 nt, Artificial Sequence
  Synthetic
ccaaaccuacagucagcuccaa

SEQ ID NO: 22619 - RNA, 22 nt, Artificial Sequence
  Synthetic
caaaccuacagucagcuccaag

SEQ ID NO: 22620 - RNA, 22 nt, Artificial Sequence
  Synthetic
aaaccuacagucagcuccaaga

SEQ ID NO: 22621 - RNA, 22 nt, Artificial Sequence
  Synthetic
aaccuacagucagcuccaagag

SEQ ID NO: 22622 - RNA, 22 nt, Artificial Sequence
  Synthetic
accuacagucagcuccaagagc

SEQ ID NO: 22623 - RNA, 22 nt, Artificial Sequence
  Synthetic
ccuacagucagcuccaagagcc

SEQ ID NO: 22624 - RNA, 22 nt, Artificial Sequence
  Synthetic
cuacagucagcuccaagagccc

SEQ ID NO: 22625 - RNA, 22 nt, Artificial Sequence
  Synthetic
uacagucagcuccaagagcccu

SEQ ID NO: 22626 - RNA, 22 nt, Artificial Sequence
  Synthetic
acagucagcuccaagagcccua

SEQ ID NO: 22627 - RNA, 22 nt, Artificial Sequence
  Synthetic
cagucagcuccaagagcccuag

SEQ ID NO: 22628 - RNA, 22 nt, Artificial Sequence
  Synthetic
agucagcuccaagagcccuagc

SEQ ID NO: 22629 - RNA, 22 nt, Artificial Sequence
  Synthetic
gucagcuccaagagcccuagca

SEQ ID NO: 22630 - RNA, 22 nt, Artificial Sequence
  Synthetic
ucagcuccaagagcccuagcac

SEQ ID NO: 22631 - RNA, 22 nt, Artificial Sequence
  Synthetic
cagcuccaagagcccuagcacc

SEQ ID NO: 22632 - RNA, 22 nt, Artificial Sequence
  Synthetic
agcuccaagagcccuagcaccu

SEQ ID NO: 22633 - RNA, 22 nt, Artificial Sequence
  Synthetic
gcuccaagagcccuagcaccuu

SEQ ID NO: 22634 - RNA, 22 nt, Artificial Sequence
  Synthetic
cuccaagagcccuagcaccuuu

SEQ ID NO: 22635 - RNA, 22 nt, Artificial Sequence
  Synthetic
uccaagagcccuagcaccuuuc

SEQ ID NO: 22636 - RNA, 22 nt, Artificial Sequence
  Synthetic
ccaagagcccuagcaccuuuca

SEQ ID NO: 22637 - RNA, 22 nt, Artificial Sequence
  Synthetic
caagagcccuagcaccuuucau

SEQ ID NO: 22638 - RNA, 22 nt, Artificial Sequence
  Synthetic
aagagcccuagcaccuuucaug

SEQ ID NO: 22639 - RNA, 22 nt, Artificial Sequence
  Synthetic
agagcccuagcaccuuucaugu

SEQ ID NO: 22640 - RNA, 22 nt, Artificial Sequence
  Synthetic
gagcccuagcaccuuucaugug

SEQ ID NO: 22641 - RNA, 22 nt, Artificial Sequence
  Synthetic
agcccuagcaccuuucaugugc

SEQ ID NO: 22642 - RNA, 22 nt, Artificial Sequence
  Synthetic
gcccuagcaccuuucaugugcu

SEQ ID NO: 22643 - RNA, 22 nt, Artificial Sequence
  Synthetic
cccuagcaccuuucaugugcuu

SEQ ID NO: 22644 - RNA, 22 nt, Artificial Sequence
  Synthetic
ccuagcaccuuucaugugcuuu

SEQ ID NO: 22645 - RNA, 22 nt, Artificial Sequence
  Synthetic
cuagcaccuuucaugugcuuuu

SEQ ID NO: 22646 - RNA, 22 nt, Artificial Sequence
  Synthetic
uagcaccuuucaugugcuuuuc

SEQ ID NO: 22647 - RNA, 22 nt, Artificial Sequence
  Synthetic
agcaccuuucaugugcuuuucc

SEQ ID NO: 22648 - RNA, 22 nt, Artificial Sequence
  Synthetic
gcaccuuucaugugcuuuuccu

SEQ ID NO: 22649 - RNA, 22 nt, Artificial Sequence
  Synthetic
caccuuucaugugcuuuuccug

SEQ ID NO: 22650 - RNA, 22 nt, Artificial Sequence
  Synthetic
accuuucaugugcuuuuccuga

SEQ ID NO: 22651 - RNA, 22 nt, Artificial Sequence
  Synthetic
ccuuucaugugcuuuuccugaa

SEQ ID NO: 22652 - RNA, 22 nt, Artificial Sequence
  Synthetic
cuuucaugugcuuuuccugaaa

SEQ ID NO: 22653 - RNA, 22 nt, Artificial Sequence
  Synthetic
uuucaugugcuuuuccugaaag

SEQ ID NO: 22654 - RNA, 22 nt, Artificial Sequence
  Synthetic
uucaugugcuuuuccugaaagc

SEQ ID NO: 22655 - RNA, 22 nt, Artificial Sequence
  Synthetic
ucaugugcuuuuccugaaagcu

SEQ ID NO: 22656 - RNA, 22 nt, Artificial Sequence
  Synthetic
caugugcuuuuccugaaagcug

SEQ ID NO: 22657 - RNA, 22 nt, Artificial Sequence
  Synthetic
augugcuuuuccugaaagcuga

SEQ ID NO: 22658 - RNA, 22 nt, Artificial Sequence
  Synthetic
ugugcuuuuccugaaagcugau

SEQ ID NO: 22659 - RNA, 22 nt, Artificial Sequence
  Synthetic
gugcuuuuccugaaagcugaug

SEQ ID NO: 22660 - RNA, 22 nt, Artificial Sequence
  Synthetic
ugcuuuuccugaaagcugaugu

SEQ ID NO: 22661 - RNA, 22 nt, Artificial Sequence
  Synthetic
gcuuuuccugaaagcugaugug

SEQ ID NO: 22662 - RNA, 22 nt, Artificial Sequence
  Synthetic
cuuuuccugaaagcugaugugu

SEQ ID NO: 22663 - RNA, 22 nt, Artificial Sequence
  Synthetic
uuuuccugaaagcugaugugug

SEQ ID NO: 22664 - RNA, 22 nt, Artificial Sequence
  Synthetic
uuuccugaaagcugaugugugc

SEQ ID NO: 22665 - RNA, 22 nt, Artificial Sequence
  Synthetic
uuccugaaagcugaugugugcc

SEQ ID NO: 22666 - RNA, 22 nt, Artificial Sequence
  Synthetic
uccugaaagcugaugugugcca

SEQ ID NO: 22667 - RNA, 22 nt, Artificial Sequence
  Synthetic
ccugaaagcugaugugugccau

SEQ ID NO: 22668 - RNA, 22 nt, Artificial Sequence
  Synthetic
cugaaagcugaugugugccauc

SEQ ID NO: 22669 - RNA, 22 nt, Artificial Sequence
  Synthetic
ugaaagcugaugugugccaucc

SEQ ID NO: 22670 - RNA, 22 nt, Artificial Sequence
  Synthetic
gaaagcugaugugugccaucca

SEQ ID NO: 22671 - RNA, 22 nt, Artificial Sequence
  Synthetic
aaagcugaugugugccauccau

SEQ ID NO: 22672 - RNA, 22 nt, Artificial Sequence
  Synthetic
aagcugaugugugccauccaua

SEQ ID NO: 22673 - RNA, 22 nt, Artificial Sequence
  Synthetic
agcugaugugugccauccauaa

SEQ ID NO: 22674 - RNA, 22 nt, Artificial Sequence
  Synthetic
gcugaugugugccauccauaaa

SEQ ID NO: 22675 - RNA, 22 nt, Artificial Sequence
  Synthetic
cugaugugugccauccauaaag

SEQ ID NO: 22676 - RNA, 22 nt, Artificial Sequence
  Synthetic
ugaugugugccauccauaaaga

SEQ ID NO: 22677 - RNA, 22 nt, Artificial Sequence
  Synthetic
gaugugugccauccauaaagau

SEQ ID NO: 22678 - RNA, 22 nt, Artificial Sequence
  Synthetic
augugugccauccauaaagauc

SEQ ID NO: 22679 - RNA, 22 nt, Artificial Sequence
  Synthetic
ugugugccauccauaaagauca

SEQ ID NO: 22680 - RNA, 22 nt, Artificial Sequence
  Synthetic
gugugccauccauaaagaucac

SEQ ID NO: 22681 - RNA, 22 nt, Artificial Sequence
  Synthetic
ugugccauccauaaagaucaca

SEQ ID NO: 22682 - RNA, 22 nt, Artificial Sequence
  Synthetic
gugccauccauaaagaucacag

SEQ ID NO: 22683 - RNA, 22 nt, Artificial Sequence
  Synthetic
ugccauccauaaagaucacagc

SEQ ID NO: 22684 - RNA, 22 nt, Artificial Sequence
  Synthetic
gccauccauaaagaucacagcu

SEQ ID NO: 22685 - RNA, 22 nt, Artificial Sequence
  Synthetic
ccauccauaaagaucacagcug

SEQ ID NO: 22686 - RNA, 22 nt, Artificial Sequence
  Synthetic
cauccauaaagaucacagcugg

SEQ ID NO: 22687 - RNA, 22 nt, Artificial Sequence
  Synthetic
auccauaaagaucacagcuggg

SEQ ID NO: 22688 - RNA, 22 nt, Artificial Sequence
  Synthetic
uccauaaagaucacagcugggc

SEQ ID NO: 22689 - RNA, 22 nt, Artificial Sequence
  Synthetic
ccauaaagaucacagcugggcc

SEQ ID NO: 22690 - RNA, 22 nt, Artificial Sequence
  Synthetic
cauaaagaucacagcugggccc

SEQ ID NO: 22691 - RNA, 22 nt, Artificial Sequence
  Synthetic
auaaagaucacagcugggccca

SEQ ID NO: 22692 - RNA, 22 nt, Artificial Sequence
  Synthetic
uaaagaucacagcugggcccac

SEQ ID NO: 22693 - RNA, 22 nt, Artificial Sequence
  Synthetic
aaagaucacagcugggcccacc

SEQ ID NO: 22694 - RNA, 22 nt, Artificial Sequence
  Synthetic
aagaucacagcugggcccacca

SEQ ID NO: 22695 - RNA, 22 nt, Artificial Sequence
  Synthetic
agaucacagcugggcccaccaa

SEQ ID NO: 22696 - RNA, 22 nt, Artificial Sequence
  Synthetic
gaucacagcugggcccaccaag

SEQ ID NO: 22697 - RNA, 22 nt, Artificial Sequence
  Synthetic
aucacagcugggcccaccaaga

SEQ ID NO: 22698 - RNA, 22 nt, Artificial Sequence
  Synthetic
ucacagcugggcccaccaagag

SEQ ID NO: 22699 - RNA, 22 nt, Artificial Sequence
  Synthetic
cacagcugggcccaccaagagg

SEQ ID NO: 22700 - RNA, 22 nt, Artificial Sequence
  Synthetic
acagcugggcccaccaagagga

SEQ ID NO: 22701 - RNA, 22 nt, Artificial Sequence
  Synthetic
cagcugggcccaccaagaggaa

SEQ ID NO: 22702 - RNA, 22 nt, Artificial Sequence
  Synthetic
agcugggcccaccaagaggaag

SEQ ID NO: 22703 - RNA, 22 nt, Artificial Sequence
  Synthetic
gcugggcccaccaagaggaagc

SEQ ID NO: 22704 - RNA, 22 nt, Artificial Sequence
  Synthetic
cugggcccaccaagaggaagcu

SEQ ID NO: 22705 - RNA, 22 nt, Artificial Sequence
  Synthetic
ugggcccaccaagaggaagcug

SEQ ID NO: 22706 - RNA, 22 nt, Artificial Sequence
  Synthetic
gggcccaccaagaggaagcugu

SEQ ID NO: 22707 - RNA, 22 nt, Artificial Sequence
  Synthetic
ggcccaccaagaggaagcugug

SEQ ID NO: 22708 - RNA, 22 nt, Artificial Sequence
  Synthetic
gcccaccaagaggaagcugugc

SEQ ID NO: 22709 - RNA, 22 nt, Artificial Sequence
  Synthetic
cccaccaagaggaagcugugca

SEQ ID NO: 22710 - RNA, 22 nt, Artificial Sequence
  Synthetic
ccaccaagaggaagcugugcag

SEQ ID NO: 22711 - RNA, 22 nt, Artificial Sequence
  Synthetic
caccaagaggaagcugugcaga

SEQ ID NO: 22712 - RNA, 22 nt, Artificial Sequence
  Synthetic
accaagaggaagcugugcagag

SEQ ID NO: 22713 - RNA, 22 nt, Artificial Sequence
  Synthetic
ccaagaggaagcugugcagaga

SEQ ID NO: 22714 - RNA, 22 nt, Artificial Sequence
  Synthetic
caagaggaagcugugcagagau

SEQ ID NO: 22715 - RNA, 22 nt, Artificial Sequence
  Synthetic
aagaggaagcugugcagagaua

SEQ ID NO: 22716 - RNA, 22 nt, Artificial Sequence
  Synthetic
agaggaagcugugcagagauaa

SEQ ID NO: 22717 - RNA, 22 nt, Artificial Sequence
  Synthetic
gaggaagcugugcagagauaau

SEQ ID NO: 22718 - RNA, 22 nt, Artificial Sequence
  Synthetic
aggaagcugugcagagauaaug

SEQ ID NO: 22719 - RNA, 22 nt, Artificial Sequence
  Synthetic
ggaagcugugcagagauaaugc

SEQ ID NO: 22720 - RNA, 22 nt, Artificial Sequence
  Synthetic
gaagcugugcagagauaaugca

SEQ ID NO: 22721 - RNA, 22 nt, Artificial Sequence
  Synthetic
aagcugugcagagauaaugcag

SEQ ID NO: 22722 - RNA, 22 nt, Artificial Sequence
  Synthetic
agcugugcagagauaaugcagc

SEQ ID NO: 22723 - RNA, 22 nt, Artificial Sequence
  Synthetic
gcugugcagagauaaugcagcc

SEQ ID NO: 22724 - RNA, 22 nt, Artificial Sequence
  Synthetic
cugugcagagauaaugcagccc

SEQ ID NO: 22725 - RNA, 22 nt, Artificial Sequence
  Synthetic
ugugcagagauaaugcagcccu

SEQ ID NO: 22726 - RNA, 22 nt, Artificial Sequence
  Synthetic
gugcagagauaaugcagcccuc

SEQ ID NO: 22727 - RNA, 22 nt, Artificial Sequence
  Synthetic
ugcagagauaaugcagcccuca

SEQ ID NO: 22728 - RNA, 22 nt, Artificial Sequence
  Synthetic
gcagagauaaugcagcccucac

SEQ ID NO: 22729 - RNA, 22 nt, Artificial Sequence
  Synthetic
cagagauaaugcagcccucaca

SEQ ID NO: 22730 - RNA, 22 nt, Artificial Sequence
  Synthetic
agagauaaugcagcccucacag

SEQ ID NO: 22731 - RNA, 22 nt, Artificial Sequence
  Synthetic
gagauaaugcagcccucacagc

SEQ ID NO: 22732 - RNA, 22 nt, Artificial Sequence
  Synthetic
agauaaugcagcccucacagcc

SEQ ID NO: 22733 - RNA, 22 nt, Artificial Sequence
  Synthetic
gauaaugcagcccucacagcca

SEQ ID NO: 22734 - RNA, 22 nt, Artificial Sequence
  Synthetic
auaaugcagcccucacagccac

SEQ ID NO: 22735 - RNA, 22 nt, Artificial Sequence
  Synthetic
uaaugcagcccucacagccacu

SEQ ID NO: 22736 - RNA, 22 nt, Artificial Sequence
  Synthetic
aaugcagcccucacagccacuu

SEQ ID NO: 22737 - RNA, 22 nt, Artificial Sequence
  Synthetic
augcagcccucacagccacuuc

SEQ ID NO: 22738 - RNA, 22 nt, Artificial Sequence
  Synthetic
ugcagcccucacagccacuucc

SEQ ID NO: 22739 - RNA, 22 nt, Artificial Sequence
  Synthetic
gcagcccucacagccacuuccg

SEQ ID NO: 22740 - RNA, 22 nt, Artificial Sequence
  Synthetic
cagcccucacagccacuuccgg

SEQ ID NO: 22741 - RNA, 22 nt, Artificial Sequence
  Synthetic
agcccucacagccacuuccgga

SEQ ID NO: 22742 - RNA, 22 nt, Artificial Sequence
  Synthetic
gcccucacagccacuuccggag

SEQ ID NO: 22743 - RNA, 22 nt, Artificial Sequence
  Synthetic
cccucacagccacuuccggaga

SEQ ID NO: 22744 - RNA, 22 nt, Artificial Sequence
  Synthetic
ccucacagccacuuccggagac

SEQ ID NO: 22745 - RNA, 22 nt, Artificial Sequence
  Synthetic
cucacagccacuuccggagacu

SEQ ID NO: 22746 - RNA, 22 nt, Artificial Sequence
  Synthetic
ucacagccacuuccggagacua

SEQ ID NO: 22747 - RNA, 22 nt, Artificial Sequence
  Synthetic
cacagccacuuccggagacuac

SEQ ID NO: 22748 - RNA, 22 nt, Artificial Sequence
  Synthetic
acagccacuuccggagacuaca

SEQ ID NO: 22749 - RNA, 22 nt, Artificial Sequence
  Synthetic
cagccacuuccggagacuacac

SEQ ID NO: 22750 - RNA, 22 nt, Artificial Sequence
  Synthetic
agccacuuccggagacuacaca

SEQ ID NO: 22751 - RNA, 22 nt, Artificial Sequence
  Synthetic
gccacuuccggagacuacacag

SEQ ID NO: 22752 - RNA, 22 nt, Artificial Sequence
  Synthetic
ccacuuccggagacuacacaga

SEQ ID NO: 22753 - RNA, 22 nt, Artificial Sequence
  Synthetic
cacuuccggagacuacacagag

SEQ ID NO: 22754 - RNA, 22 nt, Artificial Sequence
  Synthetic
acuuccggagacuacacagaga

SEQ ID NO: 22755 - RNA, 22 nt, Artificial Sequence
  Synthetic
cuuccggagacuacacagagau

SEQ ID NO: 22756 - RNA, 22 nt, Artificial Sequence
  Synthetic
uuccggagacuacacagagauu

SEQ ID NO: 22757 - RNA, 22 nt, Artificial Sequence
  Synthetic
uccggagacuacacagagauuc

SEQ ID NO: 22758 - RNA, 22 nt, Artificial Sequence
  Synthetic
ccggagacuacacagagauucu

SEQ ID NO: 22759 - RNA, 22 nt, Artificial Sequence
  Synthetic
cggagacuacacagagauucua

SEQ ID NO: 22760 - RNA, 22 nt, Artificial Sequence
  Synthetic
ggagacuacacagagauucuag

SEQ ID NO: 22761 - RNA, 22 nt, Artificial Sequence
  Synthetic
gagacuacacagagauucuagu

SEQ ID NO: 22762 - RNA, 22 nt, Artificial Sequence
  Synthetic
agacuacacagagauucuagug

SEQ ID NO: 22763 - RNA, 22 nt, Artificial Sequence
  Synthetic
gacuacacagagauucuagugg

SEQ ID NO: 22764 - RNA, 22 nt, Artificial Sequence
  Synthetic
acuacacagagauucuaguggu

SEQ ID NO: 22765 - RNA, 22 nt, Artificial Sequence
  Synthetic
cuacacagagauucuagugguu

SEQ ID NO: 22766 - RNA, 22 nt, Artificial Sequence
  Synthetic
uacacagagauucuagugguuu

SEQ ID NO: 22767 - RNA, 22 nt, Artificial Sequence
  Synthetic
acacagagauucuagugguuuc

SEQ ID NO: 22768 - RNA, 22 nt, Artificial Sequence
  Synthetic
cacagagauucuagugguuucc

SEQ ID NO: 22769 - RNA, 22 nt, Artificial Sequence
  Synthetic
acagagauucuagugguuucca

SEQ ID NO: 22770 - RNA, 22 nt, Artificial Sequence
  Synthetic
cagagauucuagugguuuccac

SEQ ID NO: 22771 - RNA, 22 nt, Artificial Sequence
  Synthetic
agagauucuagugguuuccacu

SEQ ID NO: 22772 - RNA, 22 nt, Artificial Sequence
  Synthetic
gagauucuagugguuuccacuu

SEQ ID NO: 22773 - RNA, 22 nt, Artificial Sequence
  Synthetic
agauucuagugguuuccacuua

SEQ ID NO: 22774 - RNA, 22 nt, Artificial Sequence
  Synthetic
gauucuagugguuuccacuuaa

SEQ ID NO: 22775 - RNA, 22 nt, Artificial Sequence
  Synthetic
auucuagugguuuccacuuaaa

SEQ ID NO: 22776 - RNA, 22 nt, Artificial Sequence
  Synthetic
uucuagugguuuccacuuaaaa

SEQ ID NO: 22777 - RNA, 22 nt, Artificial Sequence
  Synthetic
ucuagugguuuccacuuaaaac

SEQ ID NO: 22778 - RNA, 22 nt, Artificial Sequence
  Synthetic
cuagugguuuccacuuaaaacg

SEQ ID NO: 22779 - RNA, 22 nt, Artificial Sequence
  Synthetic
uagugguuuccacuuaaaacgc

SEQ ID NO: 22780 - RNA, 22 nt, Artificial Sequence
  Synthetic
agugguuuccacuuaaaacgcu

SEQ ID NO: 22781 - RNA, 22 nt, Artificial Sequence
  Synthetic
gugguuuccacuuaaaacgcuc

SEQ ID NO: 22782 - RNA, 22 nt, Artificial Sequence
  Synthetic
ugguuuccacuuaaaacgcucc

SEQ ID NO: 22783 - RNA, 22 nt, Artificial Sequence
  Synthetic
gguuuccacuuaaaacgcucca

SEQ ID NO: 22784 - RNA, 22 nt, Artificial Sequence
  Synthetic
guuuccacuuaaaacgcuccag

SEQ ID NO: 22785 - RNA, 22 nt, Artificial Sequence
  Synthetic
uuuccacuuaaaacgcuccagu

SEQ ID NO: 22786 - RNA, 22 nt, Artificial Sequence
  Synthetic
uuccacuuaaaacgcuccagug

SEQ ID NO: 22787 - RNA, 22 nt, Artificial Sequence
  Synthetic
uccacuuaaaacgcuccagugc

SEQ ID NO: 22788 - RNA, 22 nt, Artificial Sequence
  Synthetic
ccacuuaaaacgcuccagugca

SEQ ID NO: 22789 - RNA, 22 nt, Artificial Sequence
  Synthetic
cacuuaaaacgcuccagugcau

SEQ ID NO: 22790 - RNA, 22 nt, Artificial Sequence
  Synthetic
acuuaaaacgcuccagugcauu

SEQ ID NO: 22791 - RNA, 22 nt, Artificial Sequence
  Synthetic
cuuaaaacgcuccagugcauug

SEQ ID NO: 22792 - RNA, 22 nt, Artificial Sequence
  Synthetic
uuaaaacgcuccagugcauugg

SEQ ID NO: 22793 - RNA, 22 nt, Artificial Sequence
  Synthetic
uaaaacgcuccagugcauugga

SEQ ID NO: 22794 - RNA, 22 nt, Artificial Sequence
  Synthetic
aaaacgcuccagugcauuggag

SEQ ID NO: 22795 - RNA, 22 nt, Artificial Sequence
  Synthetic
aaacgcuccagugcauuggaga

SEQ ID NO: 22796 - RNA, 22 nt, Artificial Sequence
  Synthetic
aacgcuccagugcauuggagag

SEQ ID NO: 22797 - RNA, 22 nt, Artificial Sequence
  Synthetic
acgcuccagugcauuggagagg

SEQ ID NO: 22798 - RNA, 22 nt, Artificial Sequence
  Synthetic
cgcuccagugcauuggagaggc

SEQ ID NO: 22799 - RNA, 22 nt, Artificial Sequence
  Synthetic
gcuccagugcauuggagaggca

SEQ ID NO: 22800 - RNA, 22 nt, Artificial Sequence
  Synthetic
cuccagugcauuggagaggcau

SEQ ID NO: 22801 - RNA, 22 nt, Artificial Sequence
  Synthetic
uccagugcauuggagaggcauu

SEQ ID NO: 22802 - RNA, 22 nt, Artificial Sequence
  Synthetic
ccagugcauuggagaggcauuu

SEQ ID NO: 22803 - RNA, 22 nt, Artificial Sequence
  Synthetic
cagugcauuggagaggcauuug

SEQ ID NO: 22804 - RNA, 22 nt, Artificial Sequence
  Synthetic
agugcauuggagaggcauuugc

SEQ ID NO: 22805 - RNA, 22 nt, Artificial Sequence
  Synthetic
gugcauuggagaggcauuugcc

SEQ ID NO: 22806 - RNA, 22 nt, Artificial Sequence
  Synthetic
ugcauuggagaggcauuugccg

SEQ ID NO: 22807 - RNA, 22 nt, Artificial Sequence
  Synthetic
gcauuggagaggcauuugccgg

SEQ ID NO: 22808 - RNA, 22 nt, Artificial Sequence
  Synthetic
cauuggagaggcauuugccggg

SEQ ID NO: 22809 - RNA, 22 nt, Artificial Sequence
  Synthetic
auuggagaggcauuugccgggc

SEQ ID NO: 22810 - RNA, 22 nt, Artificial Sequence
  Synthetic
uuggagaggcauuugccgggca

SEQ ID NO: 22811 - RNA, 22 nt, Artificial Sequence
  Synthetic
uggagaggcauuugccgggcau

SEQ ID NO: 22812 - RNA, 22 nt, Artificial Sequence
  Synthetic
ggagaggcauuugccgggcaug

SEQ ID NO: 22813 - RNA, 22 nt, Artificial Sequence
  Synthetic
gagaggcauuugccgggcaugc

SEQ ID NO: 22814 - RNA, 22 nt, Artificial Sequence
  Synthetic
agaggcauuugccgggcaugca

SEQ ID NO: 22815 - RNA, 22 nt, Artificial Sequence
  Synthetic
gaggcauuugccgggcaugcac

SEQ ID NO: 22816 - RNA, 22 nt, Artificial Sequence
  Synthetic
aggcauuugccgggcaugcacg

SEQ ID NO: 22817 - RNA, 22 nt, Artificial Sequence
  Synthetic
ggcauuugccgggcaugcacgc

SEQ ID NO: 22818 - RNA, 22 nt, Artificial Sequence
  Synthetic
gcauuugccgggcaugcacgcu

SEQ ID NO: 22819 - RNA, 22 nt, Artificial Sequence
  Synthetic
cauuugccgggcaugcacgcuu

SEQ ID NO: 22820 - RNA, 22 nt, Artificial Sequence
  Synthetic
auuugccgggcaugcacgcuug

SEQ ID NO: 22821 - RNA, 22 nt, Artificial Sequence
  Synthetic
uuugccgggcaugcacgcuugu

SEQ ID NO: 22822 - RNA, 22 nt, Artificial Sequence
  Synthetic
uugccgggcaugcacgcuugua

SEQ ID NO: 22823 - RNA, 22 nt, Artificial Sequence
  Synthetic
ugccgggcaugcacgcuuguag

SEQ ID NO: 22824 - RNA, 22 nt, Artificial Sequence
  Synthetic
gccgggcaugcacgcuuguaga

SEQ ID NO: 22825 - RNA, 22 nt, Artificial Sequence
  Synthetic
ccgggcaugcacgcuuguagau

SEQ ID NO: 22826 - RNA, 22 nt, Artificial Sequence
  Synthetic
cgggcaugcacgcuuguagauu

SEQ ID NO: 22827 - RNA, 22 nt, Artificial Sequence
  Synthetic
gggcaugcacgcuuguagauuu

SEQ ID NO: 22828 - RNA, 22 nt, Artificial Sequence
  Synthetic
ggcaugcacgcuuguagauuuc

SEQ ID NO: 22829 - RNA, 22 nt, Artificial Sequence
  Synthetic
gcaugcacgcuuguagauuuca

SEQ ID NO: 22830 - RNA, 22 nt, Artificial Sequence
  Synthetic
caugcacgcuuguagauuucac

SEQ ID NO: 22831 - RNA, 22 nt, Artificial Sequence
  Synthetic
augcacgcuuguagauuucaca

SEQ ID NO: 22832 - RNA, 22 nt, Artificial Sequence
  Synthetic
ugcacgcuuguagauuucacau

SEQ ID NO: 22833 - RNA, 22 nt, Artificial Sequence
  Synthetic
gcacgcuuguagauuucacauc

SEQ ID NO: 22834 - RNA, 22 nt, Artificial Sequence
  Synthetic
cacgcuuguagauuucacaucc

SEQ ID NO: 22835 - RNA, 22 nt, Artificial Sequence
  Synthetic
acgcuuguagauuucacauccc

SEQ ID NO: 22836 - RNA, 22 nt, Artificial Sequence
  Synthetic
cgcuuguagauuucacauccca

SEQ ID NO: 22837 - RNA, 22 nt, Artificial Sequence
  Synthetic
gcuuguagauuucacaucccau

SEQ ID NO: 22838 - RNA, 22 nt, Artificial Sequence
  Synthetic
cuuguagauuucacaucccaug

SEQ ID NO: 22839 - RNA, 22 nt, Artificial Sequence
  Synthetic
uuguagauuucacaucccauga

SEQ ID NO: 22840 - RNA, 22 nt, Artificial Sequence
  Synthetic
uguagauuucacaucccaugag

SEQ ID NO: 22841 - RNA, 22 nt, Artificial Sequence
  Synthetic
guagauuucacaucccaugagu

SEQ ID NO: 22842 - RNA, 22 nt, Artificial Sequence
  Synthetic
uagauuucacaucccaugagug

SEQ ID NO: 22843 - RNA, 22 nt, Artificial Sequence
  Synthetic
agauuucacaucccaugagugu

SEQ ID NO: 22844 - RNA, 22 nt, Artificial Sequence
  Synthetic
gauuucacaucccaugagugug

SEQ ID NO: 22845 - RNA, 22 nt, Artificial Sequence
  Synthetic
auuucacaucccaugagugugg

SEQ ID NO: 22846 - RNA, 22 nt, Artificial Sequence
  Synthetic
uuucacaucccaugagugugga

SEQ ID NO: 22847 - RNA, 22 nt, Artificial Sequence
  Synthetic
uucacaucccaugaguguggag

SEQ ID NO: 22848 - RNA, 22 nt, Artificial Sequence
  Synthetic
ucacaucccaugaguguggagc

SEQ ID NO: 22849 - RNA, 22 nt, Artificial Sequence
  Synthetic
cacaucccaugaguguggagcu

SEQ ID NO: 22850 - RNA, 22 nt, Artificial Sequence
  Synthetic
acaucccaugaguguggagcua

SEQ ID NO: 22851 - RNA, 22 nt, Artificial Sequence
  Synthetic
caucccaugaguguggagcuac

SEQ ID NO: 22852 - RNA, 22 nt, Artificial Sequence
  Synthetic
aucccaugaguguggagcuacu

SEQ ID NO: 22853 - RNA, 22 nt, Artificial Sequence
  Synthetic
ucccaugaguguggagcuacuu

SEQ ID NO: 22854 - RNA, 22 nt, Artificial Sequence
  Synthetic
cccaugaguguggagcuacuuu

SEQ ID NO: 22855 - RNA, 22 nt, Artificial Sequence
  Synthetic
ccaugaguguggagcuacuuuc

SEQ ID NO: 22856 - RNA, 22 nt, Artificial Sequence
  Synthetic
caugaguguggagcuacuuucu

SEQ ID NO: 22857 - RNA, 22 nt, Artificial Sequence
  Synthetic
augaguguggagcuacuuucuu

SEQ ID NO: 22858 - RNA, 22 nt, Artificial Sequence
  Synthetic
ugaguguggagcuacuuucuuc

SEQ ID NO: 22859 - RNA, 22 nt, Artificial Sequence
  Synthetic
gaguguggagcuacuuucuucu

SEQ ID NO: 22860 - RNA, 22 nt, Artificial Sequence
  Synthetic
aguguggagcuacuuucuucua

SEQ ID NO: 22861 - RNA, 22 nt, Artificial Sequence
  Synthetic
guguggagcuacuuucuucuac

SEQ ID NO: 22862 - RNA, 22 nt, Artificial Sequence
  Synthetic
uguggagcuacuuucuucuacc

SEQ ID NO: 22863 - RNA, 22 nt, Artificial Sequence
  Synthetic
guggagcuacuuucuucuaccu

SEQ ID NO: 22864 - RNA, 22 nt, Artificial Sequence
  Synthetic
uggagcuacuuucuucuaccuu

SEQ ID NO: 22865 - RNA, 22 nt, Artificial Sequence
  Synthetic
ggagcuacuuucuucuaccuuc

SEQ ID NO: 22866 - RNA, 22 nt, Artificial Sequence
  Synthetic
gagcuacuuucuucuaccuucu

SEQ ID NO: 22867 - RNA, 22 nt, Artificial Sequence
  Synthetic
agcuacuuucuucuaccuucug

SEQ ID NO: 22868 - RNA, 22 nt, Artificial Sequence
  Synthetic
gcuacuuucuucuaccuucugu

SEQ ID NO: 22869 - RNA, 22 nt, Artificial Sequence
  Synthetic
cuacuuucuucuaccuucuguu

SEQ ID NO: 22870 - RNA, 22 nt, Artificial Sequence
  Synthetic
uacuuucuucuaccuucuguuu

SEQ ID NO: 22871 - RNA, 22 nt, Artificial Sequence
  Synthetic
acuuucuucuaccuucuguuug

SEQ ID NO: 22872 - RNA, 22 nt, Artificial Sequence
  Synthetic
cuuucuucuaccuucuguuugu

SEQ ID NO: 22873 - RNA, 22 nt, Artificial Sequence
  Synthetic
uuucuucuaccuucuguuuguc

SEQ ID NO: 22874 - RNA, 22 nt, Artificial Sequence
  Synthetic
uucuucuaccuucuguuuguca

SEQ ID NO: 22875 - RNA, 22 nt, Artificial Sequence
  Synthetic
ucuucuaccuucuguuugucag

SEQ ID NO: 22876 - RNA, 22 nt, Artificial Sequence
  Synthetic
cuucuaccuucuguuugucagu

SEQ ID NO: 22877 - RNA, 22 nt, Artificial Sequence
  Synthetic
uucuaccuucuguuugucaguu

SEQ ID NO: 22878 - RNA, 22 nt, Artificial Sequence
  Synthetic
ucuaccuucuguuugucaguuu

SEQ ID NO: 22879 - RNA, 22 nt, Artificial Sequence
  Synthetic
cuaccuucuguuugucaguuuu

SEQ ID NO: 22880 - RNA, 22 nt, Artificial Sequence
  Synthetic
uaccuucuguuugucaguuuua

SEQ ID NO: 22881 - RNA, 22 nt, Artificial Sequence
  Synthetic
accuucuguuugucaguuuuag

SEQ ID NO: 22882 - RNA, 22 nt, Artificial Sequence
  Synthetic
ccuucuguuugucaguuuuagc

SEQ ID NO: 22883 - RNA, 22 nt, Artificial Sequence
  Synthetic
cuucuguuugucaguuuuagcu

SEQ ID NO: 22884 - RNA, 22 nt, Artificial Sequence
  Synthetic
uucuguuugucaguuuuagcuu

SEQ ID NO: 22885 - RNA, 22 nt, Artificial Sequence
  Synthetic
ucuguuugucaguuuuagcuuu

SEQ ID NO: 22886 - RNA, 22 nt, Artificial Sequence
  Synthetic
cuguuugucaguuuuagcuuuu

SEQ ID NO: 22887 - RNA, 22 nt, Artificial Sequence
  Synthetic
uguuugucaguuuuagcuuuuc

SEQ ID NO: 22888 - RNA, 22 nt, Artificial Sequence
  Synthetic
guuugucaguuuuagcuuuucu

SEQ ID NO: 22889 - RNA, 22 nt, Artificial Sequence
  Synthetic
uuugucaguuuuagcuuuucug

SEQ ID NO: 22890 - RNA, 22 nt, Artificial Sequence
  Synthetic
uugucaguuuuagcuuuucuga

SEQ ID NO: 22891 - RNA, 22 nt, Artificial Sequence
  Synthetic
ugucaguuuuagcuuuucugac

SEQ ID NO: 22892 - RNA, 22 nt, Artificial Sequence
  Synthetic
gucaguuuuagcuuuucugacu

SEQ ID NO: 22893 - RNA, 22 nt, Artificial Sequence
  Synthetic
ucaguuuuagcuuuucugacua

SEQ ID NO: 22894 - RNA, 22 nt, Artificial Sequence
  Synthetic
caguuuuagcuuuucugacuac

SEQ ID NO: 22895 - RNA, 22 nt, Artificial Sequence
  Synthetic
aguuuuagcuuuucugacuacu

SEQ ID NO: 22896 - RNA, 22 nt, Artificial Sequence
  Synthetic
guuuuagcuuuucugacuacuu

SEQ ID NO: 22897 - RNA, 22 nt, Artificial Sequence
  Synthetic
uuuuagcuuuucugacuacuuc

SEQ ID NO: 22898 - RNA, 22 nt, Artificial Sequence
  Synthetic
uuuagcuuuucugacuacuucc

SEQ ID NO: 22899 - RNA, 22 nt, Artificial Sequence
  Synthetic
uuagcuuuucugacuacuuccu

SEQ ID NO: 22900 - RNA, 22 nt, Artificial Sequence
  Synthetic
uagcuuuucugacuacuuccuu

SEQ ID NO: 22901 - RNA, 22 nt, Artificial Sequence
  Synthetic
agcuuuucugacuacuuccuug

SEQ ID NO: 22902 - RNA, 22 nt, Artificial Sequence
  Synthetic
gcuuuucugacuacuuccuuga

SEQ ID NO: 22903 - RNA, 22 nt, Artificial Sequence
  Synthetic
cuuuucugacuacuuccuugau

SEQ ID NO: 22904 - RNA, 22 nt, Artificial Sequence
  Synthetic
uuuucugacuacuuccuugaug

SEQ ID NO: 22905 - RNA, 22 nt, Artificial Sequence
  Synthetic
uuucugacuacuuccuugaugu

SEQ ID NO: 22906 - RNA, 22 nt, Artificial Sequence
  Synthetic
uucugacuacuuccuugauguu

SEQ ID NO: 22907 - RNA, 22 nt, Artificial Sequence
  Synthetic
ucugacuacuuccuugauguua

SEQ ID NO: 22908 - RNA, 22 nt, Artificial Sequence
  Synthetic
cugacuacuuccuugauguuaa

SEQ ID NO: 22909 - RNA, 22 nt, Artificial Sequence
  Synthetic
ugacuacuuccuugauguuaag

SEQ ID NO: 22910 - RNA, 22 nt, Artificial Sequence
  Synthetic
gacuacuuccuugauguuaagu

SEQ ID NO: 22911 - RNA, 22 nt, Artificial Sequence
  Synthetic
acuacuuccuugauguuaaguu

SEQ ID NO: 22912 - RNA, 22 nt, Artificial Sequence
  Synthetic
cuacuuccuugauguuaaguug

SEQ ID NO: 22913 - RNA, 22 nt, Artificial Sequence
  Synthetic
uacuuccuugauguuaaguugu

SEQ ID NO: 22914 - RNA, 22 nt, Artificial Sequence
  Synthetic
acuuccuugauguuaaguuguc

SEQ ID NO: 22915 - RNA, 22 nt, Artificial Sequence
  Synthetic
cuuccuugauguuaaguuguca

SEQ ID NO: 22916 - RNA, 22 nt, Artificial Sequence
  Synthetic
uuccuugauguuaaguugucac

SEQ ID NO: 22917 - RNA, 22 nt, Artificial Sequence
  Synthetic
uccuugauguuaaguugucacu

SEQ ID NO: 22918 - RNA, 22 nt, Artificial Sequence
  Synthetic
ccuugauguuaaguugucacuu

SEQ ID NO: 22919 - RNA, 22 nt, Artificial Sequence
  Synthetic
cuugauguuaaguugucacuug

SEQ ID NO: 22920 - RNA, 22 nt, Artificial Sequence
  Synthetic
uugauguuaaguugucacuugc

SEQ ID NO: 22921 - RNA, 22 nt, Artificial Sequence
  Synthetic
ugauguuaaguugucacuugcc

SEQ ID NO: 22922 - RNA, 22 nt, Artificial Sequence
  Synthetic
gauguuaaguugucacuugcca

SEQ ID NO: 22923 - RNA, 22 nt, Artificial Sequence
  Synthetic
auguuaaguugucacuugccag

SEQ ID NO: 22924 - RNA, 22 nt, Artificial Sequence
  Synthetic
uguuaaguugucacuugccagg

SEQ ID NO: 22925 - RNA, 22 nt, Artificial Sequence
  Synthetic
guuaaguugucacuugccaggu

SEQ ID NO: 22926 - RNA, 22 nt, Artificial Sequence
  Synthetic
uuaaguugucacuugccagguu

SEQ ID NO: 22927 - RNA, 22 nt, Artificial Sequence
  Synthetic
uaaguugucacuugccagguuu

SEQ ID NO: 22928 - RNA, 22 nt, Artificial Sequence
  Synthetic
aaguugucacuugccagguuuu

SEQ ID NO: 22929 - RNA, 22 nt, Artificial Sequence
  Synthetic
aguugucacuugccagguuuuc

SEQ ID NO: 22930 - RNA, 22 nt, Artificial Sequence
  Synthetic
guugucacuugccagguuuucc

SEQ ID NO: 22931 - RNA, 22 nt, Artificial Sequence
  Synthetic
uugucacuugccagguuuuccc

SEQ ID NO: 22932 - RNA, 22 nt, Artificial Sequence
  Synthetic
ugucacuugccagguuuuccca

SEQ ID NO: 22933 - RNA, 22 nt, Artificial Sequence
  Synthetic
gucacuugccagguuuucccaa

SEQ ID NO: 22934 - RNA, 22 nt, Artificial Sequence
  Synthetic
ucacuugccagguuuucccaaa

SEQ ID NO: 22935 - RNA, 22 nt, Artificial Sequence
  Synthetic
cacuugccagguuuucccaaaa

SEQ ID NO: 22936 - RNA, 22 nt, Artificial Sequence
  Synthetic
acuugccagguuuucccaaaac

SEQ ID NO: 22937 - RNA, 22 nt, Artificial Sequence
  Synthetic
cuugccagguuuucccaaaacg

SEQ ID NO: 22938 - RNA, 22 nt, Artificial Sequence
  Synthetic
uugccagguuuucccaaaacgu

SEQ ID NO: 22939 - RNA, 22 nt, Artificial Sequence
  Synthetic
ugccagguuuucccaaaacgug

SEQ ID NO: 22940 - RNA, 22 nt, Artificial Sequence
  Synthetic
gccagguuuucccaaaacgugg

SEQ ID NO: 22941 - RNA, 22 nt, Artificial Sequence
  Synthetic
ccagguuuucccaaaacguggg

SEQ ID NO: 22942 - RNA, 22 nt, Artificial Sequence
  Synthetic
cagguuuucccaaaacgugggu

SEQ ID NO: 22943 - RNA, 22 nt, Artificial Sequence
  Synthetic
agguuuucccaaaacguggguu

SEQ ID NO: 22944 - RNA, 22 nt, Artificial Sequence
  Synthetic
gguuuucccaaaacguggguuu

SEQ ID NO: 22945 - RNA, 22 nt, Artificial Sequence
  Synthetic
guuuucccaaaacguggguuuc

SEQ ID NO: 22946 - RNA, 22 nt, Artificial Sequence
  Synthetic
uuuucccaaaacguggguuucu

SEQ ID NO: 22947 - RNA, 22 nt, Artificial Sequence
  Synthetic
uuucccaaaacguggguuucuc

SEQ ID NO: 22948 - RNA, 22 nt, Artificial Sequence
  Synthetic
uucccaaaacguggguuucuca

SEQ ID NO: 22949 - RNA, 22 nt, Artificial Sequence
  Synthetic
ucccaaaacguggguuucucau

SEQ ID NO: 22950 - RNA, 22 nt, Artificial Sequence
  Synthetic
cccaaaacguggguuucucauc

SEQ ID NO: 22951 - RNA, 22 nt, Artificial Sequence
  Synthetic
ccaaaacguggguuucucaucu

SEQ ID NO: 22952 - RNA, 22 nt, Artificial Sequence
  Synthetic
caaaacguggguuucucaucuc

SEQ ID NO: 22953 - RNA, 22 nt, Artificial Sequence
  Synthetic
aaaacguggguuucucaucucc

SEQ ID NO: 22954 - RNA, 22 nt, Artificial Sequence
  Synthetic
aaacguggguuucucaucucca

SEQ ID NO: 22955 - RNA, 22 nt, Artificial Sequence
  Synthetic
aacguggguuucucaucuccaa

SEQ ID NO: 22956 - RNA, 22 nt, Artificial Sequence
  Synthetic
acguggguuucucaucuccaac

SEQ ID NO: 22957 - RNA, 22 nt, Artificial Sequence
  Synthetic
cguggguuucucaucuccaaca

SEQ ID NO: 22958 - RNA, 22 nt, Artificial Sequence
  Synthetic
guggguuucucaucuccaacaa

SEQ ID NO: 22959 - RNA, 22 nt, Artificial Sequence
  Synthetic
uggguuucucaucuccaacaac

SEQ ID NO: 22960 - RNA, 22 nt, Artificial Sequence
  Synthetic
ggguuucucaucuccaacaacc

SEQ ID NO: 22961 - RNA, 22 nt, Artificial Sequence
  Synthetic
gguuucucaucuccaacaaccc

SEQ ID NO: 22962 - RNA, 22 nt, Artificial Sequence
  Synthetic
guuucucaucuccaacaacccu

SEQ ID NO: 22963 - RNA, 22 nt, Artificial Sequence
  Synthetic
uuucucaucuccaacaacccua

SEQ ID NO: 22964 - RNA, 22 nt, Artificial Sequence
  Synthetic
uucucaucuccaacaacccuaa

SEQ ID NO: 22965 - RNA, 22 nt, Artificial Sequence
  Synthetic
ucucaucuccaacaacccuaau

SEQ ID NO: 22966 - RNA, 22 nt, Artificial Sequence
  Synthetic
cucaucuccaacaacccuaauc

SEQ ID NO: 22967 - RNA, 22 nt, Artificial Sequence
  Synthetic
ucaucuccaacaacccuaaucu

SEQ ID NO: 22968 - RNA, 22 nt, Artificial Sequence
  Synthetic
caucuccaacaacccuaaucua

SEQ ID NO: 22969 - RNA, 22 nt, Artificial Sequence
  Synthetic
aucuccaacaacccuaaucuac

SEQ ID NO: 22970 - RNA, 22 nt, Artificial Sequence
  Synthetic
ucuccaacaacccuaaucuacu

SEQ ID NO: 22971 - RNA, 22 nt, Artificial Sequence
  Synthetic
cuccaacaacccuaaucuacuu

SEQ ID NO: 22972 - RNA, 22 nt, Artificial Sequence
  Synthetic
uccaacaacccuaaucuacuua

SEQ ID NO: 22973 - RNA, 22 nt, Artificial Sequence
  Synthetic
ccaacaacccuaaucuacuuag

SEQ ID NO: 22974 - RNA, 22 nt, Artificial Sequence
  Synthetic
caacaacccuaaucuacuuagc

SEQ ID NO: 22975 - RNA, 22 nt, Artificial Sequence
  Synthetic
aacaacccuaaucuacuuagcu

SEQ ID NO: 22976 - RNA, 22 nt, Artificial Sequence
  Synthetic
acaacccuaaucuacuuagcuc

SEQ ID NO: 22977 - RNA, 22 nt, Artificial Sequence
  Synthetic
caacccuaaucuacuuagcucu

SEQ ID NO: 22978 - RNA, 22 nt, Artificial Sequence
  Synthetic
aacccuaaucuacuuagcucuc

SEQ ID NO: 22979 - RNA, 22 nt, Artificial Sequence
  Synthetic
acccuaaucuacuuagcucucu

SEQ ID NO: 22980 - RNA, 22 nt, Artificial Sequence
  Synthetic
cccuaaucuacuuagcucucua

SEQ ID NO: 22981 - RNA, 22 nt, Artificial Sequence
  Synthetic
ccuaaucuacuuagcucucuaa

SEQ ID NO: 22982 - RNA, 22 nt, Artificial Sequence
  Synthetic
cuaaucuacuuagcucucuaau

SEQ ID NO: 22983 - RNA, 22 nt, Artificial Sequence
  Synthetic
uaaucuacuuagcucucuaauu

SEQ ID NO: 22984 - RNA, 22 nt, Artificial Sequence
  Synthetic
aaucuacuuagcucucuaauua

SEQ ID NO: 22985 - RNA, 22 nt, Artificial Sequence
  Synthetic
aucuacuuagcucucuaauuac

SEQ ID NO: 22986 - RNA, 22 nt, Artificial Sequence
  Synthetic
ucuacuuagcucucuaauuacu

SEQ ID NO: 22987 - RNA, 22 nt, Artificial Sequence
  Synthetic
cuacuuagcucucuaauuacua

SEQ ID NO: 22988 - RNA, 22 nt, Artificial Sequence
  Synthetic
uacuuagcucucuaauuacuaa

SEQ ID NO: 22989 - RNA, 22 nt, Artificial Sequence
  Synthetic
acuuagcucucuaauuacuaac

SEQ ID NO: 22990 - RNA, 22 nt, Artificial Sequence
  Synthetic
cuuagcucucuaauuacuaacu

SEQ ID NO: 22991 - RNA, 22 nt, Artificial Sequence
  Synthetic
uuagcucucuaauuacuaacuu

SEQ ID NO: 22992 - RNA, 22 nt, Artificial Sequence
  Synthetic
uagcucucuaauuacuaacuuc

SEQ ID NO: 22993 - RNA, 22 nt, Artificial Sequence
  Synthetic
agcucucuaauuacuaacuucu

SEQ ID NO: 22994 - RNA, 22 nt, Artificial Sequence
  Synthetic
gcucucuaauuacuaacuucuu

SEQ ID NO: 22995 - RNA, 22 nt, Artificial Sequence
  Synthetic
cucucuaauuacuaacuucuua

SEQ ID NO: 22996 - RNA, 22 nt, Artificial Sequence
  Synthetic
ucucuaauuacuaacuucuuac

SEQ ID NO: 22997 - RNA, 22 nt, Artificial Sequence
  Synthetic
cucuaauuacuaacuucuuacu

SEQ ID NO: 22998 - RNA, 22 nt, Artificial Sequence
  Synthetic
ucuaauuacuaacuucuuacua

SEQ ID NO: 22999 - RNA, 22 nt, Artificial Sequence
  Synthetic
cuaauuacuaacuucuuacuag

SEQ ID NO: 23000 - RNA, 22 nt, Artificial Sequence
  Synthetic
uaauuacuaacuucuuacuagu

SEQ ID NO: 23001 - RNA, 22 nt, Artificial Sequence
  Synthetic
aauuacuaacuucuuacuaguc

SEQ ID NO: 23002 - RNA, 22 nt, Artificial Sequence
  Synthetic
auuacuaacuucuuacuagucu

SEQ ID NO: 23003 - RNA, 22 nt, Artificial Sequence
  Synthetic
uuacuaacuucuuacuagucug

SEQ ID NO: 23004 - RNA, 22 nt, Artificial Sequence
  Synthetic
uacuaacuucuuacuagucugu

SEQ ID NO: 23005 - RNA, 22 nt, Artificial Sequence
  Synthetic
acuaacuucuuacuagucugug

SEQ ID NO: 23006 - RNA, 22 nt, Artificial Sequence
  Synthetic
cuaacuucuuacuagucuguga

SEQ ID NO: 23007 - RNA, 22 nt, Artificial Sequence
  Synthetic
uaacuucuuacuagucugugag

SEQ ID NO: 23008 - RNA, 22 nt, Artificial Sequence
  Synthetic
aacuucuuacuagucugugagu

SEQ ID NO: 23009 - RNA, 22 nt, Artificial Sequence
  Synthetic
acuucuuacuagucugugaguc

SEQ ID NO: 23010 - RNA, 22 nt, Artificial Sequence
  Synthetic
cuucuuacuagucugugaguca

SEQ ID NO: 23011 - RNA, 22 nt, Artificial Sequence
  Synthetic
uucuuacuagucugugagucag

SEQ ID NO: 23012 - RNA, 22 nt, Artificial Sequence
  Synthetic
ucuuacuagucugugagucaga

SEQ ID NO: 23013 - RNA, 22 nt, Artificial Sequence
  Synthetic
cuuacuagucugugagucagaa

SEQ ID NO: 23014 - RNA, 22 nt, Artificial Sequence
  Synthetic
uuacuagucugugagucagaaa

SEQ ID NO: 23015 - RNA, 22 nt, Artificial Sequence
  Synthetic
uacuagucugugagucagaaaa

SEQ ID NO: 23016 - RNA, 22 nt, Artificial Sequence
  Synthetic
acuagucugugagucagaaaac

SEQ ID NO: 23017 - RNA, 22 nt, Artificial Sequence
  Synthetic
cuagucugugagucagaaaacc

SEQ ID NO: 23018 - RNA, 22 nt, Artificial Sequence
  Synthetic
uagucugugagucagaaaacca

SEQ ID NO: 23019 - RNA, 22 nt, Artificial Sequence
  Synthetic
agucugugagucagaaaaccac

SEQ ID NO: 23020 - RNA, 22 nt, Artificial Sequence
  Synthetic
gucugugagucagaaaaccaca

SEQ ID NO: 23021 - RNA, 22 nt, Artificial Sequence
  Synthetic
ucugugagucagaaaaccacau

SEQ ID NO: 23022 - RNA, 22 nt, Artificial Sequence
  Synthetic
cugugagucagaaaaccacaug

SEQ ID NO: 23023 - RNA, 22 nt, Artificial Sequence
  Synthetic
ugugagucagaaaaccacauga

SEQ ID NO: 23024 - RNA, 22 nt, Artificial Sequence
  Synthetic
gugagucagaaaaccacaugac

SEQ ID NO: 23025 - RNA, 22 nt, Artificial Sequence
  Synthetic
ugagucagaaaaccacaugaca

SEQ ID NO: 23026 - RNA, 22 nt, Artificial Sequence
  Synthetic
gagucagaaaaccacaugacaa

SEQ ID NO: 23027 - RNA, 22 nt, Artificial Sequence
  Synthetic
agucagaaaaccacaugacaaa

SEQ ID NO: 23028 - RNA, 22 nt, Artificial Sequence
  Synthetic
gucagaaaaccacaugacaaaa

SEQ ID NO: 23029 - RNA, 22 nt, Artificial Sequence
  Synthetic
ucagaaaaccacaugacaaaau

SEQ ID NO: 23030 - RNA, 22 nt, Artificial Sequence
  Synthetic
cagaaaaccacaugacaaaauu

SEQ ID NO: 23031 - RNA, 22 nt, Artificial Sequence
  Synthetic
agaaaaccacaugacaaaauug

SEQ ID NO: 23032 - RNA, 22 nt, Artificial Sequence
  Synthetic
gaaaaccacaugacaaaauuga

SEQ ID NO: 23033 - RNA, 22 nt, Artificial Sequence
  Synthetic
aaaaccacaugacaaaauugac

SEQ ID NO: 23034 - RNA, 22 nt, Artificial Sequence
  Synthetic
aaaccacaugacaaaauugacu

SEQ ID NO: 23035 - RNA, 22 nt, Artificial Sequence
  Synthetic
aaccacaugacaaaauugacuu

SEQ ID NO: 23036 - RNA, 22 nt, Artificial Sequence
  Synthetic
accacaugacaaaauugacuua

SEQ ID NO: 23037 - RNA, 22 nt, Artificial Sequence
  Synthetic
ccacaugacaaaauugacuuag

SEQ ID NO: 23038 - RNA, 22 nt, Artificial Sequence
  Synthetic
cacaugacaaaauugacuuaga

SEQ ID NO: 23039 - RNA, 22 nt, Artificial Sequence
  Synthetic
acaugacaaaauugacuuagaa

SEQ ID NO: 23040 - RNA, 22 nt, Artificial Sequence
  Synthetic
caugacaaaauugacuuagaac

SEQ ID NO: 23041 - RNA, 22 nt, Artificial Sequence
  Synthetic
augacaaaauugacuuagaacu

SEQ ID NO: 23042 - RNA, 22 nt, Artificial Sequence
  Synthetic
ugacaaaauugacuuagaacug

SEQ ID NO: 23043 - RNA, 22 nt, Artificial Sequence
  Synthetic
gacaaaauugacuuagaacugu

SEQ ID NO: 23044 - RNA, 22 nt, Artificial Sequence
  Synthetic
acaaaauugacuuagaacuguc

SEQ ID NO: 23045 - RNA, 22 nt, Artificial Sequence
  Synthetic
caaaauugacuuagaacuguca

SEQ ID NO: 23046 - RNA, 22 nt, Artificial Sequence
  Synthetic
aaaauugacuuagaacugucac

SEQ ID NO: 23047 - RNA, 22 nt, Artificial Sequence
  Synthetic
aaauugacuuagaacugucaca

SEQ ID NO: 23048 - RNA, 22 nt, Artificial Sequence
  Synthetic
aauugacuuagaacugucacac

SEQ ID NO: 23049 - RNA, 22 nt, Artificial Sequence
  Synthetic
auugacuuagaacugucacacg

SEQ ID NO: 23050 - RNA, 22 nt, Artificial Sequence
  Synthetic
uugacuuagaacugucacacga

SEQ ID NO: 23051 - RNA, 22 nt, Artificial Sequence
  Synthetic
ugacuuagaacugucacacgau

SEQ ID NO: 23052 - RNA, 22 nt, Artificial Sequence
  Synthetic
gacuuagaacugucacacgaua

SEQ ID NO: 23053 - RNA, 22 nt, Artificial Sequence
  Synthetic
acuuagaacugucacacgauaa

SEQ ID NO: 23054 - RNA, 22 nt, Artificial Sequence
  Synthetic
cuuagaacugucacacgauaag

SEQ ID NO: 23055 - RNA, 22 nt, Artificial Sequence
  Synthetic
uuagaacugucacacgauaagg

SEQ ID NO: 23056 - RNA, 22 nt, Artificial Sequence
  Synthetic
uagaacugucacacgauaaggg

SEQ ID NO: 23057 - RNA, 22 nt, Artificial Sequence
  Synthetic
agaacugucacacgauaaggga

SEQ ID NO: 23058 - RNA, 22 nt, Artificial Sequence
  Synthetic
gaacugucacacgauaagggaa

SEQ ID NO: 23059 - RNA, 22 nt, Artificial Sequence
  Synthetic
aacugucacacgauaagggaac

SEQ ID NO: 23060 - RNA, 22 nt, Artificial Sequence
  Synthetic
acugucacacgauaagggaacc

SEQ ID NO: 23061 - RNA, 22 nt, Artificial Sequence
  Synthetic
cugucacacgauaagggaacca

SEQ ID NO: 23062 - RNA, 22 nt, Artificial Sequence
  Synthetic
ugucacacgauaagggaaccag

SEQ ID NO: 23063 - RNA, 22 nt, Artificial Sequence
  Synthetic
gucacacgauaagggaaccagg

SEQ ID NO: 23064 - RNA, 22 nt, Artificial Sequence
  Synthetic
ucacacgauaagggaaccagga

SEQ ID NO: 23065 - RNA, 22 nt, Artificial Sequence
  Synthetic
cacacgauaagggaaccaggaa

SEQ ID NO: 23066 - RNA, 22 nt, Artificial Sequence
  Synthetic
acacgauaagggaaccaggaac

SEQ ID NO: 23067 - RNA, 22 nt, Artificial Sequence
  Synthetic
cacgauaagggaaccaggaacu

SEQ ID NO: 23068 - RNA, 22 nt, Artificial Sequence
  Synthetic
acgauaagggaaccaggaacuc

SEQ ID NO: 23069 - RNA, 22 nt, Artificial Sequence
  Synthetic
cgauaagggaaccaggaacucu

SEQ ID NO: 23070 - RNA, 22 nt, Artificial Sequence
  Synthetic
gauaagggaaccaggaacucuc

SEQ ID NO: 23071 - RNA, 22 nt, Artificial Sequence
  Synthetic
auaagggaaccaggaacucucc

SEQ ID NO: 23072 - RNA, 22 nt, Artificial Sequence
  Synthetic
uaagggaaccaggaacucucca

SEQ ID NO: 23073 - RNA, 22 nt, Artificial Sequence
  Synthetic
aagggaaccaggaacucuccaa

SEQ ID NO: 23074 - RNA, 22 nt, Artificial Sequence
  Synthetic
agggaaccaggaacucuccaaa

SEQ ID NO: 23075 - RNA, 22 nt, Artificial Sequence
  Synthetic
gggaaccaggaacucuccaaau

SEQ ID NO: 23076 - RNA, 22 nt, Artificial Sequence
  Synthetic
ggaaccaggaacucuccaaaua

SEQ ID NO: 23077 - RNA, 22 nt, Artificial Sequence
  Synthetic
gaaccaggaacucuccaaauag

SEQ ID NO: 23078 - RNA, 22 nt, Artificial Sequence
  Synthetic
aaccaggaacucuccaaauaga

SEQ ID NO: 23079 - RNA, 22 nt, Artificial Sequence
  Synthetic
accaggaacucuccaaauagag

SEQ ID NO: 23080 - RNA, 22 nt, Artificial Sequence
  Synthetic
ccaggaacucuccaaauagagu

SEQ ID NO: 23081 - RNA, 22 nt, Artificial Sequence
  Synthetic
caggaacucuccaaauagaguu

SEQ ID NO: 23082 - RNA, 22 nt, Artificial Sequence
  Synthetic
aggaacucuccaaauagaguuc

SEQ ID NO: 23083 - RNA, 22 nt, Artificial Sequence
  Synthetic
ggaacucuccaaauagaguucc

SEQ ID NO: 23084 - RNA, 22 nt, Artificial Sequence
  Synthetic
gaacucuccaaauagaguuccu

SEQ ID NO: 23085 - RNA, 22 nt, Artificial Sequence
  Synthetic
aacucuccaaauagaguuccua

SEQ ID NO: 23086 - RNA, 22 nt, Artificial Sequence
  Synthetic
acucuccaaauagaguuccuaa

SEQ ID NO: 23087 - RNA, 22 nt, Artificial Sequence
  Synthetic
cucuccaaauagaguuccuaac

SEQ ID NO: 23088 - RNA, 22 nt, Artificial Sequence
  Synthetic
ucuccaaauagaguuccuaacu

SEQ ID NO: 23089 - RNA, 22 nt, Artificial Sequence
  Synthetic
cuccaaauagaguuccuaacuc

SEQ ID NO: 23090 - RNA, 22 nt, Artificial Sequence
  Synthetic
uccaaauagaguuccuaacucu

SEQ ID NO: 23091 - RNA, 22 nt, Artificial Sequence
  Synthetic
ccaaauagaguuccuaacucuu

SEQ ID NO: 23092 - RNA, 22 nt, Artificial Sequence
  Synthetic
caaauagaguuccuaacucuuu

SEQ ID NO: 23093 - RNA, 22 nt, Artificial Sequence
  Synthetic
aaauagaguuccuaacucuuuc

SEQ ID NO: 23094 - RNA, 22 nt, Artificial Sequence
  Synthetic
aauagaguuccuaacucuuuca

SEQ ID NO: 23095 - RNA, 22 nt, Artificial Sequence
  Synthetic
auagaguuccuaacucuuucag

SEQ ID NO: 23096 - RNA, 22 nt, Artificial Sequence
  Synthetic
uagaguuccuaacucuuucagu

SEQ ID NO: 23097 - RNA, 22 nt, Artificial Sequence
  Synthetic
agaguuccuaacucuuucaguu

SEQ ID NO: 23098 - RNA, 22 nt, Artificial Sequence
  Synthetic
gaguuccuaacucuuucaguuc

SEQ ID NO: 23099 - RNA, 22 nt, Artificial Sequence
  Synthetic
aguuccuaacucuuucaguucu

SEQ ID NO: 23100 - RNA, 22 nt, Artificial Sequence
  Synthetic
guuccuaacucuuucaguucuc

SEQ ID NO: 23101 - RNA, 22 nt, Artificial Sequence
  Synthetic
uuccuaacucuuucaguucuca

SEQ ID NO: 23102 - RNA, 22 nt, Artificial Sequence
  Synthetic
uccuaacucuuucaguucucag

SEQ ID NO: 23103 - RNA, 22 nt, Artificial Sequence
  Synthetic
ccuaacucuuucaguucucaga

SEQ ID NO: 23104 - RNA, 22 nt, Artificial Sequence
  Synthetic
cuaacucuuucaguucucagaa

SEQ ID NO: 23105 - RNA, 22 nt, Artificial Sequence
  Synthetic
uaacucuuucaguucucagaau

SEQ ID NO: 23106 - RNA, 22 nt, Artificial Sequence
  Synthetic
aacucuuucaguucucagaauu

SEQ ID NO: 23107 - RNA, 22 nt, Artificial Sequence
  Synthetic
acucuuucaguucucagaauua

SEQ ID NO: 23108 - RNA, 22 nt, Artificial Sequence
  Synthetic
cucuuucaguucucagaauuag

SEQ ID NO: 23109 - RNA, 22 nt, Artificial Sequence
  Synthetic
ucuuucaguucucagaauuagu

SEQ ID NO: 23110 - RNA, 22 nt, Artificial Sequence
  Synthetic
cuuucaguucucagaauuagug

SEQ ID NO: 23111 - RNA, 22 nt, Artificial Sequence
  Synthetic
uuucaguucucagaauuagugg

SEQ ID NO: 23112 - RNA, 22 nt, Artificial Sequence
  Synthetic
uucaguucucagaauuagugga

SEQ ID NO: 23113 - RNA, 22 nt, Artificial Sequence
  Synthetic
ucaguucucagaauuaguggaa

SEQ ID NO: 23114 - RNA, 22 nt, Artificial Sequence
  Synthetic
caguucucagaauuaguggaaa

SEQ ID NO: 23115 - RNA, 22 nt, Artificial Sequence
  Synthetic
aguucucagaauuaguggaaag

SEQ ID NO: 23116 - RNA, 22 nt, Artificial Sequence
  Synthetic
guucucagaauuaguggaaaga

SEQ ID NO: 23117 - RNA, 22 nt, Artificial Sequence
  Synthetic
uucucagaauuaguggaaagau

SEQ ID NO: 23118 - RNA, 22 nt, Artificial Sequence
  Synthetic
ucucagaauuaguggaaagauc

SEQ ID NO: 23119 - RNA, 22 nt, Artificial Sequence
  Synthetic
cucagaauuaguggaaagaucc

SEQ ID NO: 23120 - RNA, 22 nt, Artificial Sequence
  Synthetic
ucagaauuaguggaaagauccu

SEQ ID NO: 23121 - RNA, 22 nt, Artificial Sequence
  Synthetic
cagaauuaguggaaagauccug

SEQ ID NO: 23122 - RNA, 22 nt, Artificial Sequence
  Synthetic
agaauuaguggaaagauccugc

SEQ ID NO: 23123 - RNA, 22 nt, Artificial Sequence
  Synthetic
gaauuaguggaaagauccugca

SEQ ID NO: 23124 - RNA, 22 nt, Artificial Sequence
  Synthetic
aauuaguggaaagauccugcag

SEQ ID NO: 23125 - RNA, 22 nt, Artificial Sequence
  Synthetic
auuaguggaaagauccugcagc

SEQ ID NO: 23126 - RNA, 22 nt, Artificial Sequence
  Synthetic
uuaguggaaagauccugcagcc

SEQ ID NO: 23127 - RNA, 22 nt, Artificial Sequence
  Synthetic
uaguggaaagauccugcagcca

SEQ ID NO: 23128 - RNA, 22 nt, Artificial Sequence
  Synthetic
aguggaaagauccugcagccau

SEQ ID NO: 23129 - RNA, 22 nt, Artificial Sequence
  Synthetic
guggaaagauccugcagccauu

SEQ ID NO: 23130 - RNA, 22 nt, Artificial Sequence
  Synthetic
uggaaagauccugcagccauuu

SEQ ID NO: 23131 - RNA, 22 nt, Artificial Sequence
  Synthetic
ggaaagauccugcagccauuuc

SEQ ID NO: 23132 - RNA, 22 nt, Artificial Sequence
  Synthetic
gaaagauccugcagccauuucc

SEQ ID NO: 23133 - RNA, 22 nt, Artificial Sequence
  Synthetic
aaagauccugcagccauuucca

SEQ ID NO: 23134 - RNA, 22 nt, Artificial Sequence
  Synthetic
aagauccugcagccauuuccag

SEQ ID NO: 23135 - RNA, 22 nt, Artificial Sequence
  Synthetic
agauccugcagccauuuccagu

SEQ ID NO: 23136 - RNA, 22 nt, Artificial Sequence
  Synthetic
gauccugcagccauuuccagug

SEQ ID NO: 23137 - RNA, 22 nt, Artificial Sequence
  Synthetic
auccugcagccauuuccagugc

SEQ ID NO: 23138 - RNA, 22 nt, Artificial Sequence
  Synthetic
uccugcagccauuuccagugca

SEQ ID NO: 23139 - RNA, 22 nt, Artificial Sequence
  Synthetic
ccugcagccauuuccagugcaa

SEQ ID NO: 23140 - RNA, 22 nt, Artificial Sequence
  Synthetic
cugcagccauuuccagugcaac

SEQ ID NO: 23141 - RNA, 22 nt, Artificial Sequence
  Synthetic
ugcagccauuuccagugcaaca

SEQ ID NO: 23142 - RNA, 22 nt, Artificial Sequence
  Synthetic
gcagccauuuccagugcaacau

SEQ ID NO: 23143 - RNA, 22 nt, Artificial Sequence
  Synthetic
cagccauuuccagugcaacauc

SEQ ID NO: 23144 - RNA, 22 nt, Artificial Sequence
  Synthetic
agccauuuccagugcaacaucc

SEQ ID NO: 23145 - RNA, 22 nt, Artificial Sequence
  Synthetic
gccauuuccagugcaacauccu

SEQ ID NO: 23146 - RNA, 22 nt, Artificial Sequence
  Synthetic
ccauuuccagugcaacauccua

SEQ ID NO: 23147 - RNA, 22 nt, Artificial Sequence
  Synthetic
cauuuccagugcaacauccuag

SEQ ID NO: 23148 - RNA, 22 nt, Artificial Sequence
  Synthetic
auuuccagugcaacauccuaga

SEQ ID NO: 23149 - RNA, 22 nt, Artificial Sequence
  Synthetic
uuuccagugcaacauccuagag

SEQ ID NO: 23150 - RNA, 22 nt, Artificial Sequence
  Synthetic
uuccagugcaacauccuagaga

SEQ ID NO: 23151 - RNA, 22 nt, Artificial Sequence
  Synthetic
uccagugcaacauccuagagau

SEQ ID NO: 23152 - RNA, 22 nt, Artificial Sequence
  Synthetic
ccagugcaacauccuagagauc

SEQ ID NO: 23153 - RNA, 22 nt, Artificial Sequence
  Synthetic
cagugcaacauccuagagaucu

SEQ ID NO: 23154 - RNA, 22 nt, Artificial Sequence
  Synthetic
agugcaacauccuagagaucug

SEQ ID NO: 23155 - RNA, 22 nt, Artificial Sequence
  Synthetic
gugcaacauccuagagaucuga

SEQ ID NO: 23156 - RNA, 22 nt, Artificial Sequence
  Synthetic
ugcaacauccuagagaucugag

SEQ ID NO: 23157 - RNA, 22 nt, Artificial Sequence
  Synthetic
gcaacauccuagagaucugagg

SEQ ID NO: 23158 - RNA, 22 nt, Artificial Sequence
  Synthetic
caacauccuagagaucugaggu

SEQ ID NO: 23159 - RNA, 22 nt, Artificial Sequence
  Synthetic
aacauccuagagaucugagguu

SEQ ID NO: 23160 - RNA, 22 nt, Artificial Sequence
  Synthetic
acauccuagagaucugagguuc

SEQ ID NO: 23161 - RNA, 22 nt, Artificial Sequence
  Synthetic
cauccuagagaucugagguucc

SEQ ID NO: 23162 - RNA, 22 nt, Artificial Sequence
  Synthetic
auccuagagaucugagguuccc

SEQ ID NO: 23163 - RNA, 22 nt, Artificial Sequence
  Synthetic
uccuagagaucugagguucccu

SEQ ID NO: 23164 - RNA, 22 nt, Artificial Sequence
  Synthetic
ccuagagaucugagguucccug

SEQ ID NO: 23165 - RNA, 22 nt, Artificial Sequence
  Synthetic
cuagagaucugagguucccugg

SEQ ID NO: 23166 - RNA, 22 nt, Artificial Sequence
  Synthetic
uagagaucugagguucccugga

SEQ ID NO: 23167 - RNA, 22 nt, Artificial Sequence
  Synthetic
agagaucugagguucccuggag

SEQ ID NO: 23168 - RNA, 22 nt, Artificial Sequence
  Synthetic
gagaucugagguucccuggaga

SEQ ID NO: 23169 - RNA, 22 nt, Artificial Sequence
  Synthetic
agaucugagguucccuggagac

SEQ ID NO: 23170 - RNA, 22 nt, Artificial Sequence
  Synthetic
gaucugagguucccuggagacc

SEQ ID NO: 23171 - RNA, 22 nt, Artificial Sequence
  Synthetic
aucugagguucccuggagacca

SEQ ID NO: 23172 - RNA, 22 nt, Artificial Sequence
  Synthetic
ucugagguucccuggagaccaa

SEQ ID NO: 23173 - RNA, 22 nt, Artificial Sequence
  Synthetic
cugagguucccuggagaccaac

SEQ ID NO: 23174 - RNA, 22 nt, Artificial Sequence
  Synthetic
ugagguucccuggagaccaacu

SEQ ID NO: 23175 - RNA, 22 nt, Artificial Sequence
  Synthetic
gagguucccuggagaccaacuc

SEQ ID NO: 23176 - RNA, 22 nt, Artificial Sequence
  Synthetic
agguucccuggagaccaacucu

SEQ ID NO: 23177 - RNA, 22 nt, Artificial Sequence
  Synthetic
gguucccuggagaccaacucuc

SEQ ID NO: 23178 - RNA, 22 nt, Artificial Sequence
  Synthetic
guucccuggagaccaacucuca

SEQ ID NO: 23179 - RNA, 22 nt, Artificial Sequence
  Synthetic
uucccuggagaccaacucucag

SEQ ID NO: 23180 - RNA, 22 nt, Artificial Sequence
  Synthetic
ucccuggagaccaacucucaga

SEQ ID NO: 23181 - RNA, 22 nt, Artificial Sequence
  Synthetic
cccuggagaccaacucucagau

SEQ ID NO: 23182 - RNA, 22 nt, Artificial Sequence
  Synthetic
ccuggagaccaacucucagaug

SEQ ID NO: 23183 - RNA, 22 nt, Artificial Sequence
  Synthetic
cuggagaccaacucucagauga

SEQ ID NO: 23184 - RNA, 22 nt, Artificial Sequence
  Synthetic
uggagaccaacucucagaugau

SEQ ID NO: 23185 - RNA, 22 nt, Artificial Sequence
  Synthetic
ggagaccaacucucagaugauc

SEQ ID NO: 23186 - RNA, 22 nt, Artificial Sequence
  Synthetic
gagaccaacucucagaugaucu

SEQ ID NO: 23187 - RNA, 22 nt, Artificial Sequence
  Synthetic
agaccaacucucagaugaucuu

SEQ ID NO: 23188 - RNA, 22 nt, Artificial Sequence
  Synthetic
gaccaacucucagaugaucuug

SEQ ID NO: 23189 - RNA, 22 nt, Artificial Sequence
  Synthetic
accaacucucagaugaucuuga

SEQ ID NO: 23190 - RNA, 22 nt, Artificial Sequence
  Synthetic
ccaacucucagaugaucuugac

SEQ ID NO: 23191 - RNA, 22 nt, Artificial Sequence
  Synthetic
caacucucagaugaucuugacu

SEQ ID NO: 23192 - RNA, 22 nt, Artificial Sequence
  Synthetic
aacucucagaugaucuugacug

SEQ ID NO: 23193 - RNA, 22 nt, Artificial Sequence
  Synthetic
acucucagaugaucuugacugg

SEQ ID NO: 23194 - RNA, 22 nt, Artificial Sequence
  Synthetic
cucucagaugaucuugacuggg

SEQ ID NO: 23195 - RNA, 22 nt, Artificial Sequence
  Synthetic
ucucagaugaucuugacuggga

SEQ ID NO: 23196 - RNA, 22 nt, Artificial Sequence
  Synthetic
cucagaugaucuugacugggau

SEQ ID NO: 23197 - RNA, 22 nt, Artificial Sequence
  Synthetic
ucagaugaucuugacugggauu

SEQ ID NO: 23198 - RNA, 22 nt, Artificial Sequence
  Synthetic
cagaugaucuugacugggauua

SEQ ID NO: 23199 - RNA, 22 nt, Artificial Sequence
  Synthetic
agaugaucuugacugggauuaa

SEQ ID NO: 23200 - RNA, 22 nt, Artificial Sequence
  Synthetic
gaugaucuugacugggauuaac

SEQ ID NO: 23201 - RNA, 22 nt, Artificial Sequence
  Synthetic
augaucuugacugggauuaaca

SEQ ID NO: 23202 - RNA, 22 nt, Artificial Sequence
  Synthetic
ugaucuugacugggauuaacaa

SEQ ID NO: 23203 - RNA, 22 nt, Artificial Sequence
  Synthetic
gaucuugacugggauuaacaac

SEQ ID NO: 23204 - RNA, 22 nt, Artificial Sequence
  Synthetic
aucuugacugggauuaacaacg

SEQ ID NO: 23205 - RNA, 22 nt, Artificial Sequence
  Synthetic
ucuugacugggauuaacaacgg

SEQ ID NO: 23206 - RNA, 22 nt, Artificial Sequence
  Synthetic
cuugacugggauuaacaacgga

SEQ ID NO: 23207 - RNA, 22 nt, Artificial Sequence
  Synthetic
uugacugggauuaacaacggag

SEQ ID NO: 23208 - RNA, 22 nt, Artificial Sequence
  Synthetic
ugacugggauuaacaacggagg

SEQ ID NO: 23209 - RNA, 22 nt, Artificial Sequence
  Synthetic
gacugggauuaacaacggagga

SEQ ID NO: 23210 - RNA, 22 nt, Artificial Sequence
  Synthetic
acugggauuaacaacggaggac

SEQ ID NO: 23211 - RNA, 22 nt, Artificial Sequence
  Synthetic
cugggauuaacaacggaggaca

SEQ ID NO: 23212 - RNA, 22 nt, Artificial Sequence
  Synthetic
ugggauuaacaacggaggacag

SEQ ID NO: 23213 - RNA, 22 nt, Artificial Sequence
  Synthetic
gggauuaacaacggaggacagg

SEQ ID NO: 23214 - RNA, 22 nt, Artificial Sequence
  Synthetic
ggauuaacaacggaggacagga

SEQ ID NO: 23215 - RNA, 22 nt, Artificial Sequence
  Synthetic
gauuaacaacggaggacaggac

SEQ ID NO: 23216 - RNA, 22 nt, Artificial Sequence
  Synthetic
auuaacaacggaggacaggaca

SEQ ID NO: 23217 - RNA, 22 nt, Artificial Sequence
  Synthetic
uuaacaacggaggacaggacac

SEQ ID NO: 23218 - RNA, 22 nt, Artificial Sequence
  Synthetic
uaacaacggaggacaggacacu

SEQ ID NO: 23219 - RNA, 22 nt, Artificial Sequence
  Synthetic
aacaacggaggacaggacacuc

SEQ ID NO: 23220 - RNA, 22 nt, Artificial Sequence
  Synthetic
acaacggaggacaggacacucu

SEQ ID NO: 23221 - RNA, 22 nt, Artificial Sequence
  Synthetic
caacggaggacaggacacucuc

SEQ ID NO: 23222 - RNA, 22 nt, Artificial Sequence
  Synthetic
aacggaggacaggacacucuca

SEQ ID NO: 23223 - RNA, 22 nt, Artificial Sequence
  Synthetic
acggaggacaggacacucucag

SEQ ID NO: 23224 - RNA, 22 nt, Artificial Sequence
  Synthetic
cggaggacaggacacucucagg

SEQ ID NO: 23225 - RNA, 22 nt, Artificial Sequence
  Synthetic
ggaggacaggacacucucagga

SEQ ID NO: 23226 - RNA, 22 nt, Artificial Sequence
  Synthetic
gaggacaggacacucucaggac

SEQ ID NO: 23227 - RNA, 22 nt, Artificial Sequence
  Synthetic
aggacaggacacucucaggacu

SEQ ID NO: 23228 - RNA, 22 nt, Artificial Sequence
  Synthetic
ggacaggacacucucaggacuu

SEQ ID NO: 23229 - RNA, 22 nt, Artificial Sequence
  Synthetic
gacaggacacucucaggacuua

SEQ ID NO: 23230 - RNA, 22 nt, Artificial Sequence
  Synthetic
acaggacacucucaggacuuac

SEQ ID NO: 23231 - RNA, 22 nt, Artificial Sequence
  Synthetic
caggacacucucaggacuuaca

SEQ ID NO: 23232 - RNA, 22 nt, Artificial Sequence
  Synthetic
aggacacucucaggacuuacaa

SEQ ID NO: 23233 - RNA, 22 nt, Artificial Sequence
  Synthetic
ggacacucucaggacuuacaaa

SEQ ID NO: 23234 - RNA, 22 nt, Artificial Sequence
  Synthetic
gacacucucaggacuuacaaau

SEQ ID NO: 23235 - RNA, 22 nt, Artificial Sequence
  Synthetic
acacucucaggacuuacaaauu

SEQ ID NO: 23236 - RNA, 22 nt, Artificial Sequence
  Synthetic
cacucucaggacuuacaaauua

SEQ ID NO: 23237 - RNA, 22 nt, Artificial Sequence
  Synthetic
acucucaggacuuacaaauuac

SEQ ID NO: 23238 - RNA, 22 nt, Artificial Sequence
  Synthetic
cucucaggacuuacaaauuaca

SEQ ID NO: 23239 - RNA, 22 nt, Artificial Sequence
  Synthetic
ucucaggacuuacaaauuacaa

SEQ ID NO: 23240 - RNA, 22 nt, Artificial Sequence
  Synthetic
cucaggacuuacaaauuacaac

SEQ ID NO: 23241 - RNA, 22 nt, Artificial Sequence
  Synthetic
ucaggacuuacaaauuacaacu

SEQ ID NO: 23242 - RNA, 22 nt, Artificial Sequence
  Synthetic
caggacuuacaaauuacaacug

SEQ ID NO: 23243 - RNA, 22 nt, Artificial Sequence
  Synthetic
aggacuuacaaauuacaacugc

SEQ ID NO: 23244 - RNA, 22 nt, Artificial Sequence
  Synthetic
ggacuuacaaauuacaacugcu

SEQ ID NO: 23245 - RNA, 22 nt, Artificial Sequence
  Synthetic
gacuuacaaauuacaacugcua

SEQ ID NO: 23246 - RNA, 22 nt, Artificial Sequence
  Synthetic
acuuacaaauuacaacugcuau

SEQ ID NO: 23247 - RNA, 22 nt, Artificial Sequence
  Synthetic
cuuacaaauuacaacugcuauu

SEQ ID NO: 23248 - RNA, 22 nt, Artificial Sequence
  Synthetic
uuacaaauuacaacugcuauua

SEQ ID NO: 23249 - RNA, 22 nt, Artificial Sequence
  Synthetic
uacaaauuacaacugcuauuac

SEQ ID NO: 23250 - RNA, 22 nt, Artificial Sequence
  Synthetic
acaaauuacaacugcuauuaca

SEQ ID NO: 23251 - RNA, 22 nt, Artificial Sequence
  Synthetic
caaauuacaacugcuauuacag

SEQ ID NO: 23252 - RNA, 22 nt, Artificial Sequence
  Synthetic
aaauuacaacugcuauuacagc

SEQ ID NO: 23253 - RNA, 22 nt, Artificial Sequence
  Synthetic
aauuacaacugcuauuacagcu

SEQ ID NO: 23254 - RNA, 22 nt, Artificial Sequence
  Synthetic
auuacaacugcuauuacagcuc

SEQ ID NO: 23255 - RNA, 22 nt, Artificial Sequence
  Synthetic
uuacaacugcuauuacagcuca

SEQ ID NO: 23256 - RNA, 22 nt, Artificial Sequence
  Synthetic
uacaacugcuauuacagcucag

SEQ ID NO: 23257 - RNA, 22 nt, Artificial Sequence
  Synthetic
acaacugcuauuacagcucagc

SEQ ID NO: 23258 - RNA, 22 nt, Artificial Sequence
  Synthetic
caacugcuauuacagcucagca

SEQ ID NO: 23259 - RNA, 22 nt, Artificial Sequence
  Synthetic
aacugcuauuacagcucagcau

SEQ ID NO: 23260 - RNA, 22 nt, Artificial Sequence
  Synthetic
acugcuauuacagcucagcauu

SEQ ID NO: 23261 - RNA, 22 nt, Artificial Sequence
  Synthetic
cugcuauuacagcucagcauuu

SEQ ID NO: 23262 - RNA, 22 nt, Artificial Sequence
  Synthetic
ugcuauuacagcucagcauuuc

SEQ ID NO: 23263 - RNA, 22 nt, Artificial Sequence
  Synthetic
gcuauuacagcucagcauuuca

SEQ ID NO: 23264 - RNA, 22 nt, Artificial Sequence
  Synthetic
cuauuacagcucagcauuucaa

SEQ ID NO: 23265 - RNA, 22 nt, Artificial Sequence
  Synthetic
uauuacagcucagcauuucaaa

SEQ ID NO: 23266 - RNA, 22 nt, Artificial Sequence
  Synthetic
auuacagcucagcauuucaaau

SEQ ID NO: 23267 - RNA, 22 nt, Artificial Sequence
  Synthetic
uuacagcucagcauuucaaauu

SEQ ID NO: 23268 - RNA, 22 nt, Artificial Sequence
  Synthetic
uacagcucagcauuucaaauuc

SEQ ID NO: 23269 - RNA, 22 nt, Artificial Sequence
  Synthetic
acagcucagcauuucaaauuca

SEQ ID NO: 23270 - RNA, 22 nt, Artificial Sequence
  Synthetic
cagcucagcauuucaaauucaa

SEQ ID NO: 23271 - RNA, 22 nt, Artificial Sequence
  Synthetic
agcucagcauuucaaauucaag

SEQ ID NO: 23272 - RNA, 22 nt, Artificial Sequence
  Synthetic
gcucagcauuucaaauucaaga

SEQ ID NO: 23273 - RNA, 22 nt, Artificial Sequence
  Synthetic
cucagcauuucaaauucaagau

SEQ ID NO: 23274 - RNA, 22 nt, Artificial Sequence
  Synthetic
ucagcauuucaaauucaagaua

SEQ ID NO: 23275 - RNA, 22 nt, Artificial Sequence
  Synthetic
cagcauuucaaauucaagauaa

SEQ ID NO: 23276 - RNA, 22 nt, Artificial Sequence
  Synthetic
agcauuucaaauucaagauaau

SEQ ID NO: 23277 - RNA, 22 nt, Artificial Sequence
  Synthetic
gcauuucaaauucaagauaauu

SEQ ID NO: 23278 - RNA, 22 nt, Artificial Sequence
  Synthetic
cauuucaaauucaagauaauuu

SEQ ID NO: 23279 - RNA, 22 nt, Artificial Sequence
  Synthetic
auuucaaauucaagauaauuuc

SEQ ID NO: 23280 - RNA, 22 nt, Artificial Sequence
  Synthetic
uuucaaauucaagauaauuucu

SEQ ID NO: 23281 - RNA, 22 nt, Artificial Sequence
  Synthetic
uucaaauucaagauaauuucuu

SEQ ID NO: 23282 - RNA, 22 nt, Artificial Sequence
  Synthetic
ucaaauucaagauaauuucuua

SEQ ID NO: 23283 - RNA, 22 nt, Artificial Sequence
  Synthetic
caaauucaagauaauuucuuau

SEQ ID NO: 23284 - RNA, 22 nt, Artificial Sequence
  Synthetic
aaauucaagauaauuucuuauu

SEQ ID NO: 23285 - RNA, 22 nt, Artificial Sequence
  Synthetic
aauucaagauaauuucuuauuc

SEQ ID NO: 23286 - RNA, 22 nt, Artificial Sequence
  Synthetic
auucaagauaauuucuuauuca

SEQ ID NO: 23287 - RNA, 22 nt, Artificial Sequence
  Synthetic
uucaagauaauuucuuauucaa

SEQ ID NO: 23288 - RNA, 22 nt, Artificial Sequence
  Synthetic
ucaagauaauuucuuauucaaa

SEQ ID NO: 23289 - RNA, 22 nt, Artificial Sequence
  Synthetic
caagauaauuucuuauucaaau

SEQ ID NO: 23290 - RNA, 22 nt, Artificial Sequence
  Synthetic
aagauaauuucuuauucaaaug

SEQ ID NO: 23291 - RNA, 22 nt, Artificial Sequence
  Synthetic
agauaauuucuuauucaaaugu

SEQ ID NO: 23292 - RNA, 22 nt, Artificial Sequence
  Synthetic
gauaauuucuuauucaaaugug

SEQ ID NO: 23293 - RNA, 22 nt, Artificial Sequence
  Synthetic
auaauuucuuauucaaaugugg

SEQ ID NO: 23294 - RNA, 22 nt, Artificial Sequence
  Synthetic
uaauuucuuauucaaaugugga

SEQ ID NO: 23295 - RNA, 22 nt, Artificial Sequence
  Synthetic
aauuucuuauucaaauguggac

SEQ ID NO: 23296 - RNA, 22 nt, Artificial Sequence
  Synthetic
auuucuuauucaaauguggacc

SEQ ID NO: 23297 - RNA, 22 nt, Artificial Sequence
  Synthetic
uuucuuauucaaauguggacca

SEQ ID NO: 23298 - RNA, 22 nt, Artificial Sequence
  Synthetic
uucuuauucaaauguggaccaa

SEQ ID NO: 23299 - RNA, 22 nt, Artificial Sequence
  Synthetic
ucuuauucaaauguggaccaac

SEQ ID NO: 23300 - RNA, 22 nt, Artificial Sequence
  Synthetic
cuuauucaaauguggaccaaca

SEQ ID NO: 23301 - RNA, 22 nt, Artificial Sequence
  Synthetic
uuauucaaauguggaccaacag

SEQ ID NO: 23302 - RNA, 22 nt, Artificial Sequence
  Synthetic
uauucaaauguggaccaacaga

SEQ ID NO: 23303 - RNA, 22 nt, Artificial Sequence
  Synthetic
auucaaauguggaccaacagau

SEQ ID NO: 23304 - RNA, 22 nt, Artificial Sequence
  Synthetic
uucaaauguggaccaacagaua

SEQ ID NO: 23305 - RNA, 22 nt, Artificial Sequence
  Synthetic
ucaaauguggaccaacagauaa

SEQ ID NO: 23306 - RNA, 22 nt, Artificial Sequence
  Synthetic
caaauguggaccaacagauaac

SEQ ID NO: 23307 - RNA, 22 nt, Artificial Sequence
  Synthetic
aaauguggaccaacagauaacu

SEQ ID NO: 23308 - RNA, 22 nt, Artificial Sequence
  Synthetic
aauguggaccaacagauaacug

SEQ ID NO: 23309 - RNA, 22 nt, Artificial Sequence
  Synthetic
auguggaccaacagauaacuga

SEQ ID NO: 23310 - RNA, 22 nt, Artificial Sequence
  Synthetic
uguggaccaacagauaacugaa

SEQ ID NO: 23311 - RNA, 22 nt, Artificial Sequence
  Synthetic
guggaccaacagauaacugaaa

SEQ ID NO: 23312 - RNA, 22 nt, Artificial Sequence
  Synthetic
uggaccaacagauaacugaaaa

SEQ ID NO: 23313 - RNA, 22 nt, Artificial Sequence
  Synthetic
ggaccaacagauaacugaaaau

SEQ ID NO: 23314 - RNA, 22 nt, Artificial Sequence
  Synthetic
gaccaacagauaacugaaaauu

SEQ ID NO: 23315 - RNA, 22 nt, Artificial Sequence
  Synthetic
accaacagauaacugaaaauuc

SEQ ID NO: 23316 - RNA, 22 nt, Artificial Sequence
  Synthetic
ccaacagauaacugaaaauuca

SEQ ID NO: 23317 - RNA, 22 nt, Artificial Sequence
  Synthetic
caacagauaacugaaaauucag

SEQ ID NO: 23318 - RNA, 22 nt, Artificial Sequence
  Synthetic
aacagauaacugaaaauucagu

SEQ ID NO: 23319 - RNA, 22 nt, Artificial Sequence
  Synthetic
acagauaacugaaaauucaguu

SEQ ID NO: 23320 - RNA, 22 nt, Artificial Sequence
  Synthetic
cagauaacugaaaauucaguuu

SEQ ID NO: 23321 - RNA, 22 nt, Artificial Sequence
  Synthetic
agauaacugaaaauucaguuuc

SEQ ID NO: 23322 - RNA, 22 nt, Artificial Sequence
  Synthetic
gauaacugaaaauucaguuuca

SEQ ID NO: 23323 - RNA, 22 nt, Artificial Sequence
  Synthetic
auaacugaaaauucaguuucau

SEQ ID NO: 23324 - RNA, 22 nt, Artificial Sequence
  Synthetic
uaacugaaaauucaguuucaug

SEQ ID NO: 23325 - RNA, 22 nt, Artificial Sequence
  Synthetic
aacugaaaauucaguuucauga

SEQ ID NO: 23326 - RNA, 22 nt, Artificial Sequence
  Synthetic
acugaaaauucaguuucaugag

SEQ ID NO: 23327 - RNA, 22 nt, Artificial Sequence
  Synthetic
cugaaaauucaguuucaugaga

SEQ ID NO: 23328 - RNA, 22 nt, Artificial Sequence
  Synthetic
ugaaaauucaguuucaugagac

SEQ ID NO: 23329 - RNA, 22 nt, Artificial Sequence
  Synthetic
gaaaauucaguuucaugagacg

SEQ ID NO: 23330 - RNA, 22 nt, Artificial Sequence
  Synthetic
aaaauucaguuucaugagacgu

SEQ ID NO: 23331 - RNA, 22 nt, Artificial Sequence
  Synthetic
aaauucaguuucaugagacgua

SEQ ID NO: 23332 - RNA, 22 nt, Artificial Sequence
  Synthetic
aauucaguuucaugagacguaa

SEQ ID NO: 23333 - RNA, 22 nt, Artificial Sequence
  Synthetic
auucaguuucaugagacguaag

SEQ ID NO: 23334 - RNA, 22 nt, Artificial Sequence
  Synthetic
uucaguuucaugagacguaagc

SEQ ID NO: 23335 - RNA, 22 nt, Artificial Sequence
  Synthetic
ucaguuucaugagacguaagca

SEQ ID NO: 23336 - RNA, 22 nt, Artificial Sequence
  Synthetic
caguuucaugagacguaagcag

SEQ ID NO: 23337 - RNA, 22 nt, Artificial Sequence
  Synthetic
aguuucaugagacguaagcagc

SEQ ID NO: 23338 - RNA, 22 nt, Artificial Sequence
  Synthetic
guuucaugagacguaagcagcu

SEQ ID NO: 23339 - RNA, 22 nt, Artificial Sequence
  Synthetic
uuucaugagacguaagcagcua

SEQ ID NO: 23340 - RNA, 22 nt, Artificial Sequence
  Synthetic
uucaugagacguaagcagcuag

SEQ ID NO: 23341 - RNA, 22 nt, Artificial Sequence
  Synthetic
ucaugagacguaagcagcuaga

SEQ ID NO: 23342 - RNA, 22 nt, Artificial Sequence
  Synthetic
caugagacguaagcagcuagau

SEQ ID NO: 23343 - RNA, 22 nt, Artificial Sequence
  Synthetic
augagacguaagcagcuagaug

SEQ ID NO: 23344 - RNA, 22 nt, Artificial Sequence
  Synthetic
ugagacguaagcagcuagaugu

SEQ ID NO: 23345 - RNA, 22 nt, Artificial Sequence
  Synthetic
gagacguaagcagcuagaugua

SEQ ID NO: 23346 - RNA, 22 nt, Artificial Sequence
  Synthetic
agacguaagcagcuagauguaa

SEQ ID NO: 23347 - RNA, 22 nt, Artificial Sequence
  Synthetic
gacguaagcagcuagauguaaa

SEQ ID NO: 23348 - RNA, 22 nt, Artificial Sequence
  Synthetic
acguaagcagcuagauguaaag

SEQ ID NO: 23349 - RNA, 22 nt, Artificial Sequence
  Synthetic
cguaagcagcuagauguaaagg

SEQ ID NO: 23350 - RNA, 22 nt, Artificial Sequence
  Synthetic
guaagcagcuagauguaaaggg

SEQ ID NO: 23351 - RNA, 22 nt, Artificial Sequence
  Synthetic
uaagcagcuagauguaaagggg

SEQ ID NO: 23352 - RNA, 22 nt, Artificial Sequence
  Synthetic
aagcagcuagauguaaagggga

SEQ ID NO: 23353 - RNA, 22 nt, Artificial Sequence
  Synthetic
agcagcuagauguaaaggggau

SEQ ID NO: 23354 - RNA, 22 nt, Artificial Sequence
  Synthetic
gcagcuagauguaaaggggaua

SEQ ID NO: 23355 - RNA, 22 nt, Artificial Sequence
  Synthetic
cagcuagauguaaaggggauaa

SEQ ID NO: 23356 - RNA, 22 nt, Artificial Sequence
  Synthetic
agcuagauguaaaggggauaaa

SEQ ID NO: 23357 - RNA, 22 nt, Artificial Sequence
  Synthetic
gcuagauguaaaggggauaaag

SEQ ID NO: 23358 - RNA, 22 nt, Artificial Sequence
  Synthetic
cuagauguaaaggggauaaaga

SEQ ID NO: 23359 - RNA, 22 nt, Artificial Sequence
  Synthetic
uagauguaaaggggauaaagag

SEQ ID NO: 23360 - RNA, 22 nt, Artificial Sequence
  Synthetic
agauguaaaggggauaaagagg

SEQ ID NO: 23361 - RNA, 22 nt, Artificial Sequence
  Synthetic
gauguaaaggggauaaagagga

SEQ ID NO: 23362 - RNA, 22 nt, Artificial Sequence
  Synthetic
auguaaaggggauaaagaggac

SEQ ID NO: 23363 - RNA, 22 nt, Artificial Sequence
  Synthetic
uguaaaggggauaaagaggaca

SEQ ID NO: 23364 - RNA, 22 nt, Artificial Sequence
  Synthetic
guaaaggggauaaagaggacaa

SEQ ID NO: 23365 - RNA, 22 nt, Artificial Sequence
  Synthetic
uaaaggggauaaagaggacaaa

SEQ ID NO: 23366 - RNA, 22 nt, Artificial Sequence
  Synthetic
aaaggggauaaagaggacaaag

SEQ ID NO: 23367 - RNA, 22 nt, Artificial Sequence
  Synthetic
aaggggauaaagaggacaaagu

SEQ ID NO: 23368 - RNA, 22 nt, Artificial Sequence
  Synthetic
aggggauaaagaggacaaaguc

SEQ ID NO: 23369 - RNA, 22 nt, Artificial Sequence
  Synthetic
ggggauaaagaggacaaaguca

SEQ ID NO: 23370 - RNA, 22 nt, Artificial Sequence
  Synthetic
gggauaaagaggacaaagucau

SEQ ID NO: 23371 - RNA, 22 nt, Artificial Sequence
  Synthetic
ggauaaagaggacaaagucaug

SEQ ID NO: 23372 - RNA, 22 nt, Artificial Sequence
  Synthetic
gauaaagaggacaaagucaugc

SEQ ID NO: 23373 - RNA, 22 nt, Artificial Sequence
  Synthetic
auaaagaggacaaagucaugcg

SEQ ID NO: 23374 - RNA, 22 nt, Artificial Sequence
  Synthetic
uaaagaggacaaagucaugcgc

SEQ ID NO: 23375 - RNA, 22 nt, Artificial Sequence
  Synthetic
aaagaggacaaagucaugcgcu

SEQ ID NO: 23376 - RNA, 22 nt, Artificial Sequence
  Synthetic
aagaggacaaagucaugcgcuu

SEQ ID NO: 23377 - RNA, 22 nt, Artificial Sequence
  Synthetic
agaggacaaagucaugcgcuuu

SEQ ID NO: 23378 - RNA, 22 nt, Artificial Sequence
  Synthetic
gaggacaaagucaugcgcuuuu

SEQ ID NO: 23379 - RNA, 22 nt, Artificial Sequence
  Synthetic
aggacaaagucaugcgcuuuua

SEQ ID NO: 23380 - RNA, 22 nt, Artificial Sequence
  Synthetic
ggacaaagucaugcgcuuuuac

SEQ ID NO: 23381 - RNA, 22 nt, Artificial Sequence
  Synthetic
gacaaagucaugcgcuuuuaca

SEQ ID NO: 23382 - RNA, 22 nt, Artificial Sequence
  Synthetic
acaaagucaugcgcuuuuacau

SEQ ID NO: 23383 - RNA, 22 nt, Artificial Sequence
  Synthetic
caaagucaugcgcuuuuacauu

SEQ ID NO: 23384 - RNA, 22 nt, Artificial Sequence
  Synthetic
aaagucaugcgcuuuuacauuc

SEQ ID NO: 23385 - RNA, 22 nt, Artificial Sequence
  Synthetic
aagucaugcgcuuuuacauucg

SEQ ID NO: 23386 - RNA, 22 nt, Artificial Sequence
  Synthetic
agucaugcgcuuuuacauucgg

SEQ ID NO: 23387 - RNA, 22 nt, Artificial Sequence
  Synthetic
gucaugcgcuuuuacauucgga

SEQ ID NO: 23388 - RNA, 22 nt, Artificial Sequence
  Synthetic
ucaugcgcuuuuacauucggaa

SEQ ID NO: 23389 - RNA, 22 nt, Artificial Sequence
  Synthetic
caugcgcuuuuacauucggaau

SEQ ID NO: 23390 - RNA, 22 nt, Artificial Sequence
  Synthetic
augcgcuuuuacauucggaauu

SEQ ID NO: 23391 - RNA, 22 nt, Artificial Sequence
  Synthetic
ugcgcuuuuacauucggaauuc

SEQ ID NO: 23392 - RNA, 22 nt, Artificial Sequence
  Synthetic
gcgcuuuuacauucggaauucu

SEQ ID NO: 23393 - RNA, 22 nt, Artificial Sequence
  Synthetic
cgcuuuuacauucggaauucug

SEQ ID NO: 23394 - RNA, 22 nt, Artificial Sequence
  Synthetic
gcuuuuacauucggaauucugc

SEQ ID NO: 23395 - RNA, 22 nt, Artificial Sequence
  Synthetic
cuuuuacauucggaauucugca

SEQ ID NO: 23396 - RNA, 22 nt, Artificial Sequence
  Synthetic
uuuuacauucggaauucugcac

SEQ ID NO: 23397 - RNA, 22 nt, Artificial Sequence
  Synthetic
uuuacauucggaauucugcacu

SEQ ID NO: 23398 - RNA, 22 nt, Artificial Sequence
  Synthetic
uuacauucggaauucugcacuu

SEQ ID NO: 23399 - RNA, 22 nt, Artificial Sequence
  Synthetic
uacauucggaauucugcacuuc

SEQ ID NO: 23400 - RNA, 22 nt, Artificial Sequence
  Synthetic
acauucggaauucugcacuucc

SEQ ID NO: 23401 - RNA, 22 nt, Artificial Sequence
  Synthetic
cauucggaauucugcacuucca

SEQ ID NO: 23402 - RNA, 22 nt, Artificial Sequence
  Synthetic
auucggaauucugcacuuccag

SEQ ID NO: 23403 - RNA, 22 nt, Artificial Sequence
  Synthetic
uucggaauucugcacuuccagc

SEQ ID NO: 23404 - RNA, 22 nt, Artificial Sequence
  Synthetic
ucggaauucugcacuuccagca

SEQ ID NO: 23405 - RNA, 22 nt, Artificial Sequence
  Synthetic
cggaauucugcacuuccagcac

SEQ ID NO: 23406 - RNA, 22 nt, Artificial Sequence
  Synthetic
ggaauucugcacuuccagcaca

SEQ ID NO: 23407 - RNA, 22 nt, Artificial Sequence
  Synthetic
gaauucugcacuuccagcacag

SEQ ID NO: 23408 - RNA, 22 nt, Artificial Sequence
  Synthetic
aauucugcacuuccagcacagu

SEQ ID NO: 23409 - RNA, 22 nt, Artificial Sequence
  Synthetic
auucugcacuuccagcacaguu

SEQ ID NO: 23410 - RNA, 22 nt, Artificial Sequence
  Synthetic
uucugcacuuccagcacaguuc

SEQ ID NO: 23411 - RNA, 22 nt, Artificial Sequence
  Synthetic
ucugcacuuccagcacaguucu

SEQ ID NO: 23412 - RNA, 22 nt, Artificial Sequence
  Synthetic
cugcacuuccagcacaguucua

SEQ ID NO: 23413 - RNA, 22 nt, Artificial Sequence
  Synthetic
ugcacuuccagcacaguucuaa

SEQ ID NO: 23414 - RNA, 22 nt, Artificial Sequence
  Synthetic
gcacuuccagcacaguucuaaa

SEQ ID NO: 23415 - RNA, 22 nt, Artificial Sequence
  Synthetic
cacuuccagcacaguucuaaac

SEQ ID NO: 23416 - RNA, 22 nt, Artificial Sequence
  Synthetic
acuuccagcacaguucuaaaca

SEQ ID NO: 23417 - RNA, 22 nt, Artificial Sequence
  Synthetic
cuuccagcacaguucuaaacau

SEQ ID NO: 23418 - RNA, 22 nt, Artificial Sequence
  Synthetic
uuccagcacaguucuaaacauc

SEQ ID NO: 23419 - RNA, 22 nt, Artificial Sequence
  Synthetic
uccagcacaguucuaaacaucu

SEQ ID NO: 23420 - RNA, 22 nt, Artificial Sequence
  Synthetic
ccagcacaguucuaaacaucuu

SEQ ID NO: 23421 - RNA, 22 nt, Artificial Sequence
  Synthetic
cagcacaguucuaaacaucuug

SEQ ID NO: 23422 - RNA, 22 nt, Artificial Sequence
  Synthetic
agcacaguucuaaacaucuugu

SEQ ID NO: 23423 - RNA, 22 nt, Artificial Sequence
  Synthetic
gcacaguucuaaacaucuugua

SEQ ID NO: 23424 - RNA, 22 nt, Artificial Sequence
  Synthetic
cacaguucuaaacaucuuguau

SEQ ID NO: 23425 - RNA, 22 nt, Artificial Sequence
  Synthetic
acaguucuaaacaucuuguauu

SEQ ID NO: 23426 - RNA, 22 nt, Artificial Sequence
  Synthetic
caguucuaaacaucuuguauug

SEQ ID NO: 23427 - RNA, 22 nt, Artificial Sequence
  Synthetic
aguucuaaacaucuuguauuga

SEQ ID NO: 23428 - RNA, 22 nt, Artificial Sequence
  Synthetic
guucuaaacaucuuguauugac

SEQ ID NO: 23429 - RNA, 22 nt, Artificial Sequence
  Synthetic
uucuaaacaucuuguauugacu

SEQ ID NO: 23430 - RNA, 22 nt, Artificial Sequence
  Synthetic
ucuaaacaucuuguauugacuu

SEQ ID NO: 23431 - RNA, 22 nt, Artificial Sequence
  Synthetic
cuaaacaucuuguauugacuuu

SEQ ID NO: 23432 - RNA, 22 nt, Artificial Sequence
  Synthetic
uaaacaucuuguauugacuuug

SEQ ID NO: 23433 - RNA, 22 nt, Artificial Sequence
  Synthetic
aaacaucuuguauugacuuugg

SEQ ID NO: 23434 - RNA, 22 nt, Artificial Sequence
  Synthetic
aacaucuuguauugacuuugga

SEQ ID NO: 23435 - RNA, 22 nt, Artificial Sequence
  Synthetic
acaucuuguauugacuuuggag

SEQ ID NO: 23436 - RNA, 22 nt, Artificial Sequence
  Synthetic
caucuuguauugacuuuggagg

SEQ ID NO: 23437 - RNA, 22 nt, Artificial Sequence
  Synthetic
aucuuguauugacuuuggagga

SEQ ID NO: 23438 - RNA, 22 nt, Artificial Sequence
  Synthetic
ucuuguauugacuuuggaggag

SEQ ID NO: 23439 - RNA, 22 nt, Artificial Sequence
  Synthetic
cuuguauugacuuuggaggaga

SEQ ID NO: 23440 - RNA, 22 nt, Artificial Sequence
  Synthetic
uuguauugacuuuggaggagaa

SEQ ID NO: 23441 - RNA, 22 nt, Artificial Sequence
  Synthetic
uguauugacuuuggaggagaau

SEQ ID NO: 23442 - RNA, 22 nt, Artificial Sequence
  Synthetic
guauugacuuuggaggagaaug

SEQ ID NO: 23443 - RNA, 22 nt, Artificial Sequence
  Synthetic
uauugacuuuggaggagaauga

SEQ ID NO: 23444 - RNA, 22 nt, Artificial Sequence
  Synthetic
auugacuuuggaggagaaugaa

SEQ ID NO: 23445 - RNA, 22 nt, Artificial Sequence
  Synthetic
uugacuuuggaggagaaugaaa

SEQ ID NO: 23446 - RNA, 22 nt, Artificial Sequence
  Synthetic
ugacuuuggaggagaaugaaaa

SEQ ID NO: 23447 - RNA, 22 nt, Artificial Sequence
  Synthetic
gacuuuggaggagaaugaaaau

SEQ ID NO: 23448 - RNA, 22 nt, Artificial Sequence
  Synthetic
acuuuggaggagaaugaaaaua

SEQ ID NO: 23449 - RNA, 22 nt, Artificial Sequence
  Synthetic
cuuuggaggagaaugaaaauag

SEQ ID NO: 23450 - RNA, 22 nt, Artificial Sequence
  Synthetic
uuuggaggagaaugaaaauagu

SEQ ID NO: 23451 - RNA, 22 nt, Artificial Sequence
  Synthetic
uuggaggagaaugaaaauagug

SEQ ID NO: 23452 - RNA, 22 nt, Artificial Sequence
  Synthetic
uggaggagaaugaaaauaguga

SEQ ID NO: 23453 - RNA, 22 nt, Artificial Sequence
  Synthetic
ggaggagaaugaaaauagugaa

SEQ ID NO: 23454 - RNA, 22 nt, Artificial Sequence
  Synthetic
gaggagaaugaaaauagugaag

SEQ ID NO: 23455 - RNA, 22 nt, Artificial Sequence
  Synthetic
aggagaaugaaaauagugaagc

SEQ ID NO: 23456 - RNA, 22 nt, Artificial Sequence
  Synthetic
ggagaaugaaaauagugaagca

SEQ ID NO: 23457 - RNA, 22 nt, Artificial Sequence
  Synthetic
gagaaugaaaauagugaagcaa

SEQ ID NO: 23458 - RNA, 22 nt, Artificial Sequence
  Synthetic
agaaugaaaauagugaagcaag

SEQ ID NO: 23459 - RNA, 22 nt, Artificial Sequence
  Synthetic
gaaugaaaauagugaagcaaga

SEQ ID NO: 23460 - RNA, 22 nt, Artificial Sequence
  Synthetic
aaugaaaauagugaagcaagag

SEQ ID NO: 23461 - RNA, 22 nt, Artificial Sequence
  Synthetic
augaaaauagugaagcaagagu

SEQ ID NO: 23462 - RNA, 22 nt, Artificial Sequence
  Synthetic
ugaaaauagugaagcaagagug

SEQ ID NO: 23463 - RNA, 22 nt, Artificial Sequence
  Synthetic
gaaaauagugaagcaagagugg

SEQ ID NO: 23464 - RNA, 22 nt, Artificial Sequence
  Synthetic
aaaauagugaagcaagagugga

SEQ ID NO: 23465 - RNA, 22 nt, Artificial Sequence
  Synthetic
aaauagugaagcaagaguggau

SEQ ID NO: 23466 - RNA, 22 nt, Artificial Sequence
  Synthetic
aauagugaagcaagaguggauu

SEQ ID NO: 23467 - RNA, 22 nt, Artificial Sequence
  Synthetic
auagugaagcaagaguggauua

SEQ ID NO: 23468 - RNA, 22 nt, Artificial Sequence
  Synthetic
uagugaagcaagaguggauuag

SEQ ID NO: 23469 - RNA, 22 nt, Artificial Sequence
  Synthetic
agugaagcaagaguggauuagu

SEQ ID NO: 23470 - RNA, 22 nt, Artificial Sequence
  Synthetic
gugaagcaagaguggauuagua

SEQ ID NO: 23471 - RNA, 22 nt, Artificial Sequence
  Synthetic
ugaagcaagaguggauuaguaa

SEQ ID NO: 23472 - RNA, 22 nt, Artificial Sequence
  Synthetic
gaagcaagaguggauuaguaaa

SEQ ID NO: 23473 - RNA, 22 nt, Artificial Sequence
  Synthetic
aagcaagaguggauuaguaaau

SEQ ID NO: 23474 - RNA, 22 nt, Artificial Sequence
  Synthetic
agcaagaguggauuaguaaaua

SEQ ID NO: 23475 - RNA, 22 nt, Artificial Sequence
  Synthetic
gcaagaguggauuaguaaauau

SEQ ID NO: 23476 - RNA, 22 nt, Artificial Sequence
  Synthetic
caagaguggauuaguaaauaua

SEQ ID NO: 23477 - RNA, 22 nt, Artificial Sequence
  Synthetic
aagaguggauuaguaaauauac

SEQ ID NO: 23478 - RNA, 22 nt, Artificial Sequence
  Synthetic
agaguggauuaguaaauauacu

SEQ ID NO: 23479 - RNA, 22 nt, Artificial Sequence
  Synthetic
gaguggauuaguaaauauacuu

SEQ ID NO: 23480 - RNA, 22 nt, Artificial Sequence
  Synthetic
aguggauuaguaaauauacuua

SEQ ID NO: 23481 - RNA, 22 nt, Artificial Sequence
  Synthetic
guggauuaguaaauauacuuaa

SEQ ID NO: 23482 - RNA, 22 nt, Artificial Sequence
  Synthetic
uggauuaguaaauauacuuaaa

SEQ ID NO: 23483 - RNA, 22 nt, Artificial Sequence
  Synthetic
ggauuaguaaauauacuuaaau

SEQ ID NO: 23484 - RNA, 22 nt, Artificial Sequence
  Synthetic
gauuaguaaauauacuuaaauc

SEQ ID NO: 23485 - RNA, 22 nt, Artificial Sequence
  Synthetic
auuaguaaauauacuuaaaucg

SEQ ID NO: 23486 - RNA, 22 nt, Artificial Sequence
  Synthetic
uuaguaaauauacuuaaaucgc

SEQ ID NO: 23487 - RNA, 22 nt, Artificial Sequence
  Synthetic
uaguaaauauacuuaaaucgca

SEQ ID NO: 23488 - RNA, 22 nt, Artificial Sequence
  Synthetic
aguaaauauacuuaaaucgcaa

SEQ ID NO: 23489 - RNA, 22 nt, Artificial Sequence
  Synthetic
guaaauauacuuaaaucgcaau

SEQ ID NO: 23490 - RNA, 22 nt, Artificial Sequence
  Synthetic
uaaauauacuuaaaucgcaaua

SEQ ID NO: 23491 - RNA, 22 nt, Artificial Sequence
  Synthetic
aaauauacuuaaaucgcaauac

SEQ ID NO: 23492 - RNA, 22 nt, Artificial Sequence
  Synthetic
aauauacuuaaaucgcaauacc

SEQ ID NO: 23493 - RNA, 22 nt, Artificial Sequence
  Synthetic
auauacuuaaaucgcaauaccu

SEQ ID NO: 23494 - RNA, 22 nt, Artificial Sequence
  Synthetic
uauacuuaaaucgcaauaccua

SEQ ID NO: 23495 - RNA, 22 nt, Artificial Sequence
  Synthetic
auacuuaaaucgcaauaccuag

SEQ ID NO: 23496 - RNA, 22 nt, Artificial Sequence
  Synthetic
uacuuaaaucgcaauaccuagg

SEQ ID NO: 23497 - RNA, 22 nt, Artificial Sequence
  Synthetic
acuuaaaucgcaauaccuagga

SEQ ID NO: 23498 - RNA, 22 nt, Artificial Sequence
  Synthetic
cuuaaaucgcaauaccuaggag

SEQ ID NO: 23499 - RNA, 22 nt, Artificial Sequence
  Synthetic
uuaaaucgcaauaccuaggaga

SEQ ID NO: 23500 - RNA, 22 nt, Artificial Sequence
  Synthetic
uaaaucgcaauaccuaggagaa

SEQ ID NO: 23501 - RNA, 22 nt, Artificial Sequence
  Synthetic
aaaucgcaauaccuaggagaag

SEQ ID NO: 23502 - RNA, 22 nt, Artificial Sequence
  Synthetic
aaucgcaauaccuaggagaaga

SEQ ID NO: 23503 - RNA, 22 nt, Artificial Sequence
  Synthetic
aucgcaauaccuaggagaagag

SEQ ID NO: 23504 - RNA, 22 nt, Artificial Sequence
  Synthetic
ucgcaauaccuaggagaagagu

SEQ ID NO: 23505 - RNA, 22 nt, Artificial Sequence
  Synthetic
cgcaauaccuaggagaagagug

SEQ ID NO: 23506 - RNA, 22 nt, Artificial Sequence
  Synthetic
gcaauaccuaggagaagagugu

SEQ ID NO: 23507 - RNA, 22 nt, Artificial Sequence
  Synthetic
caauaccuaggagaagaguguu

SEQ ID NO: 23508 - RNA, 22 nt, Artificial Sequence
  Synthetic
aauaccuaggagaagaguguuu

SEQ ID NO: 23509 - RNA, 22 nt, Artificial Sequence
  Synthetic
auaccuaggagaagaguguuug

SEQ ID NO: 23510 - RNA, 22 nt, Artificial Sequence
  Synthetic
uaccuaggagaagaguguuugg

SEQ ID NO: 23511 - RNA, 22 nt, Artificial Sequence
  Synthetic
accuaggagaagaguguuuggc

SEQ ID NO: 23512 - RNA, 22 nt, Artificial Sequence
  Synthetic
ccuaggagaagaguguuuggcu

SEQ ID NO: 23513 - RNA, 22 nt, Artificial Sequence
  Synthetic
cuaggagaagaguguuuggcug

SEQ ID NO: 23514 - RNA, 22 nt, Artificial Sequence
  Synthetic
uaggagaagaguguuuggcuga

SEQ ID NO: 23515 - RNA, 22 nt, Artificial Sequence
  Synthetic
aggagaagaguguuuggcugaa

SEQ ID NO: 23516 - RNA, 22 nt, Artificial Sequence
  Synthetic
ggagaagaguguuuggcugaac

SEQ ID NO: 23517 - RNA, 22 nt, Artificial Sequence
  Synthetic
gagaagaguguuuggcugaacu

SEQ ID NO: 23518 - RNA, 22 nt, Artificial Sequence
  Synthetic
agaagaguguuuggcugaacug

SEQ ID NO: 23519 - RNA, 22 nt, Artificial Sequence
  Synthetic
gaagaguguuuggcugaacuga

SEQ ID NO: 23520 - RNA, 22 nt, Artificial Sequence
  Synthetic
aagaguguuuggcugaacugaa

SEQ ID NO: 23521 - RNA, 22 nt, Artificial Sequence
  Synthetic
agaguguuuggcugaacugaaa

SEQ ID NO: 23522 - RNA, 22 nt, Artificial Sequence
  Synthetic
gaguguuuggcugaacugaaau

SEQ ID NO: 23523 - RNA, 22 nt, Artificial Sequence
  Synthetic
aguguuuggcugaacugaaaua

SEQ ID NO: 23524 - RNA, 22 nt, Artificial Sequence
  Synthetic
guguuuggcugaacugaaauac

SEQ ID NO: 23525 - RNA, 22 nt, Artificial Sequence
  Synthetic
uguuuggcugaacugaaauacu

SEQ ID NO: 23526 - RNA, 22 nt, Artificial Sequence
  Synthetic
guuuggcugaacugaaauacuu

SEQ ID NO: 23527 - RNA, 22 nt, Artificial Sequence
  Synthetic
uuuggcugaacugaaauacuuu

SEQ ID NO: 23528 - RNA, 22 nt, Artificial Sequence
  Synthetic
uuggcugaacugaaauacuuuu

SEQ ID NO: 23529 - RNA, 22 nt, Artificial Sequence
  Synthetic
uggcugaacugaaauacuuuua

SEQ ID NO: 23530 - RNA, 22 nt, Artificial Sequence
  Synthetic
ggcugaacugaaauacuuuuaa

SEQ ID NO: 23531 - RNA, 22 nt, Artificial Sequence
  Synthetic
gcugaacugaaauacuuuuaac

SEQ ID NO: 23532 - RNA, 22 nt, Artificial Sequence
  Synthetic
cugaacugaaauacuuuuaaca

SEQ ID NO: 23533 - RNA, 22 nt, Artificial Sequence
  Synthetic
ugaacugaaauacuuuuaacac

SEQ ID NO: 23534 - RNA, 22 nt, Artificial Sequence
  Synthetic
gaacugaaauacuuuuaacaca

SEQ ID NO: 23535 - RNA, 22 nt, Artificial Sequence
  Synthetic
aacugaaauacuuuuaacacac

SEQ ID NO: 23536 - RNA, 22 nt, Artificial Sequence
  Synthetic
acugaaauacuuuuaacacaca

SEQ ID NO: 23537 - RNA, 22 nt, Artificial Sequence
  Synthetic
cugaaauacuuuuaacacacag

SEQ ID NO: 23538 - RNA, 22 nt, Artificial Sequence
  Synthetic
ugaaauacuuuuaacacacagu

SEQ ID NO: 23539 - RNA, 22 nt, Artificial Sequence
  Synthetic
gaaauacuuuuaacacacagug

SEQ ID NO: 23540 - RNA, 22 nt, Artificial Sequence
  Synthetic
aaauacuuuuaacacacagugc

SEQ ID NO: 23541 - RNA, 22 nt, Artificial Sequence
  Synthetic
aauacuuuuaacacacagugca

SEQ ID NO: 23542 - RNA, 22 nt, Artificial Sequence
  Synthetic
auacuuuuaacacacagugcag

SEQ ID NO: 23543 - RNA, 22 nt, Artificial Sequence
  Synthetic
uacuuuuaacacacagugcagu

SEQ ID NO: 23544 - RNA, 22 nt, Artificial Sequence
  Synthetic
acuuuuaacacacagugcaguu

SEQ ID NO: 23545 - RNA, 22 nt, Artificial Sequence
  Synthetic
cuuuuaacacacagugcaguua

SEQ ID NO: 23546 - RNA, 22 nt, Artificial Sequence
  Synthetic
uuuuaacacacagugcaguuac

SEQ ID NO: 23547 - RNA, 22 nt, Artificial Sequence
  Synthetic
uuuaacacacagugcaguuaca

SEQ ID NO: 23548 - RNA, 22 nt, Artificial Sequence
  Synthetic
uuaacacacagugcaguuacau

SEQ ID NO: 23549 - RNA, 22 nt, Artificial Sequence
  Synthetic
uaacacacagugcaguuacaug

SEQ ID NO: 23550 - RNA, 22 nt, Artificial Sequence
  Synthetic
aacacacagugcaguuacauga

SEQ ID NO: 23551 - RNA, 22 nt, Artificial Sequence
  Synthetic
acacacagugcaguuacaugag

SEQ ID NO: 23552 - RNA, 22 nt, Artificial Sequence
  Synthetic
cacacagugcaguuacaugagu

SEQ ID NO: 23553 - RNA, 22 nt, Artificial Sequence
  Synthetic
acacagugcaguuacaugagug

SEQ ID NO: 23554 - RNA, 22 nt, Artificial Sequence
  Synthetic
cacagugcaguuacaugaguga

SEQ ID NO: 23555 - RNA, 22 nt, Artificial Sequence
  Synthetic
acagugcaguuacaugagugac

SEQ ID NO: 23556 - RNA, 22 nt, Artificial Sequence
  Synthetic
cagugcaguuacaugagugacu

SEQ ID NO: 23557 - RNA, 22 nt, Artificial Sequence
  Synthetic
agugcaguuacaugagugacuu

SEQ ID NO: 23558 - RNA, 22 nt, Artificial Sequence
  Synthetic
gugcaguuacaugagugacuua

SEQ ID NO: 23559 - RNA, 22 nt, Artificial Sequence
  Synthetic
ugcaguuacaugagugacuuaa

SEQ ID NO: 23560 - RNA, 22 nt, Artificial Sequence
  Synthetic
gcaguuacaugagugacuuaag

SEQ ID NO: 23561 - RNA, 22 nt, Artificial Sequence
  Synthetic
caguuacaugagugacuuaagg

SEQ ID NO: 23562 - RNA, 22 nt, Artificial Sequence
  Synthetic
aguuacaugagugacuuaaggg

SEQ ID NO: 23563 - RNA, 22 nt, Artificial Sequence
  Synthetic
guuacaugagugacuuaagggu

SEQ ID NO: 23564 - RNA, 22 nt, Artificial Sequence
  Synthetic
uuacaugagugacuuaaggguu

SEQ ID NO: 23565 - RNA, 22 nt, Artificial Sequence
  Synthetic
uacaugagugacuuaaggguuc

SEQ ID NO: 23566 - RNA, 22 nt, Artificial Sequence
  Synthetic
acaugagugacuuaaggguucu

SEQ ID NO: 23567 - RNA, 22 nt, Artificial Sequence
  Synthetic
caugagugacuuaaggguucuu

SEQ ID NO: 23568 - RNA, 22 nt, Artificial Sequence
  Synthetic
augagugacuuaaggguucuua

SEQ ID NO: 23569 - RNA, 22 nt, Artificial Sequence
  Synthetic
ugagugacuuaaggguucuuau

SEQ ID NO: 23570 - RNA, 22 nt, Artificial Sequence
  Synthetic
gagugacuuaaggguucuuauc

SEQ ID NO: 23571 - RNA, 22 nt, Artificial Sequence
  Synthetic
agugacuuaaggguucuuaucu

SEQ ID NO: 23572 - RNA, 22 nt, Artificial Sequence
  Synthetic
gugacuuaaggguucuuaucuc

SEQ ID NO: 23573 - RNA, 22 nt, Artificial Sequence
  Synthetic
ugacuuaaggguucuuaucucu

SEQ ID NO: 23574 - RNA, 22 nt, Artificial Sequence
  Synthetic
gacuuaaggguucuuaucucug

SEQ ID NO: 23575 - RNA, 22 nt, Artificial Sequence
  Synthetic
acuuaaggguucuuaucucugg

SEQ ID NO: 23576 - RNA, 22 nt, Artificial Sequence
  Synthetic
cuuaaggguucuuaucucugga

SEQ ID NO: 23577 - RNA, 22 nt, Artificial Sequence
  Synthetic
uuaaggguucuuaucucuggac

SEQ ID NO: 23578 - RNA, 22 nt, Artificial Sequence
  Synthetic
uaaggguucuuaucucuggacu

SEQ ID NO: 23579 - RNA, 22 nt, Artificial Sequence
  Synthetic
aaggguucuuaucucuggacuu

SEQ ID NO: 23580 - RNA, 22 nt, Artificial Sequence
  Synthetic
aggguucuuaucucuggacuuu

SEQ ID NO: 23581 - RNA, 22 nt, Artificial Sequence
  Synthetic
ggguucuuaucucuggacuuug

SEQ ID NO: 23582 - RNA, 22 nt, Artificial Sequence
  Synthetic
gguucuuaucucuggacuuuga

SEQ ID NO: 23583 - RNA, 22 nt, Artificial Sequence
  Synthetic
guucuuaucucuggacuuugag

SEQ ID NO: 23584 - RNA, 22 nt, Artificial Sequence
  Synthetic
uucuuaucucuggacuuugagu

SEQ ID NO: 23585 - RNA, 22 nt, Artificial Sequence
  Synthetic
ucuuaucucuggacuuugaguu

SEQ ID NO: 23586 - RNA, 22 nt, Artificial Sequence
  Synthetic
cuuaucucuggacuuugaguuu

SEQ ID NO: 23587 - RNA, 22 nt, Artificial Sequence
  Synthetic
uuaucucuggacuuugaguuuu

SEQ ID NO: 23588 - RNA, 22 nt, Artificial Sequence
  Synthetic
uaucucuggacuuugaguuuug

SEQ ID NO: 23589 - RNA, 22 nt, Artificial Sequence
  Synthetic
aucucuggacuuugaguuuugg

SEQ ID NO: 23590 - RNA, 22 nt, Artificial Sequence
  Synthetic
ucucuggacuuugaguuuuggc

SEQ ID NO: 23591 - RNA, 22 nt, Artificial Sequence
  Synthetic
cucuggacuuugaguuuuggcc

SEQ ID NO: 23592 - RNA, 22 nt, Artificial Sequence
  Synthetic
ucuggacuuugaguuuuggccu

SEQ ID NO: 23593 - RNA, 22 nt, Artificial Sequence
  Synthetic
cuggacuuugaguuuuggccua

SEQ ID NO: 23594 - RNA, 22 nt, Artificial Sequence
  Synthetic
uggacuuugaguuuuggccuaa

SEQ ID NO: 23595 - RNA, 22 nt, Artificial Sequence
  Synthetic
ggacuuugaguuuuggccuaaa

SEQ ID NO: 23596 - RNA, 22 nt, Artificial Sequence
  Synthetic
gacuuugaguuuuggccuaaaa

SEQ ID NO: 23597 - RNA, 22 nt, Artificial Sequence
  Synthetic
acuuugaguuuuggccuaaaau

SEQ ID NO: 23598 - RNA, 22 nt, Artificial Sequence
  Synthetic
cuuugaguuuuggccuaaaaug

SEQ ID NO: 23599 - RNA, 22 nt, Artificial Sequence
  Synthetic
uuugaguuuuggccuaaaauga

SEQ ID NO: 23600 - RNA, 22 nt, Artificial Sequence
  Synthetic
uugaguuuuggccuaaaaugau

SEQ ID NO: 23601 - RNA, 22 nt, Artificial Sequence
  Synthetic
ugaguuuuggccuaaaaugaug

SEQ ID NO: 23602 - RNA, 22 nt, Artificial Sequence
  Synthetic
gaguuuuggccuaaaaugaugu

SEQ ID NO: 23603 - RNA, 22 nt, Artificial Sequence
  Synthetic
aguuuuggccuaaaaugaugua

SEQ ID NO: 23604 - RNA, 22 nt, Artificial Sequence
  Synthetic
guuuuggccuaaaaugauguaa

SEQ ID NO: 23605 - RNA, 22 nt, Artificial Sequence
  Synthetic
uuuuggccuaaaaugauguaau

SEQ ID NO: 23606 - RNA, 22 nt, Artificial Sequence
  Synthetic
uuuggccuaaaaugauguaaug

SEQ ID NO: 23607 - RNA, 22 nt, Artificial Sequence
  Synthetic
uuggccuaaaaugauguaauga

SEQ ID NO: 23608 - RNA, 22 nt, Artificial Sequence
  Synthetic
uggccuaaaaugauguaaugau

SEQ ID NO: 23609 - RNA, 22 nt, Artificial Sequence
  Synthetic
ggccuaaaaugauguaaugaug

SEQ ID NO: 23610 - RNA, 22 nt, Artificial Sequence
  Synthetic
gccuaaaaugauguaaugaugu

SEQ ID NO: 23611 - RNA, 22 nt, Artificial Sequence
  Synthetic
ccuaaaaugauguaaugauguu

SEQ ID NO: 23612 - RNA, 22 nt, Artificial Sequence
  Synthetic
cuaaaaugauguaaugauguug

SEQ ID NO: 23613 - RNA, 22 nt, Artificial Sequence
  Synthetic
uaaaaugauguaaugauguugc

SEQ ID NO: 23614 - RNA, 22 nt, Artificial Sequence
  Synthetic
aaaaugauguaaugauguugcu

SEQ ID NO: 23615 - RNA, 22 nt, Artificial Sequence
  Synthetic
aaaugauguaaugauguugcua

SEQ ID NO: 23616 - RNA, 22 nt, Artificial Sequence
  Synthetic
aaugauguaaugauguugcuaa

SEQ ID NO: 23617 - RNA, 22 nt, Artificial Sequence
  Synthetic
augauguaaugauguugcuaaa

SEQ ID NO: 23618 - RNA, 22 nt, Artificial Sequence
  Synthetic
ugauguaaugauguugcuaaaa

SEQ ID NO: 23619 - RNA, 22 nt, Artificial Sequence
  Synthetic
gauguaaugauguugcuaaaaa

SEQ ID NO: 23620 - RNA, 22 nt, Artificial Sequence
  Synthetic
auguaaugauguugcuaaaaag

SEQ ID NO: 23621 - RNA, 22 nt, Artificial Sequence
  Synthetic
uguaaugauguugcuaaaaaga

SEQ ID NO: 23622 - RNA, 22 nt, Artificial Sequence
  Synthetic
guaaugauguugcuaaaaagac

SEQ ID NO: 23623 - RNA, 22 nt, Artificial Sequence
  Synthetic
uaaugauguugcuaaaaagaca

SEQ ID NO: 23624 - RNA, 22 nt, Artificial Sequence
  Synthetic
aaugauguugcuaaaaagacau

SEQ ID NO: 23625 - RNA, 22 nt, Artificial Sequence
  Synthetic
augauguugcuaaaaagacauu

SEQ ID NO: 23626 - RNA, 22 nt, Artificial Sequence
  Synthetic
ugauguugcuaaaaagacauug

SEQ ID NO: 23627 - RNA, 22 nt, Artificial Sequence
  Synthetic
gauguugcuaaaaagacauugu

SEQ ID NO: 23628 - RNA, 22 nt, Artificial Sequence
  Synthetic
auguugcuaaaaagacauuguu

SEQ ID NO: 23629 - RNA, 22 nt, Artificial Sequence
  Synthetic
uguugcuaaaaagacauuguua

SEQ ID NO: 23630 - RNA, 22 nt, Artificial Sequence
  Synthetic
guugcuaaaaagacauuguuaa

SEQ ID NO: 23631 - RNA, 22 nt, Artificial Sequence
  Synthetic
uugcuaaaaagacauuguuaaa

SEQ ID NO: 23632 - RNA, 22 nt, Artificial Sequence
  Synthetic
ugcuaaaaagacauuguuaaag

SEQ ID NO: 23633 - RNA, 22 nt, Artificial Sequence
  Synthetic
gcuaaaaagacauuguuaaaga

SEQ ID NO: 23634 - RNA, 22 nt, Artificial Sequence
  Synthetic
cuaaaaagacauuguuaaagaa

SEQ ID NO: 23635 - RNA, 22 nt, Artificial Sequence
  Synthetic
uaaaaagacauuguuaaagaac

SEQ ID NO: 23636 - RNA, 22 nt, Artificial Sequence
  Synthetic
aaaaagacauuguuaaagaacu

SEQ ID NO: 23637 - RNA, 22 nt, Artificial Sequence
  Synthetic
aaaagacauuguuaaagaacuu

SEQ ID NO: 23638 - RNA, 22 nt, Artificial Sequence
  Synthetic
aaagacauuguuaaagaacuua

SEQ ID NO: 23639 - RNA, 22 nt, Artificial Sequence
  Synthetic
aagacauuguuaaagaacuuaa

SEQ ID NO: 23640 - RNA, 22 nt, Artificial Sequence
  Synthetic
agacauuguuaaagaacuuaaa

SEQ ID NO: 23641 - RNA, 22 nt, Artificial Sequence
  Synthetic
gacauuguuaaagaacuuaaag

SEQ ID NO: 23642 - RNA, 22 nt, Artificial Sequence
  Synthetic
acauuguuaaagaacuuaaagc

SEQ ID NO: 23643 - RNA, 22 nt, Artificial Sequence
  Synthetic
cauuguuaaagaacuuaaagcc

SEQ ID NO: 23644 - RNA, 22 nt, Artificial Sequence
  Synthetic
auuguuaaagaacuuaaagccg

SEQ ID NO: 23645 - RNA, 22 nt, Artificial Sequence
  Synthetic
uuguuaaagaacuuaaagccga

SEQ ID NO: 23646 - RNA, 22 nt, Artificial Sequence
  Synthetic
uguuaaagaacuuaaagccgaa

SEQ ID NO: 23647 - RNA, 22 nt, Artificial Sequence
  Synthetic
guuaaagaacuuaaagccgaaa

SEQ ID NO: 23648 - RNA, 22 nt, Artificial Sequence
  Synthetic
uuaaagaacuuaaagccgaaac

SEQ ID NO: 23649 - RNA, 22 nt, Artificial Sequence
  Synthetic
uaaagaacuuaaagccgaaaca

SEQ ID NO: 23650 - RNA, 22 nt, Artificial Sequence
  Synthetic
aaagaacuuaaagccgaaacag

SEQ ID NO: 23651 - RNA, 22 nt, Artificial Sequence
  Synthetic
aagaacuuaaagccgaaacagc

SEQ ID NO: 23652 - RNA, 22 nt, Artificial Sequence
  Synthetic
agaacuuaaagccgaaacagcu

SEQ ID NO: 23653 - RNA, 22 nt, Artificial Sequence
  Synthetic
gaacuuaaagccgaaacagcuc

SEQ ID NO: 23654 - RNA, 22 nt, Artificial Sequence
  Synthetic
aacuuaaagccgaaacagcuca

SEQ ID NO: 23655 - RNA, 22 nt, Artificial Sequence
  Synthetic
acuuaaagccgaaacagcucag

SEQ ID NO: 23656 - RNA, 22 nt, Artificial Sequence
  Synthetic
cuuaaagccgaaacagcucagc

SEQ ID NO: 23657 - RNA, 22 nt, Artificial Sequence
  Synthetic
uuaaagccgaaacagcucagca

SEQ ID NO: 23658 - RNA, 22 nt, Artificial Sequence
  Synthetic
uaaagccgaaacagcucagcag

SEQ ID NO: 23659 - RNA, 22 nt, Artificial Sequence
  Synthetic
aaagccgaaacagcucagcagg

SEQ ID NO: 23660 - RNA, 22 nt, Artificial Sequence
  Synthetic
aagccgaaacagcucagcagga

SEQ ID NO: 23661 - RNA, 22 nt, Artificial Sequence
  Synthetic
agccgaaacagcucagcaggau

SEQ ID NO: 23662 - RNA, 22 nt, Artificial Sequence
  Synthetic
gccgaaacagcucagcaggaug

SEQ ID NO: 23663 - RNA, 22 nt, Artificial Sequence
  Synthetic
ccgaaacagcucagcaggauga

SEQ ID NO: 23664 - RNA, 22 nt, Artificial Sequence
  Synthetic
cgaaacagcucagcaggaugaa

SEQ ID NO: 23665 - RNA, 22 nt, Artificial Sequence
  Synthetic
gaaacagcucagcaggaugaau

SEQ ID NO: 23666 - RNA, 22 nt, Artificial Sequence
  Synthetic
aaacagcucagcaggaugaaug

SEQ ID NO: 23667 - RNA, 22 nt, Artificial Sequence
  Synthetic
aacagcucagcaggaugaauga

SEQ ID NO: 23668 - RNA, 22 nt, Artificial Sequence
  Synthetic
acagcucagcaggaugaaugaa

SEQ ID NO: 23669 - RNA, 22 nt, Artificial Sequence
  Synthetic
cagcucagcaggaugaaugaag

SEQ ID NO: 23670 - RNA, 22 nt, Artificial Sequence
  Synthetic
agcucagcaggaugaaugaaga

SEQ ID NO: 23671 - RNA, 22 nt, Artificial Sequence
  Synthetic
gcucagcaggaugaaugaagau

SEQ ID NO: 23672 - RNA, 22 nt, Artificial Sequence
  Synthetic
cucagcaggaugaaugaagaug

SEQ ID NO: 23673 - RNA, 22 nt, Artificial Sequence
  Synthetic
ucagcaggaugaaugaagauga

SEQ ID NO: 23674 - RNA, 22 nt, Artificial Sequence
  Synthetic
cagcaggaugaaugaagaugaa

SEQ ID NO: 23675 - RNA, 22 nt, Artificial Sequence
  Synthetic
agcaggaugaaugaagaugaag

SEQ ID NO: 23676 - RNA, 22 nt, Artificial Sequence
  Synthetic
gcaggaugaaugaagaugaagg

SEQ ID NO: 23677 - RNA, 22 nt, Artificial Sequence
  Synthetic
caggaugaaugaagaugaaggu

SEQ ID NO: 23678 - RNA, 22 nt, Artificial Sequence
  Synthetic
aggaugaaugaagaugaaggua

SEQ ID NO: 23679 - RNA, 22 nt, Artificial Sequence
  Synthetic
ggaugaaugaagaugaagguac

SEQ ID NO: 23680 - RNA, 22 nt, Artificial Sequence
  Synthetic
gaugaaugaagaugaagguacu

SEQ ID NO: 23681 - RNA, 22 nt, Artificial Sequence
  Synthetic
augaaugaagaugaagguacug

SEQ ID NO: 23682 - RNA, 22 nt, Artificial Sequence
  Synthetic
ugaaugaagaugaagguacugg

SEQ ID NO: 23683 - RNA, 22 nt, Artificial Sequence
  Synthetic
gaaugaagaugaagguacuggc

SEQ ID NO: 23684 - RNA, 22 nt, Artificial Sequence
  Synthetic
aaugaagaugaagguacuggcu

SEQ ID NO: 23685 - RNA, 22 nt, Artificial Sequence
  Synthetic
augaagaugaagguacuggcua

SEQ ID NO: 23686 - RNA, 22 nt, Artificial Sequence
  Synthetic
ugaagaugaagguacuggcuau

SEQ ID NO: 23687 - RNA, 22 nt, Artificial Sequence
  Synthetic
gaagaugaagguacuggcuauc

SEQ ID NO: 23688 - RNA, 22 nt, Artificial Sequence
  Synthetic
aagaugaagguacuggcuaucc

SEQ ID NO: 23689 - RNA, 22 nt, Artificial Sequence
  Synthetic
agaugaagguacuggcuauccc

SEQ ID NO: 23690 - RNA, 22 nt, Artificial Sequence
  Synthetic
gaugaagguacuggcuauccca

SEQ ID NO: 23691 - RNA, 22 nt, Artificial Sequence
  Synthetic
augaagguacuggcuaucccaa

SEQ ID NO: 23692 - RNA, 22 nt, Artificial Sequence
  Synthetic
ugaagguacuggcuaucccaag

SEQ ID NO: 23693 - RNA, 22 nt, Artificial Sequence
  Synthetic
gaagguacuggcuaucccaagg

SEQ ID NO: 23694 - RNA, 22 nt, Artificial Sequence
  Synthetic
aagguacuggcuaucccaagga

SEQ ID NO: 23695 - RNA, 22 nt, Artificial Sequence
  Synthetic
agguacuggcuaucccaaggag

SEQ ID NO: 23696 - RNA, 22 nt, Artificial Sequence
  Synthetic
gguacuggcuaucccaaggagc

SEQ ID NO: 23697 - RNA, 22 nt, Artificial Sequence
  Synthetic
guacuggcuaucccaaggagcc

SEQ ID NO: 23698 - RNA, 22 nt, Artificial Sequence
  Synthetic
uacuggcuaucccaaggagccc

SEQ ID NO: 23699 - RNA, 22 nt, Artificial Sequence
  Synthetic
acuggcuaucccaaggagccca

SEQ ID NO: 23700 - RNA, 22 nt, Artificial Sequence
  Synthetic
cuggcuaucccaaggagcccau

SEQ ID NO: 23701 - RNA, 22 nt, Artificial Sequence
  Synthetic
uggcuaucccaaggagcccauu

SEQ ID NO: 23702 - RNA, 22 nt, Artificial Sequence
  Synthetic
ggcuaucccaaggagcccauuc

SEQ ID NO: 23703 - RNA, 22 nt, Artificial Sequence
  Synthetic
gcuaucccaaggagcccauuca

SEQ ID NO: 23704 - RNA, 22 nt, Artificial Sequence
  Synthetic
cuaucccaaggagcccauucaa

SEQ ID NO: 23705 - RNA, 22 nt, Artificial Sequence
  Synthetic
uaucccaaggagcccauucaac

SEQ ID NO: 23706 - RNA, 22 nt, Artificial Sequence
  Synthetic
aucccaaggagcccauucaaca

SEQ ID NO: 23707 - RNA, 22 nt, Artificial Sequence
  Synthetic
ucccaaggagcccauucaacag

SEQ ID NO: 23708 - RNA, 22 nt, Artificial Sequence
  Synthetic
cccaaggagcccauucaacagc

SEQ ID NO: 23709 - RNA, 22 nt, Artificial Sequence
  Synthetic
ccaaggagcccauucaacagca

SEQ ID NO: 23710 - RNA, 22 nt, Artificial Sequence
  Synthetic
caaggagcccauucaacagcag

SEQ ID NO: 23711 - RNA, 22 nt, Artificial Sequence
  Synthetic
aaggagcccauucaacagcagc

SEQ ID NO: 23712 - RNA, 22 nt, Artificial Sequence
  Synthetic
aggagcccauucaacagcagcu

SEQ ID NO: 23713 - RNA, 22 nt, Artificial Sequence
  Synthetic
ggagcccauucaacagcagcuu

SEQ ID NO: 23714 - RNA, 22 nt, Artificial Sequence
  Synthetic
gagcccauucaacagcagcuua

SEQ ID NO: 23715 - RNA, 22 nt, Artificial Sequence
  Synthetic
agcccauucaacagcagcuuac

SEQ ID NO: 23716 - RNA, 22 nt, Artificial Sequence
  Synthetic
gcccauucaacagcagcuuacc

SEQ ID NO: 23717 - RNA, 22 nt, Artificial Sequence
  Synthetic
cccauucaacagcagcuuaccu

SEQ ID NO: 23718 - RNA, 22 nt, Artificial Sequence
  Synthetic
ccauucaacagcagcuuaccuc

SEQ ID NO: 23719 - RNA, 22 nt, Artificial Sequence
  Synthetic
cauucaacagcagcuuaccucu

SEQ ID NO: 23720 - RNA, 22 nt, Artificial Sequence
  Synthetic
auucaacagcagcuuaccucuu

SEQ ID NO: 23721 - RNA, 22 nt, Artificial Sequence
  Synthetic
uucaacagcagcuuaccucuuc

SEQ ID NO: 23722 - RNA, 22 nt, Artificial Sequence
  Synthetic
ucaacagcagcuuaccucuucu

SEQ ID NO: 23723 - RNA, 22 nt, Artificial Sequence
  Synthetic
caacagcagcuuaccucuucuc

SEQ ID NO: 23724 - RNA, 22 nt, Artificial Sequence
  Synthetic
aacagcagcuuaccucuucuca

SEQ ID NO: 23725 - RNA, 22 nt, Artificial Sequence
  Synthetic
acagcagcuuaccucuucucag

SEQ ID NO: 23726 - RNA, 22 nt, Artificial Sequence
  Synthetic
cagcagcuuaccucuucucagc

SEQ ID NO: 23727 - RNA, 22 nt, Artificial Sequence
  Synthetic
agcagcuuaccucuucucagcu

SEQ ID NO: 23728 - RNA, 22 nt, Artificial Sequence
  Synthetic
gcagcuuaccucuucucagcuc

SEQ ID NO: 23729 - RNA, 22 nt, Artificial Sequence
  Synthetic
cagcuuaccucuucucagcucc

SEQ ID NO: 23730 - RNA, 22 nt, Artificial Sequence
  Synthetic
agcuuaccucuucucagcucca

SEQ ID NO: 23731 - RNA, 22 nt, Artificial Sequence
  Synthetic
gcuuaccucuucucagcuccau

SEQ ID NO: 23732 - RNA, 22 nt, Artificial Sequence
  Synthetic
cuuaccucuucucagcuccaua

SEQ ID NO: 23733 - RNA, 22 nt, Artificial Sequence
  Synthetic
uuaccucuucucagcuccauau

SEQ ID NO: 23734 - RNA, 22 nt, Artificial Sequence
  Synthetic
uaccucuucucagcuccauauu

SEQ ID NO: 23735 - RNA, 22 nt, Artificial Sequence
  Synthetic
accucuucucagcuccauauuu

SEQ ID NO: 23736 - RNA, 22 nt, Artificial Sequence
  Synthetic
ccucuucucagcuccauauuuu

SEQ ID NO: 23737 - RNA, 22 nt, Artificial Sequence
  Synthetic
cucuucucagcuccauauuuuc

SEQ ID NO: 23738 - RNA, 22 nt, Artificial Sequence
  Synthetic
ucuucucagcuccauauuuuca

SEQ ID NO: 23739 - RNA, 22 nt, Artificial Sequence
  Synthetic
cuucucagcuccauauuuucaa

SEQ ID NO: 23740 - RNA, 22 nt, Artificial Sequence
  Synthetic
uucucagcuccauauuuucaau

SEQ ID NO: 23741 - RNA, 22 nt, Artificial Sequence
  Synthetic
ucucagcuccauauuuucaaug

SEQ ID NO: 23742 - RNA, 22 nt, Artificial Sequence
  Synthetic
cucagcuccauauuuucaaugu

SEQ ID NO: 23743 - RNA, 22 nt, Artificial Sequence
  Synthetic
ucagcuccauauuuucaaugug

SEQ ID NO: 23744 - RNA, 22 nt, Artificial Sequence
  Synthetic
cagcuccauauuuucaauguga

SEQ ID NO: 23745 - RNA, 22 nt, Artificial Sequence
  Synthetic
agcuccauauuuucaaugugac

SEQ ID NO: 23746 - RNA, 22 nt, Artificial Sequence
  Synthetic
gcuccauauuuucaaugugacu

SEQ ID NO: 23747 - RNA, 22 nt, Artificial Sequence
  Synthetic
cuccauauuuucaaugugacug

SEQ ID NO: 23748 - RNA, 22 nt, Artificial Sequence
  Synthetic
uccauauuuucaaugugacugg

SEQ ID NO: 23749 - RNA, 22 nt, Artificial Sequence
  Synthetic
ccauauuuucaaugugacuggg

SEQ ID NO: 23750 - RNA, 22 nt, Artificial Sequence
  Synthetic
cauauuuucaaugugacugggu

SEQ ID NO: 23751 - RNA, 22 nt, Artificial Sequence
  Synthetic
auauuuucaaugugacuggguc

SEQ ID NO: 23752 - RNA, 22 nt, Artificial Sequence
  Synthetic
uauuuucaaugugacugggucu

SEQ ID NO: 23753 - RNA, 22 nt, Artificial Sequence
  Synthetic
auuuucaaugugacugggucuu

SEQ ID NO: 23754 - RNA, 22 nt, Artificial Sequence
  Synthetic
uuuucaaugugacugggucuua

SEQ ID NO: 23755 - RNA, 22 nt, Artificial Sequence
  Synthetic
uuucaaugugacugggucuuau

SEQ ID NO: 23756 - RNA, 22 nt, Artificial Sequence
  Synthetic
uucaaugugacugggucuuaua

SEQ ID NO: 23757 - RNA, 22 nt, Artificial Sequence
  Synthetic
ucaaugugacugggucuuauag

SEQ ID NO: 23758 - RNA, 22 nt, Artificial Sequence
  Synthetic
caaugugacugggucuuauagu

SEQ ID NO: 23759 - RNA, 22 nt, Artificial Sequence
  Synthetic
aaugugacugggucuuauagua

SEQ ID NO: 23760 - RNA, 22 nt, Artificial Sequence
  Synthetic
augugacugggucuuauaguac

SEQ ID NO: 23761 - RNA, 22 nt, Artificial Sequence
  Synthetic
ugugacugggucuuauaguaca

SEQ ID NO: 23762 - RNA, 22 nt, Artificial Sequence
  Synthetic
gugacugggucuuauaguacag

SEQ ID NO: 23763 - RNA, 22 nt, Artificial Sequence
  Synthetic
ugacugggucuuauaguacagg

SEQ ID NO: 23764 - RNA, 22 nt, Artificial Sequence
  Synthetic
gacugggucuuauaguacaggc

SEQ ID NO: 23765 - RNA, 22 nt, Artificial Sequence
  Synthetic
acugggucuuauaguacaggcu

SEQ ID NO: 23766 - RNA, 22 nt, Artificial Sequence
  Synthetic
cugggucuuauaguacaggcuu

SEQ ID NO: 23767 - RNA, 22 nt, Artificial Sequence
  Synthetic
ugggucuuauaguacaggcuug

SEQ ID NO: 23768 - RNA, 22 nt, Artificial Sequence
  Synthetic
gggucuuauaguacaggcuugu

SEQ ID NO: 23769 - RNA, 22 nt, Artificial Sequence
  Synthetic
ggucuuauaguacaggcuugua

SEQ ID NO: 23770 - RNA, 22 nt, Artificial Sequence
  Synthetic
gucuuauaguacaggcuuguau

SEQ ID NO: 23771 - RNA, 22 nt, Artificial Sequence
  Synthetic
ucuuauaguacaggcuuguauu

SEQ ID NO: 23772 - RNA, 22 nt, Artificial Sequence
  Synthetic
cuuauaguacaggcuuguauuc

SEQ ID NO: 23773 - RNA, 22 nt, Artificial Sequence
  Synthetic
uuauaguacaggcuuguauuca

SEQ ID NO: 23774 - RNA, 22 nt, Artificial Sequence
  Synthetic
uauaguacaggcuuguauucau

SEQ ID NO: 23775 - RNA, 22 nt, Artificial Sequence
  Synthetic
auaguacaggcuuguauucauc

SEQ ID NO: 23776 - RNA, 22 nt, Artificial Sequence
  Synthetic
uaguacaggcuuguauucauca

SEQ ID NO: 23777 - RNA, 22 nt, Artificial Sequence
  Synthetic
aguacaggcuuguauucaucac

SEQ ID NO: 23778 - RNA, 22 nt, Artificial Sequence
  Synthetic
guacaggcuuguauucaucaca

SEQ ID NO: 23779 - RNA, 22 nt, Artificial Sequence
  Synthetic
uacaggcuuguauucaucacag

SEQ ID NO: 23780 - RNA, 22 nt, Artificial Sequence
  Synthetic
acaggcuuguauucaucacaga

SEQ ID NO: 23781 - RNA, 22 nt, Artificial Sequence
  Synthetic
caggcuuguauucaucacagau

SEQ ID NO: 23782 - RNA, 22 nt, Artificial Sequence
  Synthetic
aggcuuguauucaucacagaug

SEQ ID NO: 23783 - RNA, 22 nt, Artificial Sequence
  Synthetic
ggcuuguauucaucacagaugu

SEQ ID NO: 23784 - RNA, 22 nt, Artificial Sequence
  Synthetic
gcuuguauucaucacagauguu

SEQ ID NO: 23785 - RNA, 22 nt, Artificial Sequence
  Synthetic
cuuguauucaucacagauguuu

SEQ ID NO: 23786 - RNA, 22 nt, Artificial Sequence
  Synthetic
uuguauucaucacagauguuug

SEQ ID NO: 23787 - RNA, 22 nt, Artificial Sequence
  Synthetic
uguauucaucacagauguuugg

SEQ ID NO: 23788 - RNA, 22 nt, Artificial Sequence
  Synthetic
guauucaucacagauguuugga

SEQ ID NO: 23789 - RNA, 22 nt, Artificial Sequence
  Synthetic
uauucaucacagauguuuggaa

SEQ ID NO: 23790 - RNA, 22 nt, Artificial Sequence
  Synthetic
auucaucacagauguuuggaac

SEQ ID NO: 23791 - RNA, 22 nt, Artificial Sequence
  Synthetic
uucaucacagauguuuggaacu

SEQ ID NO: 23792 - RNA, 22 nt, Artificial Sequence
  Synthetic
ucaucacagauguuuggaacuu

SEQ ID NO: 23793 - RNA, 22 nt, Artificial Sequence
  Synthetic
caucacagauguuuggaacuuc

SEQ ID NO: 23794 - RNA, 22 nt, Artificial Sequence
  Synthetic
aucacagauguuuggaacuuca

SEQ ID NO: 23795 - RNA, 22 nt, Artificial Sequence
  Synthetic
ucacagauguuuggaacuucag

SEQ ID NO: 23796 - RNA, 22 nt, Artificial Sequence
  Synthetic
cacagauguuuggaacuucaga

SEQ ID NO: 23797 - RNA, 22 nt, Artificial Sequence
  Synthetic
acagauguuuggaacuucagaa

SEQ ID NO: 23798 - RNA, 22 nt, Artificial Sequence
  Synthetic
cagauguuuggaacuucagaau

SEQ ID NO: 23799 - RNA, 22 nt, Artificial Sequence
  Synthetic
agauguuuggaacuucagaaua

SEQ ID NO: 23800 - RNA, 22 nt, Artificial Sequence
  Synthetic
gauguuuggaacuucagaauaa

SEQ ID NO: 23801 - RNA, 22 nt, Artificial Sequence
  Synthetic
auguuuggaacuucagaauaau

SEQ ID NO: 23802 - RNA, 22 nt, Artificial Sequence
  Synthetic
uguuuggaacuucagaauaaua

SEQ ID NO: 23803 - RNA, 22 nt, Artificial Sequence
  Synthetic
guuuggaacuucagaauaauac

SEQ ID NO: 23804 - RNA, 22 nt, Artificial Sequence
  Synthetic
uuuggaacuucagaauaauaca

SEQ ID NO: 23805 - RNA, 22 nt, Artificial Sequence
  Synthetic
uuggaacuucagaauaauacau

SEQ ID NO: 23806 - RNA, 22 nt, Artificial Sequence
  Synthetic
uggaacuucagaauaauacaug

SEQ ID NO: 23807 - RNA, 22 nt, Artificial Sequence
  Synthetic
ggaacuucagaauaauacaugg

SEQ ID NO: 23808 - RNA, 22 nt, Artificial Sequence
  Synthetic
gaacuucagaauaauacauggu

SEQ ID NO: 23809 - RNA, 22 nt, Artificial Sequence
  Synthetic
aacuucagaauaauacauggug

SEQ ID NO: 23810 - RNA, 22 nt, Artificial Sequence
  Synthetic
acuucagaauaauacauggugc

SEQ ID NO: 23811 - RNA, 22 nt, Artificial Sequence
  Synthetic
cuucagaauaauacauggugca

SEQ ID NO: 23812 - RNA, 22 nt, Artificial Sequence
  Synthetic
uucagaauaauacauggugcaa

SEQ ID NO: 23813 - RNA, 22 nt, Artificial Sequence
  Synthetic
ucagaauaauacauggugcaaa

SEQ ID NO: 23814 - RNA, 22 nt, Artificial Sequence
  Synthetic
cagaauaauacauggugcaaau

SEQ ID NO: 23815 - RNA, 22 nt, Artificial Sequence
  Synthetic
agaauaauacauggugcaaauu

SEQ ID NO: 23816 - RNA, 22 nt, Artificial Sequence
  Synthetic
gaauaauacauggugcaaauuu

SEQ ID NO: 23817 - RNA, 22 nt, Artificial Sequence
  Synthetic
aauaauacauggugcaaauuug

SEQ ID NO: 23818 - RNA, 22 nt, Artificial Sequence
  Synthetic
auaauacauggugcaaauuugc

SEQ ID NO: 23819 - RNA, 22 nt, Artificial Sequence
  Synthetic
uaauacauggugcaaauuugca

SEQ ID NO: 23820 - RNA, 22 nt, Artificial Sequence
  Synthetic
aauacauggugcaaauuugcau

SEQ ID NO: 23821 - RNA, 22 nt, Artificial Sequence
  Synthetic
auacauggugcaaauuugcauu

SEQ ID NO: 23822 - RNA, 22 nt, Artificial Sequence
  Synthetic
uacauggugcaaauuugcauuu

SEQ ID NO: 23823 - RNA, 22 nt, Artificial Sequence
  Synthetic
acauggugcaaauuugcauuua

SEQ ID NO: 23824 - RNA, 22 nt, Artificial Sequence
  Synthetic
cauggugcaaauuugcauuuac

SEQ ID NO: 23825 - RNA, 22 nt, Artificial Sequence
  Synthetic
auggugcaaauuugcauuuacc

SEQ ID NO: 23826 - RNA, 22 nt, Artificial Sequence
  Synthetic
uggugcaaauuugcauuuaccu

SEQ ID NO: 23827 - RNA, 22 nt, Artificial Sequence
  Synthetic
ggugcaaauuugcauuuaccuu

SEQ ID NO: 23828 - RNA, 22 nt, Artificial Sequence
  Synthetic
gugcaaauuugcauuuaccuuc

SEQ ID NO: 23829 - RNA, 22 nt, Artificial Sequence
  Synthetic
ugcaaauuugcauuuaccuucc

SEQ ID NO: 23830 - RNA, 22 nt, Artificial Sequence
  Synthetic
gcaaauuugcauuuaccuucca

SEQ ID NO: 23831 - RNA, 22 nt, Artificial Sequence
  Synthetic
caaauuugcauuuaccuuccau

SEQ ID NO: 23832 - RNA, 22 nt, Artificial Sequence
  Synthetic
aaauuugcauuuaccuuccauu

SEQ ID NO: 23833 - RNA, 22 nt, Artificial Sequence
  Synthetic
aauuugcauuuaccuuccauug

SEQ ID NO: 23834 - RNA, 22 nt, Artificial Sequence
  Synthetic
auuugcauuuaccuuccauugu

SEQ ID NO: 23835 - RNA, 22 nt, Artificial Sequence
  Synthetic
uuugcauuuaccuuccauugua

SEQ ID NO: 23836 - RNA, 22 nt, Artificial Sequence
  Synthetic
uugcauuuaccuuccauuguaa

SEQ ID NO: 23837 - RNA, 22 nt, Artificial Sequence
  Synthetic
ugcauuuaccuuccauuguaaa

SEQ ID NO: 23838 - RNA, 22 nt, Artificial Sequence
  Synthetic
gcauuuaccuuccauuguaaau

SEQ ID NO: 23839 - RNA, 22 nt, Artificial Sequence
  Synthetic
cauuuaccuuccauuguaaauc

SEQ ID NO: 23840 - RNA, 22 nt, Artificial Sequence
  Synthetic
auuuaccuuccauuguaaauca

SEQ ID NO: 23841 - RNA, 22 nt, Artificial Sequence
  Synthetic
uuuaccuuccauuguaaaucag

SEQ ID NO: 23842 - RNA, 22 nt, Artificial Sequence
  Synthetic
uuaccuuccauuguaaaucagu

SEQ ID NO: 23843 - RNA, 22 nt, Artificial Sequence
  Synthetic
uaccuuccauuguaaaucaguu

SEQ ID NO: 23844 - RNA, 22 nt, Artificial Sequence
  Synthetic
accuuccauuguaaaucaguuc

SEQ ID NO: 23845 - RNA, 22 nt, Artificial Sequence
  Synthetic
ccuuccauuguaaaucaguucc

SEQ ID NO: 23846 - RNA, 22 nt, Artificial Sequence
  Synthetic
cuuccauuguaaaucaguucca

SEQ ID NO: 23847 - RNA, 22 nt, Artificial Sequence
  Synthetic
uuccauuguaaaucaguuccaa

SEQ ID NO: 23848 - RNA, 22 nt, Artificial Sequence
  Synthetic
uccauuguaaaucaguuccaau

SEQ ID NO: 23849 - RNA, 22 nt, Artificial Sequence
  Synthetic
ccauuguaaaucaguuccaaua

SEQ ID NO: 23850 - RNA, 22 nt, Artificial Sequence
  Synthetic
cauuguaaaucaguuccaauaa

SEQ ID NO: 23851 - RNA, 22 nt, Artificial Sequence
  Synthetic
auuguaaaucaguuccaauaaa

SEQ ID NO: 23852 - RNA, 22 nt, Artificial Sequence
  Synthetic
uuguaaaucaguuccaauaaaa

SEQ ID NO: 23853 - RNA, 22 nt, Artificial Sequence
  Synthetic
uguaaaucaguuccaauaaaag

SEQ ID NO: 23854 - RNA, 22 nt, Artificial Sequence
  Synthetic
guaaaucaguuccaauaaaaga

SEQ ID NO: 23855 - RNA, 22 nt, Artificial Sequence
  Synthetic
uaaaucaguuccaauaaaagau

SEQ ID NO: 23856 - RNA, 22 nt, Artificial Sequence
  Synthetic
aaaucaguuccaauaaaagaua

SEQ ID NO: 23857 - RNA, 22 nt, Artificial Sequence
  Synthetic
aaucaguuccaauaaaagauaa

SEQ ID NO: 23858 - RNA, 22 nt, Artificial Sequence
  Synthetic
aucaguuccaauaaaagauaau

SEQ ID NO: 23859 - RNA, 22 nt, Artificial Sequence
  Synthetic
ucaguuccaauaaaagauaaua

SEQ ID NO: 23860 - RNA, 22 nt, Artificial Sequence
  Synthetic
caguuccaauaaaagauaauau

SEQ ID NO: 23861 - RNA, 22 nt, Artificial Sequence
  Synthetic
aguuccaauaaaagauaauaua

SEQ ID NO: 23862 - RNA, 22 nt, Artificial Sequence
  Synthetic
guuccaauaaaagauaauauaa

SEQ ID NO: 23863 - RNA, 22 nt, Artificial Sequence
  Synthetic
uuccaauaaaagauaauauaaa

SEQ ID NO: 23864 - RNA, 22 nt, Artificial Sequence
  Synthetic
uccaauaaaagauaauauaaaa

SEQ ID NO: 23865 - RNA, 22 nt, Artificial Sequence
  Synthetic
ccaauaaaagauaauauaaaag

SEQ ID NO: 23866 - RNA, 22 nt, Artificial Sequence
  Synthetic
caauaaaagauaauauaaaagg

SEQ ID NO: 23867 - RNA, 22 nt, Artificial Sequence
  Synthetic
aauaaaagauaauauaaaaggc

SEQ ID NO: 23868 - RNA, 22 nt, Artificial Sequence
  Synthetic
auaaaagauaauauaaaaggca

SEQ ID NO: 23869 - RNA, 22 nt, Artificial Sequence
  Synthetic
uaaaagauaauauaaaaggcag

SEQ ID NO: 23870 - RNA, 22 nt, Artificial Sequence
  Synthetic
aaaagauaauauaaaaggcaga

SEQ ID NO: 23871 - RNA, 22 nt, Artificial Sequence
  Synthetic
aaagauaauauaaaaggcagag

SEQ ID NO: 23872 - RNA, 22 nt, Artificial Sequence
  Synthetic
aagauaauauaaaaggcagagc

SEQ ID NO: 23873 - RNA, 22 nt, Artificial Sequence
  Synthetic
agauaauauaaaaggcagagcu

SEQ ID NO: 23874 - RNA, 22 nt, Artificial Sequence
  Synthetic
gauaauauaaaaggcagagcuu

SEQ ID NO: 23875 - RNA, 22 nt, Artificial Sequence
  Synthetic
auaauauaaaaggcagagcuuc

SEQ ID NO: 23876 - RNA, 22 nt, Artificial Sequence
  Synthetic
uaauauaaaaggcagagcuucu

SEQ ID NO: 23877 - RNA, 22 nt, Artificial Sequence
  Synthetic
aauauaaaaggcagagcuucug

SEQ ID NO: 23878 - RNA, 22 nt, Artificial Sequence
  Synthetic
auauaaaaggcagagcuucugc

SEQ ID NO: 23879 - RNA, 22 nt, Artificial Sequence
  Synthetic
uauaaaaggcagagcuucugcc

SEQ ID NO: 23880 - RNA, 22 nt, Artificial Sequence
  Synthetic
auaaaaggcagagcuucugccu

SEQ ID NO: 23881 - RNA, 22 nt, Artificial Sequence
  Synthetic
uaaaaggcagagcuucugccuu

SEQ ID NO: 23882 - RNA, 22 nt, Artificial Sequence
  Synthetic
aaaaggcagagcuucugccuug

SEQ ID NO: 23883 - RNA, 22 nt, Artificial Sequence
  Synthetic
aaaggcagagcuucugccuugg

SEQ ID NO: 23884 - RNA, 22 nt, Artificial Sequence
  Synthetic
aaggcagagcuucugccuugga

SEQ ID NO: 23885 - RNA, 22 nt, Artificial Sequence
  Synthetic
aggcagagcuucugccuuggau

SEQ ID NO: 23886 - RNA, 22 nt, Artificial Sequence
  Synthetic
ggcagagcuucugccuuggauu

SEQ ID NO: 23887 - RNA, 22 nt, Artificial Sequence
  Synthetic
gcagagcuucugccuuggauuu

SEQ ID NO: 23888 - RNA, 22 nt, Artificial Sequence
  Synthetic
cagagcuucugccuuggauuuu

SEQ ID NO: 23889 - RNA, 22 nt, Artificial Sequence
  Synthetic
agagcuucugccuuggauuuug

SEQ ID NO: 23890 - RNA, 22 nt, Artificial Sequence
  Synthetic
gagcuucugccuuggauuuugu

SEQ ID NO: 23891 - RNA, 22 nt, Artificial Sequence
  Synthetic
agcuucugccuuggauuuugug

SEQ ID NO: 23892 - RNA, 22 nt, Artificial Sequence
  Synthetic
gcuucugccuuggauuuugugu

SEQ ID NO: 23893 - RNA, 22 nt, Artificial Sequence
  Synthetic
cuucugccuuggauuuuguguu

SEQ ID NO: 23894 - RNA, 22 nt, Artificial Sequence
  Synthetic
uucugccuuggauuuuguguuc

SEQ ID NO: 23895 - RNA, 22 nt, Artificial Sequence
  Synthetic
ucugccuuggauuuuguguucu

SEQ ID NO: 23896 - RNA, 22 nt, Artificial Sequence
  Synthetic
cugccuuggauuuuguguucuu

SEQ ID NO: 23897 - RNA, 22 nt, Artificial Sequence
  Synthetic
ugccuuggauuuuguguucuuu

SEQ ID NO: 23898 - RNA, 22 nt, Artificial Sequence
  Synthetic
gccuuggauuuuguguucuuua

SEQ ID NO: 23899 - RNA, 22 nt, Artificial Sequence
  Synthetic
ccuuggauuuuguguucuuuaa

SEQ ID NO: 23900 - RNA, 22 nt, Artificial Sequence
  Synthetic
cuuggauuuuguguucuuuaaa

SEQ ID NO: 23901 - RNA, 22 nt, Artificial Sequence
  Synthetic
uuggauuuuguguucuuuaaau

SEQ ID NO: 23902 - RNA, 22 nt, Artificial Sequence
  Synthetic
uggauuuuguguucuuuaaauu

SEQ ID NO: 23903 - RNA, 22 nt, Artificial Sequence
  Synthetic
ggauuuuguguucuuuaaauuu

SEQ ID NO: 23904 - RNA, 22 nt, Artificial Sequence
  Synthetic
gauuuuguguucuuuaaauuuu

SEQ ID NO: 23905 - RNA, 22 nt, Artificial Sequence
  Synthetic
auuuuguguucuuuaaauuuuu

SEQ ID NO: 23906 - RNA, 22 nt, Artificial Sequence
  Synthetic
uuuuguguucuuuaaauuuuuu

SEQ ID NO: 23907 - RNA, 22 nt, Artificial Sequence
  Synthetic
uuuguguucuuuaaauuuuuug

SEQ ID NO: 23908 - RNA, 22 nt, Artificial Sequence
  Synthetic
uuguguucuuuaaauuuuuugg

SEQ ID NO: 23909 - RNA, 22 nt, Artificial Sequence
  Synthetic
uguguucuuuaaauuuuuuggu

SEQ ID NO: 23910 - RNA, 22 nt, Artificial Sequence
  Synthetic
guguucuuuaaauuuuuuggug

SEQ ID NO: 23911 - RNA, 22 nt, Artificial Sequence
  Synthetic
uguucuuuaaauuuuuuggugc

SEQ ID NO: 23912 - RNA, 22 nt, Artificial Sequence
  Synthetic
guucuuuaaauuuuuuggugca

SEQ ID NO: 23913 - RNA, 22 nt, Artificial Sequence
  Synthetic
uucuuuaaauuuuuuggugcau

SEQ ID NO: 23914 - RNA, 22 nt, Artificial Sequence
  Synthetic
ucuuuaaauuuuuuggugcauu

SEQ ID NO: 23915 - RNA, 22 nt, Artificial Sequence
  Synthetic
cuuuaaauuuuuuggugcauuc

SEQ ID NO: 23916 - RNA, 22 nt, Artificial Sequence
  Synthetic
uuuaaauuuuuuggugcauucu

SEQ ID NO: 23917 - RNA, 22 nt, Artificial Sequence
  Synthetic
uuaaauuuuuuggugcauucug

SEQ ID NO: 23918 - RNA, 22 nt, Artificial Sequence
  Synthetic
uaaauuuuuuggugcauucugu

SEQ ID NO: 23919 - RNA, 22 nt, Artificial Sequence
  Synthetic
aaauuuuuuggugcauucuguc

SEQ ID NO: 23920 - RNA, 22 nt, Artificial Sequence
  Synthetic
aauuuuuuggugcauucugucu

SEQ ID NO: 23921 - RNA, 22 nt, Artificial Sequence
  Synthetic
auuuuuuggugcauucugucuu

SEQ ID NO: 23922 - RNA, 22 nt, Artificial Sequence
  Synthetic
uuuuuuggugcauucugucuuu

SEQ ID NO: 23923 - RNA, 22 nt, Artificial Sequence
  Synthetic
uuuuuggugcauucugucuuua

SEQ ID NO: 23924 - RNA, 22 nt, Artificial Sequence
  Synthetic
uuuuggugcauucugucuuuaa

SEQ ID NO: 23925 - RNA, 22 nt, Artificial Sequence
  Synthetic
uuuggugcauucugucuuuaaa

SEQ ID NO: 23926 - RNA, 22 nt, Artificial Sequence
  Synthetic
uuggugcauucugucuuuaaaa

SEQ ID NO: 23927 - RNA, 22 nt, Artificial Sequence
  Synthetic
uggugcauucugucuuuaaaau

SEQ ID NO: 23928 - RNA, 22 nt, Artificial Sequence
  Synthetic
ggugcauucugucuuuaaaaua

SEQ ID NO: 23929 - RNA, 22 nt, Artificial Sequence
  Synthetic
gugcauucugucuuuaaaauau

SEQ ID NO: 23930 - RNA, 22 nt, Artificial Sequence
  Synthetic
ugcauucugucuuuaaaauaua

SEQ ID NO: 23931 - RNA, 22 nt, Artificial Sequence
  Synthetic
gcauucugucuuuaaaauauaa

SEQ ID NO: 23932 - RNA, 22 nt, Artificial Sequence
  Synthetic
cauucugucuuuaaaauauaag

SEQ ID NO: 23933 - RNA, 22 nt, Artificial Sequence
  Synthetic
auucugucuuuaaaauauaaga

SEQ ID NO: 23934 - RNA, 22 nt, Artificial Sequence
  Synthetic
uucugucuuuaaaauauaagaa

SEQ ID NO: 23935 - RNA, 22 nt, Artificial Sequence
  Synthetic
ucugucuuuaaaauauaagaag

SEQ ID NO: 23936 - RNA, 22 nt, Artificial Sequence
  Synthetic
cugucuuuaaaauauaagaagu

SEQ ID NO: 23937 - RNA, 22 nt, Artificial Sequence
  Synthetic
ugucuuuaaaauauaagaagua

SEQ ID NO: 23938 - RNA, 22 nt, Artificial Sequence
  Synthetic
gucuuuaaaauauaagaaguac

SEQ ID NO: 23939 - RNA, 22 nt, Artificial Sequence
  Synthetic
ucuuuaaaauauaagaaguacc

SEQ ID NO: 23940 - RNA, 22 nt, Artificial Sequence
  Synthetic
cuuuaaaauauaagaaguaccu

SEQ ID NO: 23941 - RNA, 22 nt, Artificial Sequence
  Synthetic
uuuaaaauauaagaaguaccuc

SEQ ID NO: 23942 - RNA, 22 nt, Artificial Sequence
  Synthetic
uuaaaauauaagaaguaccuca

SEQ ID NO: 23943 - RNA, 22 nt, Artificial Sequence
  Synthetic
uaaaauauaagaaguaccucac

SEQ ID NO: 23944 - RNA, 22 nt, Artificial Sequence
  Synthetic
aaaauauaagaaguaccucacu

SEQ ID NO: 23945 - RNA, 22 nt, Artificial Sequence
  Synthetic
aaauauaagaaguaccucacua

SEQ ID NO: 23946 - RNA, 22 nt, Artificial Sequence
  Synthetic
aauauaagaaguaccucacuau

SEQ ID NO: 23947 - RNA, 22 nt, Artificial Sequence
  Synthetic
auauaagaaguaccucacuaua

SEQ ID NO: 23948 - RNA, 22 nt, Artificial Sequence
  Synthetic
uauaagaaguaccucacuauau

SEQ ID NO: 23949 - RNA, 22 nt, Artificial Sequence
  Synthetic
auaagaaguaccucacuauauu

SEQ ID NO: 23950 - RNA, 22 nt, Artificial Sequence
  Synthetic
uaagaaguaccucacuauauuc

SEQ ID NO: 23951 - RNA, 22 nt, Artificial Sequence
  Synthetic
aagaaguaccucacuauauuca

SEQ ID NO: 23952 - RNA, 22 nt, Artificial Sequence
  Synthetic
agaaguaccucacuauauucag

SEQ ID NO: 23953 - RNA, 22 nt, Artificial Sequence
  Synthetic
gaaguaccucacuauauucagu

SEQ ID NO: 23954 - RNA, 22 nt, Artificial Sequence
  Synthetic
aaguaccucacuauauucagug

SEQ ID NO: 23955 - RNA, 22 nt, Artificial Sequence
  Synthetic
aguaccucacuauauucagugu

SEQ ID NO: 23956 - RNA, 22 nt, Artificial Sequence
  Synthetic
guaccucacuauauucagugua

SEQ ID NO: 23957 - RNA, 22 nt, Artificial Sequence
  Synthetic
uaccucacuauauucaguguaa

SEQ ID NO: 23958 - RNA, 22 nt, Artificial Sequence
  Synthetic
accucacuauauucaguguaac

SEQ ID NO: 23959 - RNA, 22 nt, Artificial Sequence
  Synthetic
ccucacuauauucaguguaaca

SEQ ID NO: 23960 - RNA, 22 nt, Artificial Sequence
  Synthetic
cucacuauauucaguguaacac

SEQ ID NO: 23961 - RNA, 22 nt, Artificial Sequence
  Synthetic
ucacuauauucaguguaacacu

SEQ ID NO: 23962 - RNA, 22 nt, Artificial Sequence
  Synthetic
cacuauauucaguguaacacuc

SEQ ID NO: 23963 - RNA, 22 nt, Artificial Sequence
  Synthetic
acuauauucaguguaacacuca

SEQ ID NO: 23964 - RNA, 22 nt, Artificial Sequence
  Synthetic
cuauauucaguguaacacucaa

SEQ ID NO: 23965 - RNA, 22 nt, Artificial Sequence
  Synthetic
uauauucaguguaacacucaac

SEQ ID NO: 23966 - RNA, 22 nt, Artificial Sequence
  Synthetic
auauucaguguaacacucaacc

SEQ ID NO: 23967 - RNA, 22 nt, Artificial Sequence
  Synthetic
uauucaguguaacacucaaccg

SEQ ID NO: 23968 - RNA, 22 nt, Artificial Sequence
  Synthetic
auucaguguaacacucaaccgu

SEQ ID NO: 23969 - RNA, 22 nt, Artificial Sequence
  Synthetic
uucaguguaacacucaaccguc

SEQ ID NO: 23970 - RNA, 22 nt, Artificial Sequence
  Synthetic
ucaguguaacacucaaccgucc

SEQ ID NO: 23971 - RNA, 22 nt, Artificial Sequence
  Synthetic
caguguaacacucaaccguccc

SEQ ID NO: 23972 - RNA, 22 nt, Artificial Sequence
  Synthetic
aguguaacacucaaccgucccu

SEQ ID NO: 23973 - RNA, 22 nt, Artificial Sequence
  Synthetic
guguaacacucaaccgucccug

SEQ ID NO: 23974 - RNA, 22 nt, Artificial Sequence
  Synthetic
uguaacacucaaccgucccugu

SEQ ID NO: 23975 - RNA, 22 nt, Artificial Sequence
  Synthetic
guaacacucaaccgucccuguc

SEQ ID NO: 23976 - RNA, 22 nt, Artificial Sequence
  Synthetic
uaacacucaaccgucccuguca

SEQ ID NO: 23977 - RNA, 22 nt, Artificial Sequence
  Synthetic
aacacucaaccgucccugucau

SEQ ID NO: 23978 - RNA, 22 nt, Artificial Sequence
  Synthetic
acacucaaccgucccugucaug

SEQ ID NO: 23979 - RNA, 22 nt, Artificial Sequence
  Synthetic
cacucaaccgucccugucauga

SEQ ID NO: 23980 - RNA, 22 nt, Artificial Sequence
  Synthetic
acucaaccgucccugucaugag

SEQ ID NO: 23981 - RNA, 22 nt, Artificial Sequence
  Synthetic
cucaaccgucccugucaugagc

SEQ ID NO: 23982 - RNA, 22 nt, Artificial Sequence
  Synthetic
ucaaccgucccugucaugagcu

SEQ ID NO: 23983 - RNA, 22 nt, Artificial Sequence
  Synthetic
caaccgucccugucaugagcug

SEQ ID NO: 23984 - RNA, 22 nt, Artificial Sequence
  Synthetic
aaccgucccugucaugagcugg

SEQ ID NO: 23985 - RNA, 22 nt, Artificial Sequence
  Synthetic
accgucccugucaugagcuggg

SEQ ID NO: 23986 - RNA, 22 nt, Artificial Sequence
  Synthetic
ccgucccugucaugagcugggu

SEQ ID NO: 23987 - RNA, 22 nt, Artificial Sequence
  Synthetic
cgucccugucaugagcugggug

SEQ ID NO: 23988 - RNA, 22 nt, Artificial Sequence
  Synthetic
gucccugucaugagcuggguga

SEQ ID NO: 23989 - RNA, 22 nt, Artificial Sequence
  Synthetic
ucccugucaugagcugggugac

SEQ ID NO: 23990 - RNA, 22 nt, Artificial Sequence
  Synthetic
cccugucaugagcugggugacc

SEQ ID NO: 23991 - RNA, 22 nt, Artificial Sequence
  Synthetic
ccugucaugagcugggugaccu

SEQ ID NO: 23992 - RNA, 22 nt, Artificial Sequence
  Synthetic
cugucaugagcugggugaccuu

SEQ ID NO: 23993 - RNA, 22 nt, Artificial Sequence
  Synthetic
ugucaugagcugggugaccuug

SEQ ID NO: 23994 - RNA, 22 nt, Artificial Sequence
  Synthetic
gucaugagcugggugaccuugg

SEQ ID NO: 23995 - RNA, 22 nt, Artificial Sequence
  Synthetic
ucaugagcugggugaccuuggu

SEQ ID NO: 23996 - RNA, 22 nt, Artificial Sequence
  Synthetic
caugagcugggugaccuugguc

SEQ ID NO: 23997 - RNA, 22 nt, Artificial Sequence
  Synthetic
augagcugggugaccuugguca

SEQ ID NO: 23998 - RNA, 22 nt, Artificial Sequence
  Synthetic
ugagcugggugaccuuggucau

SEQ ID NO: 23999 - RNA, 22 nt, Artificial Sequence
  Synthetic
gagcugggugaccuuggucauu

SEQ ID NO: 24000 - RNA, 22 nt, Artificial Sequence
  Synthetic
agcugggugaccuuggucauuc

SEQ ID NO: 24001 - RNA, 22 nt, Artificial Sequence
  Synthetic
gcugggugaccuuggucauuca

SEQ ID NO: 24002 - RNA, 22 nt, Artificial Sequence
  Synthetic
cugggugaccuuggucauucau

SEQ ID NO: 24003 - RNA, 22 nt, Artificial Sequence
  Synthetic
ugggugaccuuggucauucauu

SEQ ID NO: 24004 - RNA, 22 nt, Artificial Sequence
  Synthetic
gggugaccuuggucauucauuu

SEQ ID NO: 24005 - RNA, 22 nt, Artificial Sequence
  Synthetic
ggugaccuuggucauucauuua

SEQ ID NO: 24006 - RNA, 22 nt, Artificial Sequence
  Synthetic
gugaccuuggucauucauuuau

SEQ ID NO: 24007 - RNA, 22 nt, Artificial Sequence
  Synthetic
ugaccuuggucauucauuuauc

SEQ ID NO: 24008 - RNA, 22 nt, Artificial Sequence
  Synthetic
gaccuuggucauucauuuaucc

SEQ ID NO: 24009 - RNA, 22 nt, Artificial Sequence
  Synthetic
accuuggucauucauuuauccu

SEQ ID NO: 24010 - RNA, 22 nt, Artificial Sequence
  Synthetic
ccuuggucauucauuuauccuc

SEQ ID NO: 24011 - RNA, 22 nt, Artificial Sequence
  Synthetic
cuuggucauucauuuauccucu

SEQ ID NO: 24012 - RNA, 22 nt, Artificial Sequence
  Synthetic
uuggucauucauuuauccucug

SEQ ID NO: 24013 - RNA, 22 nt, Artificial Sequence
  Synthetic
uggucauucauuuauccucugg

SEQ ID NO: 24014 - RNA, 22 nt, Artificial Sequence
  Synthetic
ggucauucauuuauccucuggu

SEQ ID NO: 24015 - RNA, 22 nt, Artificial Sequence
  Synthetic
gucauucauuuauccucuggug

SEQ ID NO: 24016 - RNA, 22 nt, Artificial Sequence
  Synthetic
ucauucauuuauccucuggugg

SEQ ID NO: 24017 - RNA, 22 nt, Artificial Sequence
  Synthetic
cauucauuuauccucugguggg

SEQ ID NO: 24018 - RNA, 22 nt, Artificial Sequence
  Synthetic
auucauuuauccucuggugggc

SEQ ID NO: 24019 - RNA, 22 nt, Artificial Sequence
  Synthetic
uucauuuauccucuggugggcu

SEQ ID NO: 24020 - RNA, 22 nt, Artificial Sequence
  Synthetic
ucauuuauccucuggugggcuc

SEQ ID NO: 24021 - RNA, 22 nt, Artificial Sequence
  Synthetic
cauuuauccucuggugggcuca

SEQ ID NO: 24022 - RNA, 22 nt, Artificial Sequence
  Synthetic
auuuauccucuggugggcucaa

SEQ ID NO: 24023 - RNA, 22 nt, Artificial Sequence
  Synthetic
uuuauccucuggugggcucaaa

SEQ ID NO: 24024 - RNA, 22 nt, Artificial Sequence
  Synthetic
uuauccucuggugggcucaaau

SEQ ID NO: 24025 - RNA, 22 nt, Artificial Sequence
  Synthetic
uauccucuggugggcucaaauu

SEQ ID NO: 24026 - RNA, 22 nt, Artificial Sequence
  Synthetic
auccucuggugggcucaaauua

SEQ ID NO: 24027 - RNA, 22 nt, Artificial Sequence
  Synthetic
uccucuggugggcucaaauuau

SEQ ID NO: 24028 - RNA, 22 nt, Artificial Sequence
  Synthetic
ccucuggugggcucaaauuauu

SEQ ID NO: 24029 - RNA, 22 nt, Artificial Sequence
  Synthetic
cucuggugggcucaaauuauuc

SEQ ID NO: 24030 - RNA, 22 nt, Artificial Sequence
  Synthetic
ucuggugggcucaaauuauuca

SEQ ID NO: 24031 - RNA, 22 nt, Artificial Sequence
  Synthetic
cuggugggcucaaauuauucau

SEQ ID NO: 24032 - RNA, 22 nt, Artificial Sequence
  Synthetic
uggugggcucaaauuauucauc

SEQ ID NO: 24033 - RNA, 22 nt, Artificial Sequence
  Synthetic
ggugggcucaaauuauucauca

SEQ ID NO: 24034 - RNA, 22 nt, Artificial Sequence
  Synthetic
gugggcucaaauuauucaucag

SEQ ID NO: 24035 - RNA, 22 nt, Artificial Sequence
  Synthetic
ugggcucaaauuauucaucagu

SEQ ID NO: 24036 - RNA, 22 nt, Artificial Sequence
  Synthetic
gggcucaaauuauucaucagua

SEQ ID NO: 24037 - RNA, 22 nt, Artificial Sequence
  Synthetic
ggcucaaauuauucaucaguaa

SEQ ID NO: 24038 - RNA, 22 nt, Artificial Sequence
  Synthetic
gcucaaauuauucaucaguaaa

SEQ ID NO: 24039 - RNA, 22 nt, Artificial Sequence
  Synthetic
cucaaauuauucaucaguaaaa

SEQ ID NO: 24040 - RNA, 22 nt, Artificial Sequence
  Synthetic
ucaaauuauucaucaguaaaau

SEQ ID NO: 24041 - RNA, 22 nt, Artificial Sequence
  Synthetic
caaauuauucaucaguaaaaua

SEQ ID NO: 24042 - RNA, 22 nt, Artificial Sequence
  Synthetic
aaauuauucaucaguaaaauaa

SEQ ID NO: 24043 - RNA, 22 nt, Artificial Sequence
  Synthetic
aauuauucaucaguaaaauaac

SEQ ID NO: 24044 - RNA, 22 nt, Artificial Sequence
  Synthetic
auuauucaucaguaaaauaacg

SEQ ID NO: 24045 - RNA, 22 nt, Artificial Sequence
  Synthetic
uuauucaucaguaaaauaacga

SEQ ID NO: 24046 - RNA, 22 nt, Artificial Sequence
  Synthetic
uauucaucaguaaaauaacgag

SEQ ID NO: 24047 - RNA, 22 nt, Artificial Sequence
  Synthetic
auucaucaguaaaauaacgagc

SEQ ID NO: 24048 - RNA, 22 nt, Artificial Sequence
  Synthetic
uucaucaguaaaauaacgagcc

SEQ ID NO: 24049 - RNA, 22 nt, Artificial Sequence
  Synthetic
ucaucaguaaaauaacgagccu

SEQ ID NO: 24050 - RNA, 22 nt, Artificial Sequence
  Synthetic
caucaguaaaauaacgagccug

SEQ ID NO: 24051 - RNA, 22 nt, Artificial Sequence
  Synthetic
aucaguaaaauaacgagccugu

SEQ ID NO: 24052 - RNA, 22 nt, Artificial Sequence
  Synthetic
ucaguaaaauaacgagccugua

SEQ ID NO: 24053 - RNA, 22 nt, Artificial Sequence
  Synthetic
caguaaaauaacgagccuguac

SEQ ID NO: 24054 - RNA, 22 nt, Artificial Sequence
  Synthetic
aguaaaauaacgagccuguaca

SEQ ID NO: 24055 - RNA, 22 nt, Artificial Sequence
  Synthetic
guaaaauaacgagccuguacaa

SEQ ID NO: 24056 - RNA, 22 nt, Artificial Sequence
  Synthetic
uaaaauaacgagccuguacaaa

SEQ ID NO: 24057 - RNA, 22 nt, Artificial Sequence
  Synthetic
aaaauaacgagccuguacaaau

SEQ ID NO: 24058 - RNA, 22 nt, Artificial Sequence
  Synthetic
aaauaacgagccuguacaaaua

SEQ ID NO: 24059 - RNA, 22 nt, Artificial Sequence
  Synthetic
aauaacgagccuguacaaauaa

SEQ ID NO: 24060 - RNA, 22 nt, Artificial Sequence
  Synthetic
auaacgagccuguacaaauaaa

SEQ ID NO: 24061 - RNA, 22 nt, Artificial Sequence
  Synthetic
uaacgagccuguacaaauaaaa

SEQ ID NO: 24062 - RNA, 22 nt, Artificial Sequence
  Synthetic
aacgagccuguacaaauaaaau

SEQ ID NO: 24063 - RNA, 22 nt, Artificial Sequence
  Synthetic
acgagccuguacaaauaaaaug

SEQ ID NO: 24064 - RNA, 22 nt, Artificial Sequence
  Synthetic
cgagccuguacaaauaaaaugu

SEQ ID NO: 24065 - RNA, 22 nt, Artificial Sequence
  Synthetic
gagccuguacaaauaaaaugua

SEQ ID NO: 24066 - RNA, 22 nt, Artificial Sequence
  Synthetic
agccuguacaaauaaaauguaa

SEQ ID NO: 24067 - RNA, 22 nt, Artificial Sequence
  Synthetic
gccuguacaaauaaaauguaau

SEQ ID NO: 24068 - RNA, 22 nt, Artificial Sequence
  Synthetic
ccuguacaaauaaaauguaauu

SEQ ID NO: 24069 - RNA, 22 nt, Artificial Sequence
  Synthetic
cuguacaaauaaaauguaauuu

SEQ ID NO: 24070 - RNA, 22 nt, Artificial Sequence
  Synthetic
uguacaaauaaaauguaauuuu

SEQ ID NO: 24071 - RNA, 22 nt, Artificial Sequence
  Synthetic
guacaaauaaaauguaauuuuu

SEQ ID NO: 24072 - RNA, 22 nt, Artificial Sequence
  Synthetic
uacaaauaaaauguaauuuuuu

SEQ ID NO: 24073 - RNA, 22 nt, Artificial Sequence
  Synthetic
acaaauaaaauguaauuuuuuu

SEQ ID NO: 24074 - RNA, 22 nt, Artificial Sequence
  Synthetic
caaauaaaauguaauuuuuuuc

SEQ ID NO: 24075 - RNA, 22 nt, Artificial Sequence
  Synthetic
aaauaaaauguaauuuuuuuca

SEQ ID NO: 24076 - RNA, 22 nt, Artificial Sequence
  Synthetic
aauaaaauguaauuuuuuucac

SEQ ID NO: 24077 - RNA, 22 nt, Artificial Sequence
  Synthetic
auaaaauguaauuuuuuucaca

SEQ ID NO: 24078 - RNA, 22 nt, Artificial Sequence
  Synthetic
uaaaauguaauuuuuuucacau

SEQ ID NO: 24079 - RNA, 22 nt, Artificial Sequence
  Synthetic
aaaauguaauuuuuuucacauc

SEQ ID NO: 24080 - RNA, 22 nt, Artificial Sequence
  Synthetic
aaauguaauuuuuuucacauca

SEQ ID NO: 24081 - RNA, 22 nt, Artificial Sequence
  Synthetic
aauguaauuuuuuucacaucag

SEQ ID NO: 24082 - RNA, 22 nt, Artificial Sequence
  Synthetic
auguaauuuuuuucacaucaga

SEQ ID NO: 24083 - RNA, 22 nt, Artificial Sequence
  Synthetic
uguaauuuuuuucacaucagau

SEQ ID NO: 24084 - RNA, 22 nt, Artificial Sequence
  Synthetic
guaauuuuuuucacaucagaug

SEQ ID NO: 24085 - RNA, 22 nt, Artificial Sequence
  Synthetic
uaauuuuuuucacaucagaugg

SEQ ID NO: 24086 - RNA, 22 nt, Artificial Sequence
  Synthetic
aauuuuuuucacaucagauggg

SEQ ID NO: 24087 - RNA, 22 nt, Artificial Sequence
  Synthetic
auuuuuuucacaucagaugggu

SEQ ID NO: 24088 - RNA, 22 nt, Artificial Sequence
  Synthetic
uuuuuuucacaucagaugggua

SEQ ID NO: 24089 - RNA, 22 nt, Artificial Sequence
  Synthetic
uuuuuucacaucagauggguaa

SEQ ID NO: 24090 - RNA, 22 nt, Artificial Sequence
  Synthetic
uuuuucacaucagauggguaac

SEQ ID NO: 24091 - RNA, 22 nt, Artificial Sequence
  Synthetic
uuuucacaucagauggguaacg

SEQ ID NO: 24092 - RNA, 22 nt, Artificial Sequence
  Synthetic
uuucacaucagauggguaacgu

SEQ ID NO: 24093 - RNA, 22 nt, Artificial Sequence
  Synthetic
uucacaucagauggguaacgug

SEQ ID NO: 24094 - RNA, 22 nt, Artificial Sequence
  Synthetic
ucacaucagauggguaacgugc

SEQ ID NO: 24095 - RNA, 22 nt, Artificial Sequence
  Synthetic
cacaucagauggguaacgugcc

SEQ ID NO: 24096 - RNA, 22 nt, Artificial Sequence
  Synthetic
acaucagauggguaacgugcca

SEQ ID NO: 24097 - RNA, 22 nt, Artificial Sequence
  Synthetic
caucagauggguaacgugccaa

SEQ ID NO: 24098 - RNA, 22 nt, Artificial Sequence
  Synthetic
aucagauggguaacgugccaaa

SEQ ID NO: 24099 - RNA, 22 nt, Artificial Sequence
  Synthetic
ucagauggguaacgugccaaau

SEQ ID NO: 24100 - RNA, 22 nt, Artificial Sequence
  Synthetic
cagauggguaacgugccaaauc

SEQ ID NO: 24101 - RNA, 22 nt, Artificial Sequence
  Synthetic
agauggguaacgugccaaauca

SEQ ID NO: 24102 - RNA, 22 nt, Artificial Sequence
  Synthetic
gauggguaacgugccaaaucau

SEQ ID NO: 24103 - RNA, 22 nt, Artificial Sequence
  Synthetic
auggguaacgugccaaaucaua

SEQ ID NO: 24104 - RNA, 22 nt, Artificial Sequence
  Synthetic
uggguaacgugccaaaucauaa

SEQ ID NO: 24105 - RNA, 22 nt, Artificial Sequence
  Synthetic
ggguaacgugccaaaucauaac

SEQ ID NO: 24106 - RNA, 22 nt, Artificial Sequence
  Synthetic
gguaacgugccaaaucauaaca

SEQ ID NO: 24107 - RNA, 22 nt, Artificial Sequence
  Synthetic
guaacgugccaaaucauaacaa

SEQ ID NO: 24108 - RNA, 22 nt, Artificial Sequence
  Synthetic
uaacgugccaaaucauaacaag

SEQ ID NO: 24109 - RNA, 22 nt, Artificial Sequence
  Synthetic
aacgugccaaaucauaacaagg

SEQ ID NO: 24110 - RNA, 22 nt, Artificial Sequence
  Synthetic
acgugccaaaucauaacaaggu

SEQ ID NO: 24111 - RNA, 22 nt, Artificial Sequence
  Synthetic
cgugccaaaucauaacaagguu

SEQ ID NO: 24112 - RNA, 22 nt, Artificial Sequence
  Synthetic
gugccaaaucauaacaagguuu

SEQ ID NO: 24113 - RNA, 22 nt, Artificial Sequence
  Synthetic
ugccaaaucauaacaagguuug

SEQ ID NO: 24114 - RNA, 22 nt, Artificial Sequence
  Synthetic
gccaaaucauaacaagguuuga

SEQ ID NO: 24115 - RNA, 22 nt, Artificial Sequence
  Synthetic
ccaaaucauaacaagguuugag

SEQ ID NO: 24116 - RNA, 22 nt, Artificial Sequence
  Synthetic
caaaucauaacaagguuugagc

SEQ ID NO: 24117 - RNA, 22 nt, Artificial Sequence
  Synthetic
aaaucauaacaagguuugagcg

SEQ ID NO: 24118 - RNA, 22 nt, Artificial Sequence
  Synthetic
aaucauaacaagguuugagcga

SEQ ID NO: 24119 - RNA, 22 nt, Artificial Sequence
  Synthetic
aucauaacaagguuugagcgag

SEQ ID NO: 24120 - RNA, 22 nt, Artificial Sequence
  Synthetic
ucauaacaagguuugagcgagg

SEQ ID NO: 24121 - RNA, 22 nt, Artificial Sequence
  Synthetic
cauaacaagguuugagcgaggc

SEQ ID NO: 24122 - RNA, 22 nt, Artificial Sequence
  Synthetic
auaacaagguuugagcgaggca

SEQ ID NO: 24123 - RNA, 22 nt, Artificial Sequence
  Synthetic
uaacaagguuugagcgaggcac

SEQ ID NO: 24124 - RNA, 22 nt, Artificial Sequence
  Synthetic
aacaagguuugagcgaggcaca

SEQ ID NO: 24125 - RNA, 22 nt, Artificial Sequence
  Synthetic
acaagguuugagcgaggcacau

SEQ ID NO: 24126 - RNA, 22 nt, Artificial Sequence
  Synthetic
caagguuugagcgaggcacauc

SEQ ID NO: 24127 - RNA, 22 nt, Artificial Sequence
  Synthetic
aagguuugagcgaggcacaucu

SEQ ID NO: 24128 - RNA, 22 nt, Artificial Sequence
  Synthetic
agguuugagcgaggcacaucuc

SEQ ID NO: 24129 - RNA, 22 nt, Artificial Sequence
  Synthetic
gguuugagcgaggcacaucuca

SEQ ID NO: 24130 - RNA, 22 nt, Artificial Sequence
  Synthetic
guuugagcgaggcacaucucac

SEQ ID NO: 24131 - RNA, 22 nt, Artificial Sequence
  Synthetic
uuugagcgaggcacaucucaca

SEQ ID NO: 24132 - RNA, 22 nt, Artificial Sequence
  Synthetic
uugagcgaggcacaucucacac

SEQ ID NO: 24133 - RNA, 22 nt, Artificial Sequence
  Synthetic
ugagcgaggcacaucucacaca

SEQ ID NO: 24134 - RNA, 22 nt, Artificial Sequence
  Synthetic
gagcgaggcacaucucacacau

SEQ ID NO: 24135 - RNA, 22 nt, Artificial Sequence
  Synthetic
agcgaggcacaucucacacaug

SEQ ID NO: 24136 - RNA, 22 nt, Artificial Sequence
  Synthetic
gcgaggcacaucucacacaugg

SEQ ID NO: 24137 - RNA, 22 nt, Artificial Sequence
  Synthetic
cgaggcacaucucacacauggg

SEQ ID NO: 24138 - RNA, 22 nt, Artificial Sequence
  Synthetic
gaggcacaucucacacaugggc

SEQ ID NO: 24139 - RNA, 22 nt, Artificial Sequence
  Synthetic
aggcacaucucacacaugggca

SEQ ID NO: 24140 - RNA, 22 nt, Artificial Sequence
  Synthetic
ggcacaucucacacaugggcau

SEQ ID NO: 24141 - RNA, 22 nt, Artificial Sequence
  Synthetic
gcacaucucacacaugggcaug

SEQ ID NO: 24142 - RNA, 22 nt, Artificial Sequence
  Synthetic
cacaucucacacaugggcauga

SEQ ID NO: 24143 - RNA, 22 nt, Artificial Sequence
  Synthetic
acaucucacacaugggcaugaa

SEQ ID NO: 24144 - RNA, 22 nt, Artificial Sequence
  Synthetic
caucucacacaugggcaugaaa

SEQ ID NO: 24145 - RNA, 22 nt, Artificial Sequence
  Synthetic
aucucacacaugggcaugaaaa

SEQ ID NO: 24146 - RNA, 22 nt, Artificial Sequence
  Synthetic
ucucacacaugggcaugaaaac

SEQ ID NO: 24147 - RNA, 22 nt, Artificial Sequence
  Synthetic
cucacacaugggcaugaaaacc

SEQ ID NO: 24148 - RNA, 22 nt, Artificial Sequence
  Synthetic
ucacacaugggcaugaaaaccc

SEQ ID NO: 24149 - RNA, 22 nt, Artificial Sequence
  Synthetic
cacacaugggcaugaaaaccca

SEQ ID NO: 24150 - RNA, 22 nt, Artificial Sequence
  Synthetic
acacaugggcaugaaaacccaa

SEQ ID NO: 24151 - RNA, 22 nt, Artificial Sequence
  Synthetic
cacaugggcaugaaaacccaau

SEQ ID NO: 24152 - RNA, 22 nt, Artificial Sequence
  Synthetic
acaugggcaugaaaacccaauc

SEQ ID NO: 24153 - RNA, 22 nt, Artificial Sequence
  Synthetic
caugggcaugaaaacccaauca

SEQ ID NO: 24154 - RNA, 22 nt, Artificial Sequence
  Synthetic
augggcaugaaaacccaaucau

SEQ ID NO: 24155 - RNA, 22 nt, Artificial Sequence
  Synthetic
ugggcaugaaaacccaaucauc

SEQ ID NO: 24156 - RNA, 22 nt, Artificial Sequence
  Synthetic
gggcaugaaaacccaaucaucg

SEQ ID NO: 24157 - RNA, 22 nt, Artificial Sequence
  Synthetic
ggcaugaaaacccaaucaucgc

SEQ ID NO: 24158 - RNA, 22 nt, Artificial Sequence
  Synthetic
gcaugaaaacccaaucaucgcu

SEQ ID NO: 24159 - RNA, 22 nt, Artificial Sequence
  Synthetic
caugaaaacccaaucaucgcuu

SEQ ID NO: 24160 - RNA, 22 nt, Artificial Sequence
  Synthetic
augaaaacccaaucaucgcuua

SEQ ID NO: 24161 - RNA, 22 nt, Artificial Sequence
  Synthetic
ugaaaacccaaucaucgcuuau

SEQ ID NO: 24162 - RNA, 22 nt, Artificial Sequence
  Synthetic
gaaaacccaaucaucgcuuaug

SEQ ID NO: 24163 - RNA, 22 nt, Artificial Sequence
  Synthetic
aaaacccaaucaucgcuuauga

SEQ ID NO: 24164 - RNA, 22 nt, Artificial Sequence
  Synthetic
aaacccaaucaucgcuuaugaa

SEQ ID NO: 24165 - RNA, 22 nt, Artificial Sequence
  Synthetic
aacccaaucaucgcuuaugaaa

SEQ ID NO: 24166 - RNA, 22 nt, Artificial Sequence
  Synthetic
acccaaucaucgcuuaugaaac

SEQ ID NO: 24167 - RNA, 22 nt, Artificial Sequence
  Synthetic
cccaaucaucgcuuaugaaacu

SEQ ID NO: 24168 - RNA, 22 nt, Artificial Sequence
  Synthetic
ccaaucaucgcuuaugaaacua

SEQ ID NO: 24169 - RNA, 22 nt, Artificial Sequence
  Synthetic
caaucaucgcuuaugaaacuaa

SEQ ID NO: 24170 - RNA, 22 nt, Artificial Sequence
  Synthetic
aaucaucgcuuaugaaacuaac

SEQ ID NO: 24171 - RNA, 22 nt, Artificial Sequence
  Synthetic
aucaucgcuuaugaaacuaaca

SEQ ID NO: 24172 - RNA, 22 nt, Artificial Sequence
  Synthetic
ucaucgcuuaugaaacuaacau

SEQ ID NO: 24173 - RNA, 22 nt, Artificial Sequence
  Synthetic
caucgcuuaugaaacuaacauu

SEQ ID NO: 24174 - RNA, 22 nt, Artificial Sequence
  Synthetic
aucgcuuaugaaacuaacauuu

SEQ ID NO: 24175 - RNA, 22 nt, Artificial Sequence
  Synthetic
ucgcuuaugaaacuaacauuuc

SEQ ID NO: 24176 - RNA, 22 nt, Artificial Sequence
  Synthetic
cgcuuaugaaacuaacauuuca

SEQ ID NO: 24177 - RNA, 22 nt, Artificial Sequence
  Synthetic
gcuuaugaaacuaacauuucaa

SEQ ID NO: 24178 - RNA, 22 nt, Artificial Sequence
  Synthetic
cuuaugaaacuaacauuucaau

SEQ ID NO: 24179 - RNA, 22 nt, Artificial Sequence
  Synthetic
uuaugaaacuaacauuucaaua

SEQ ID NO: 24180 - RNA, 22 nt, Artificial Sequence
  Synthetic
uaugaaacuaacauuucaauag

SEQ ID NO: 24181 - RNA, 22 nt, Artificial Sequence
  Synthetic
augaaacuaacauuucaauaga

SEQ ID NO: 24182 - RNA, 22 nt, Artificial Sequence
  Synthetic
ugaaacuaacauuucaauagaa

SEQ ID NO: 24183 - RNA, 22 nt, Artificial Sequence
  Synthetic
gaaacuaacauuucaauagaaa

SEQ ID NO: 24184 - RNA, 22 nt, Artificial Sequence
  Synthetic
aaacuaacauuucaauagaaau

SEQ ID NO: 24185 - RNA, 22 nt, Artificial Sequence
  Synthetic
aacuaacauuucaauagaaaua

SEQ ID NO: 24186 - RNA, 22 nt, Artificial Sequence
  Synthetic
acuaacauuucaauagaaauac

SEQ ID NO: 24187 - RNA, 22 nt, Artificial Sequence
  Synthetic
cuaacauuucaauagaaauaca

SEQ ID NO: 24188 - RNA, 22 nt, Artificial Sequence
  Synthetic
uaacauuucaauagaaauacau

SEQ ID NO: 24189 - RNA, 22 nt, Artificial Sequence
  Synthetic
aacauuucaauagaaauacauu

SEQ ID NO: 24190 - RNA, 22 nt, Artificial Sequence
  Synthetic
acauuucaauagaaauacauua

SEQ ID NO: 24191 - RNA, 22 nt, Artificial Sequence
  Synthetic
cauuucaauagaaauacauuau

SEQ ID NO: 24192 - RNA, 22 nt, Artificial Sequence
  Synthetic
auuucaauagaaauacauuaug

SEQ ID NO: 24193 - RNA, 22 nt, Artificial Sequence
  Synthetic
uuucaauagaaauacauuauga

SEQ ID NO: 24194 - RNA, 22 nt, Artificial Sequence
  Synthetic
uucaauagaaauacauuaugaa

SEQ ID NO: 24195 - RNA, 22 nt, Artificial Sequence
  Synthetic
ucaauagaaauacauuaugaaa

SEQ ID NO: 24196 - RNA, 22 nt, Artificial Sequence
  Synthetic
caauagaaauacauuaugaaag

SEQ ID NO: 24197 - RNA, 22 nt, Artificial Sequence
  Synthetic
aauagaaauacauuaugaaagu

SEQ ID NO: 24198 - RNA, 22 nt, Artificial Sequence
  Synthetic
auagaaauacauuaugaaaguu

SEQ ID NO: 24199 - RNA, 22 nt, Artificial Sequence
  Synthetic
uagaaauacauuaugaaaguuc

SEQ ID NO: 24200 - RNA, 22 nt, Artificial Sequence
  Synthetic
agaaauacauuaugaaaguucu

SEQ ID NO: 24201 - RNA, 22 nt, Artificial Sequence
  Synthetic
gaaauacauuaugaaaguucug

SEQ ID NO: 24202 - RNA, 22 nt, Artificial Sequence
  Synthetic
aaauacauuaugaaaguucugg

SEQ ID NO: 24203 - RNA, 22 nt, Artificial Sequence
  Synthetic
aauacauuaugaaaguucuggu

SEQ ID NO: 24204 - RNA, 22 nt, Artificial Sequence
  Synthetic
auacauuaugaaaguucugguu

SEQ ID NO: 24205 - RNA, 22 nt, Artificial Sequence
  Synthetic
uacauuaugaaaguucugguuc

SEQ ID NO: 24206 - RNA, 22 nt, Artificial Sequence
  Synthetic
acauuaugaaaguucugguucu

SEQ ID NO: 24207 - RNA, 22 nt, Artificial Sequence
  Synthetic
cauuaugaaaguucugguucua

SEQ ID NO: 24208 - RNA, 22 nt, Artificial Sequence
  Synthetic
auuaugaaaguucugguucuaa

SEQ ID NO: 24209 - RNA, 22 nt, Artificial Sequence
  Synthetic
uuaugaaaguucugguucuaaa

SEQ ID NO: 24210 - RNA, 22 nt, Artificial Sequence
  Synthetic
uaugaaaguucugguucuaaau

SEQ ID NO: 24211 - RNA, 22 nt, Artificial Sequence
  Synthetic
augaaaguucugguucuaaauc

SEQ ID NO: 24212 - RNA, 22 nt, Artificial Sequence
  Synthetic
ugaaaguucugguucuaaaucc

SEQ ID NO: 24213 - RNA, 22 nt, Artificial Sequence
  Synthetic
gaaaguucugguucuaaaucca

SEQ ID NO: 24214 - RNA, 22 nt, Artificial Sequence
  Synthetic
aaaguucugguucuaaauccau

SEQ ID NO: 24215 - RNA, 22 nt, Artificial Sequence
  Synthetic
aaguucugguucuaaauccaua

SEQ ID NO: 24216 - RNA, 22 nt, Artificial Sequence
  Synthetic
aguucugguucuaaauccauau

SEQ ID NO: 24217 - RNA, 22 nt, Artificial Sequence
  Synthetic
guucugguucuaaauccauauu

SEQ ID NO: 24218 - RNA, 22 nt, Artificial Sequence
  Synthetic
uucugguucuaaauccauauua

SEQ ID NO: 24219 - RNA, 22 nt, Artificial Sequence
  Synthetic
ucugguucuaaauccauauuau

SEQ ID NO: 24220 - RNA, 22 nt, Artificial Sequence
  Synthetic
cugguucuaaauccauauuauc

SEQ ID NO: 24221 - RNA, 22 nt, Artificial Sequence
  Synthetic
ugguucuaaauccauauuaucu

SEQ ID NO: 24222 - RNA, 22 nt, Artificial Sequence
  Synthetic
gguucuaaauccauauuaucuu

SEQ ID NO: 24223 - RNA, 22 nt, Artificial Sequence
  Synthetic
guucuaaauccauauuaucuug

SEQ ID NO: 24224 - RNA, 22 nt, Artificial Sequence
  Synthetic
uucuaaauccauauuaucuuga

SEQ ID NO: 24225 - RNA, 22 nt, Artificial Sequence
  Synthetic
ucuaaauccauauuaucuugag

SEQ ID NO: 24226 - RNA, 22 nt, Artificial Sequence
  Synthetic
cuaaauccauauuaucuugagg

SEQ ID NO: 24227 - RNA, 22 nt, Artificial Sequence
  Synthetic
uaaauccauauuaucuugaggg

SEQ ID NO: 24228 - RNA, 22 nt, Artificial Sequence
  Synthetic
aaauccauauuaucuugagggc

SEQ ID NO: 24229 - RNA, 22 nt, Artificial Sequence
  Synthetic
aauccauauuaucuugagggca

SEQ ID NO: 24230 - RNA, 22 nt, Artificial Sequence
  Synthetic
auccauauuaucuugagggcau

SEQ ID NO: 24231 - RNA, 22 nt, Artificial Sequence
  Synthetic
uccauauuaucuugagggcaua

SEQ ID NO: 24232 - RNA, 22 nt, Artificial Sequence
  Synthetic
ccauauuaucuugagggcauau

SEQ ID NO: 24233 - RNA, 22 nt, Artificial Sequence
  Synthetic
cauauuaucuugagggcauauc

SEQ ID NO: 24234 - RNA, 22 nt, Artificial Sequence
  Synthetic
auauuaucuugagggcauaucc

SEQ ID NO: 24235 - RNA, 22 nt, Artificial Sequence
  Synthetic
uauuaucuugagggcauaucca

SEQ ID NO: 24236 - RNA, 22 nt, Artificial Sequence
  Synthetic
auuaucuugagggcauauccac

SEQ ID NO: 24237 - RNA, 22 nt, Artificial Sequence
  Synthetic
uuaucuugagggcauauccacu

SEQ ID NO: 24238 - RNA, 22 nt, Artificial Sequence
  Synthetic
uaucuugagggcauauccacug

SEQ ID NO: 24239 - RNA, 22 nt, Artificial Sequence
  Synthetic
aucuugagggcauauccacuga

SEQ ID NO: 24240 - RNA, 22 nt, Artificial Sequence
  Synthetic
ucuugagggcauauccacugau

SEQ ID NO: 24241 - RNA, 22 nt, Artificial Sequence
  Synthetic
cuugagggcauauccacugaug

SEQ ID NO: 24242 - RNA, 22 nt, Artificial Sequence
  Synthetic
uugagggcauauccacugaugc

SEQ ID NO: 24243 - RNA, 22 nt, Artificial Sequence
  Synthetic
ugagggcauauccacugaugca

SEQ ID NO: 24244 - RNA, 22 nt, Artificial Sequence
  Synthetic
gagggcauauccacugaugcaa

SEQ ID NO: 24245 - RNA, 22 nt, Artificial Sequence
  Synthetic
agggcauauccacugaugcaau

SEQ ID NO: 24246 - RNA, 22 nt, Artificial Sequence
  Synthetic
gggcauauccacugaugcaaug

SEQ ID NO: 24247 - RNA, 22 nt, Artificial Sequence
  Synthetic
ggcauauccacugaugcaaugg

SEQ ID NO: 24248 - RNA, 22 nt, Artificial Sequence
  Synthetic
gcauauccacugaugcaaugga

SEQ ID NO: 24249 - RNA, 22 nt, Artificial Sequence
  Synthetic
cauauccacugaugcaauggau

SEQ ID NO: 24250 - RNA, 22 nt, Artificial Sequence
  Synthetic
auauccacugaugcaauggaua

SEQ ID NO: 24251 - RNA, 22 nt, Artificial Sequence
  Synthetic
uauccacugaugcaauggauau

SEQ ID NO: 24252 - RNA, 22 nt, Artificial Sequence
  Synthetic
auccacugaugcaauggauaug

SEQ ID NO: 24253 - RNA, 22 nt, Artificial Sequence
  Synthetic
uccacugaugcaauggauauga

SEQ ID NO: 24254 - RNA, 22 nt, Artificial Sequence
  Synthetic
ccacugaugcaauggauaugau

SEQ ID NO: 24255 - RNA, 22 nt, Artificial Sequence
  Synthetic
cacugaugcaauggauaugauc

SEQ ID NO: 24256 - RNA, 22 nt, Artificial Sequence
  Synthetic
acugaugcaauggauaugauca

SEQ ID NO: 24257 - RNA, 22 nt, Artificial Sequence
  Synthetic
cugaugcaauggauaugaucau

SEQ ID NO: 24258 - RNA, 22 nt, Artificial Sequence
  Synthetic
ugaugcaauggauaugaucauu

SEQ ID NO: 24259 - RNA, 22 nt, Artificial Sequence
  Synthetic
gaugcaauggauaugaucauua

SEQ ID NO: 24260 - RNA, 22 nt, Artificial Sequence
  Synthetic
augcaauggauaugaucauuau

SEQ ID NO: 24261 - RNA, 22 nt, Artificial Sequence
  Synthetic
ugcaauggauaugaucauuauu

SEQ ID NO: 24262 - RNA, 22 nt, Artificial Sequence
  Synthetic
gcaauggauaugaucauuauuu

SEQ ID NO: 24263 - RNA, 22 nt, Artificial Sequence
  Synthetic
caauggauaugaucauuauuug

SEQ ID NO: 24264 - RNA, 22 nt, Artificial Sequence
  Synthetic
aauggauaugaucauuauuuga

SEQ ID NO: 24265 - RNA, 22 nt, Artificial Sequence
  Synthetic
auggauaugaucauuauuugau

SEQ ID NO: 24266 - RNA, 22 nt, Artificial Sequence
  Synthetic
uggauaugaucauuauuugauu

SEQ ID NO: 24267 - RNA, 22 nt, Artificial Sequence
  Synthetic
ggauaugaucauuauuugauuu

SEQ ID NO: 24268 - RNA, 22 nt, Artificial Sequence
  Synthetic
gauaugaucauuauuugauuug

SEQ ID NO: 24269 - RNA, 22 nt, Artificial Sequence
  Synthetic
auaugaucauuauuugauuuga

SEQ ID NO: 24270 - RNA, 22 nt, Artificial Sequence
  Synthetic
uaugaucauuauuugauuugau

SEQ ID NO: 24271 - RNA, 22 nt, Artificial Sequence
  Synthetic
augaucauuauuugauuugaua

SEQ ID NO: 24272 - RNA, 22 nt, Artificial Sequence
  Synthetic
ugaucauuauuugauuugauau

SEQ ID NO: 24273 - RNA, 22 nt, Artificial Sequence
  Synthetic
gaucauuauuugauuugauauc

SEQ ID NO: 24274 - RNA, 22 nt, Artificial Sequence
  Synthetic
aucauuauuugauuugauauca

SEQ ID NO: 24275 - RNA, 22 nt, Artificial Sequence
  Synthetic
ucauuauuugauuugauaucaa

SEQ ID NO: 24276 - RNA, 22 nt, Artificial Sequence
  Synthetic
cauuauuugauuugauaucaaa

SEQ ID NO: 24277 - RNA, 22 nt, Artificial Sequence
  Synthetic
auuauuugauuugauaucaaac

SEQ ID NO: 24278 - RNA, 22 nt, Artificial Sequence
  Synthetic
uuauuugauuugauaucaaacu

SEQ ID NO: 24279 - RNA, 22 nt, Artificial Sequence
  Synthetic
uauuugauuugauaucaaacua

SEQ ID NO: 24280 - RNA, 22 nt, Artificial Sequence
  Synthetic
auuugauuugauaucaaacuaa

SEQ ID NO: 24281 - RNA, 22 nt, Artificial Sequence
  Synthetic
uuugauuugauaucaaacuaaa

SEQ ID NO: 24282 - RNA, 22 nt, Artificial Sequence
  Synthetic
uugauuugauaucaaacuaaaa

SEQ ID NO: 24283 - RNA, 22 nt, Artificial Sequence
  Synthetic
ugauuugauaucaaacuaaaac

SEQ ID NO: 24284 - RNA, 22 nt, Artificial Sequence
  Synthetic
gauuugauaucaaacuaaaacg

SEQ ID NO: 24285 - RNA, 22 nt, Artificial Sequence
  Synthetic
auuugauaucaaacuaaaacga

SEQ ID NO: 24286 - RNA, 22 nt, Artificial Sequence
  Synthetic
uuugauaucaaacuaaaacgag

SEQ ID NO: 24287 - RNA, 22 nt, Artificial Sequence
  Synthetic
uugauaucaaacuaaaacgagu

SEQ ID NO: 24288 - RNA, 22 nt, Artificial Sequence
  Synthetic
ugauaucaaacuaaaacgagug

SEQ ID NO: 24289 - RNA, 22 nt, Artificial Sequence
  Synthetic
gauaucaaacuaaaacgaguga

SEQ ID NO: 24290 - RNA, 22 nt, Artificial Sequence
  Synthetic
auaucaaacuaaaacgagugag

SEQ ID NO: 24291 - RNA, 22 nt, Artificial Sequence
  Synthetic
uaucaaacuaaaacgagugaga

SEQ ID NO: 24292 - RNA, 22 nt, Artificial Sequence
  Synthetic
aucaaacuaaaacgagugagaa

SEQ ID NO: 24293 - RNA, 22 nt, Artificial Sequence
  Synthetic
ucaaacuaaaacgagugagaaa

SEQ ID NO: 24294 - RNA, 22 nt, Artificial Sequence
  Synthetic
caaacuaaaacgagugagaaaa

SEQ ID NO: 24295 - RNA, 22 nt, Artificial Sequence
  Synthetic
aaacuaaaacgagugagaaaaa

SEQ ID NO: 24296 - RNA, 22 nt, Artificial Sequence
  Synthetic
aacuaaaacgagugagaaaaaa

SEQ ID NO: 24297 - RNA, 22 nt, Artificial Sequence
  Synthetic
acuaaaacgagugagaaaaaaa

SEQ ID NO: 24298 - RNA, 22 nt, Artificial Sequence
  Synthetic
cuaaaacgagugagaaaaaaaa

SEQ ID NO: 24299 - RNA, 22 nt, Artificial Sequence
  Synthetic
uaaaacgagugagaaaaaaaaa

SEQ ID NO: 24300 - RNA, 22 nt, Artificial Sequence
  Synthetic
aaaacgagugagaaaaaaaaaa

SEQ ID NO: 24301 - RNA, 22 nt, Artificial Sequence
  Synthetic
aaacgagugagaaaaaaaaaaa

SEQ ID NO: 24302 - RNA, 22 nt, Artificial Sequence
  Synthetic
aacgagugagaaaaaaaaaaag

SEQ ID NO: 24303 - RNA, 22 nt, Artificial Sequence
  Synthetic
acgagugagaaaaaaaaaaaga

SEQ ID NO: 24304 - RNA, 22 nt, Artificial Sequence
  Synthetic
cgagugagaaaaaaaaaaagaa

SEQ ID NO: 24305 - RNA, 22 nt, Artificial Sequence
  Synthetic
gagugagaaaaaaaaaaagaaa

SEQ ID NO: 24306 - RNA, 22 nt, Artificial Sequence
  Synthetic
agugagaaaaaaaaaaagaaac

SEQ ID NO: 24307 - RNA, 22 nt, Artificial Sequence
  Synthetic
gugagaaaaaaaaaaagaaacc

SEQ ID NO: 24308 - RNA, 22 nt, Artificial Sequence
  Synthetic
ugagaaaaaaaaaaagaaaccc

SEQ ID NO: 24309 - RNA, 22 nt, Artificial Sequence
  Synthetic
gagaaaaaaaaaaagaaacccc

SEQ ID NO: 24310 - RNA, 22 nt, Artificial Sequence
  Synthetic
agaaaaaaaaaaagaaacccca

SEQ ID NO: 24311 - RNA, 22 nt, Artificial Sequence
  Synthetic
gaaaaaaaaaaagaaaccccag

SEQ ID NO: 24312 - RNA, 22 nt, Artificial Sequence
  Synthetic
aaaaaaaaaaagaaaccccaga

SEQ ID NO: 24313 - RNA, 22 nt, Artificial Sequence
  Synthetic
aaaaaaaaaagaaaccccagaa

SEQ ID NO: 24314 - RNA, 22 nt, Artificial Sequence
  Synthetic
aaaaaaaaagaaaccccagaau

SEQ ID NO: 24315 - RNA, 22 nt, Artificial Sequence
  Synthetic
aaaaaaaagaaaccccagaaua

SEQ ID NO: 24316 - RNA, 22 nt, Artificial Sequence
  Synthetic
aaaaaaagaaaccccagaauau

SEQ ID NO: 24317 - RNA, 22 nt, Artificial Sequence
  Synthetic
aaaaaagaaaccccagaauaug

SEQ ID NO: 24318 - RNA, 22 nt, Artificial Sequence
  Synthetic
aaaaagaaaccccagaauaugu

SEQ ID NO: 24319 - RNA, 22 nt, Artificial Sequence
  Synthetic
aaaagaaaccccagaauauguu

SEQ ID NO: 24320 - RNA, 22 nt, Artificial Sequence
  Synthetic
aaagaaaccccagaauauguua

SEQ ID NO: 24321 - RNA, 22 nt, Artificial Sequence
  Synthetic
aagaaaccccagaauauguuac

SEQ ID NO: 24322 - RNA, 22 nt, Artificial Sequence
  Synthetic
agaaaccccagaauauguuaca

SEQ ID NO: 24323 - RNA, 22 nt, Artificial Sequence
  Synthetic
gaaaccccagaauauguuacag

SEQ ID NO: 24324 - RNA, 22 nt, Artificial Sequence
  Synthetic
aaaccccagaauauguuacagu

SEQ ID NO: 24325 - RNA, 22 nt, Artificial Sequence
  Synthetic
aaccccagaauauguuacaguu

SEQ ID NO: 24326 - RNA, 22 nt, Artificial Sequence
  Synthetic
accccagaauauguuacaguug

SEQ ID NO: 24327 - RNA, 22 nt, Artificial Sequence
  Synthetic
ccccagaauauguuacaguugu

SEQ ID NO: 24328 - RNA, 22 nt, Artificial Sequence
  Synthetic
cccagaauauguuacaguuguu

SEQ ID NO: 24329 - RNA, 22 nt, Artificial Sequence
  Synthetic
ccagaauauguuacaguuguuu

SEQ ID NO: 24330 - RNA, 22 nt, Artificial Sequence
  Synthetic
cagaauauguuacaguuguuuu

SEQ ID NO: 24331 - RNA, 22 nt, Artificial Sequence
  Synthetic
agaauauguuacaguuguuuuu

SEQ ID NO: 24332 - RNA, 22 nt, Artificial Sequence
  Synthetic
gaauauguuacaguuguuuuua

SEQ ID NO: 24333 - RNA, 22 nt, Artificial Sequence
  Synthetic
aauauguuacaguuguuuuuau

SEQ ID NO: 24334 - RNA, 22 nt, Artificial Sequence
  Synthetic
auauguuacaguuguuuuuauu

SEQ ID NO: 24335 - RNA, 22 nt, Artificial Sequence
  Synthetic
uauguuacaguuguuuuuauuc

SEQ ID NO: 24336 - RNA, 22 nt, Artificial Sequence
  Synthetic
auguuacaguuguuuuuauucc

SEQ ID NO: 24337 - RNA, 22 nt, Artificial Sequence
  Synthetic
uguuacaguuguuuuuauucca

SEQ ID NO: 24338 - RNA, 22 nt, Artificial Sequence
  Synthetic
guuacaguuguuuuuauuccaa

SEQ ID NO: 24339 - RNA, 22 nt, Artificial Sequence
  Synthetic
uuacaguuguuuuuauuccaac

SEQ ID NO: 24340 - RNA, 22 nt, Artificial Sequence
  Synthetic
uacaguuguuuuuauuccaacu

SEQ ID NO: 24341 - RNA, 22 nt, Artificial Sequence
  Synthetic
acaguuguuuuuauuccaacug

SEQ ID NO: 24342 - RNA, 22 nt, Artificial Sequence
  Synthetic
caguuguuuuuauuccaacuga

SEQ ID NO: 24343 - RNA, 22 nt, Artificial Sequence
  Synthetic
aguuguuuuuauuccaacugaa

SEQ ID NO: 24344 - RNA, 22 nt, Artificial Sequence
  Synthetic
guuguuuuuauuccaacugaaa

SEQ ID NO: 24345 - RNA, 22 nt, Artificial Sequence
  Synthetic
uuguuuuuauuccaacugaaaa

SEQ ID NO: 24346 - RNA, 22 nt, Artificial Sequence
  Synthetic
uguuuuuauuccaacugaaaau

SEQ ID NO: 24347 - RNA, 22 nt, Artificial Sequence
  Synthetic
guuuuuauuccaacugaaaauu

SEQ ID NO: 24348 - RNA, 22 nt, Artificial Sequence
  Synthetic
uuuuuauuccaacugaaaauug

SEQ ID NO: 24349 - RNA, 22 nt, Artificial Sequence
  Synthetic
uuuuauuccaacugaaaauuga

SEQ ID NO: 24350 - RNA, 22 nt, Artificial Sequence
  Synthetic
uuuauuccaacugaaaauugag

SEQ ID NO: 24351 - RNA, 22 nt, Artificial Sequence
  Synthetic
uuauuccaacugaaaauugagu

SEQ ID NO: 24352 - RNA, 22 nt, Artificial Sequence
  Synthetic
uauuccaacugaaaauugagua

SEQ ID NO: 24353 - RNA, 22 nt, Artificial Sequence
  Synthetic
auuccaacugaaaauugaguaa

SEQ ID NO: 24354 - RNA, 22 nt, Artificial Sequence
  Synthetic
uuccaacugaaaauugaguaag

SEQ ID NO: 24355 - RNA, 22 nt, Artificial Sequence
  Synthetic
uccaacugaaaauugaguaagg

SEQ ID NO: 24356 - RNA, 22 nt, Artificial Sequence
  Synthetic
ccaacugaaaauugaguaaggg

SEQ ID NO: 24357 - RNA, 22 nt, Artificial Sequence
  Synthetic
caacugaaaauugaguaagggu

SEQ ID NO: 24358 - RNA, 22 nt, Artificial Sequence
  Synthetic
aacugaaaauugaguaagggua

SEQ ID NO: 24359 - RNA, 22 nt, Artificial Sequence
  Synthetic
acugaaaauugaguaaggguaa

SEQ ID NO: 24360 - RNA, 22 nt, Artificial Sequence
  Synthetic
cugaaaauugaguaaggguaac

SEQ ID NO: 24361 - RNA, 22 nt, Artificial Sequence
  Synthetic
ugaaaauugaguaaggguaacu

SEQ ID NO: 24362 - RNA, 22 nt, Artificial Sequence
  Synthetic
gaaaauugaguaaggguaacuc

SEQ ID NO: 24363 - RNA, 22 nt, Artificial Sequence
  Synthetic
aaaauugaguaaggguaacucu

SEQ ID NO: 24364 - RNA, 22 nt, Artificial Sequence
  Synthetic
aaauugaguaaggguaacucuu

SEQ ID NO: 24365 - RNA, 22 nt, Artificial Sequence
  Synthetic
aauugaguaaggguaacucuuc

SEQ ID NO: 24366 - RNA, 22 nt, Artificial Sequence
  Synthetic
auugaguaaggguaacucuuca

SEQ ID NO: 24367 - RNA, 22 nt, Artificial Sequence
  Synthetic
uugaguaaggguaacucuucac

SEQ ID NO: 24368 - RNA, 22 nt, Artificial Sequence
  Synthetic
ugaguaaggguaacucuucacu

SEQ ID NO: 24369 - RNA, 22 nt, Artificial Sequence
  Synthetic
gaguaaggguaacucuucacuu

SEQ ID NO: 24370 - RNA, 22 nt, Artificial Sequence
  Synthetic
aguaaggguaacucuucacuuu

SEQ ID NO: 24371 - RNA, 22 nt, Artificial Sequence
  Synthetic
guaaggguaacucuucacuuua

SEQ ID NO: 24372 - RNA, 22 nt, Artificial Sequence
  Synthetic
uaaggguaacucuucacuuuaa

SEQ ID NO: 24373 - RNA, 22 nt, Artificial Sequence
  Synthetic
aaggguaacucuucacuuuaac

SEQ ID NO: 24374 - RNA, 22 nt, Artificial Sequence
  Synthetic
aggguaacucuucacuuuaacg

SEQ ID NO: 24375 - RNA, 22 nt, Artificial Sequence
  Synthetic
ggguaacucuucacuuuaacgu

SEQ ID NO: 24376 - RNA, 22 nt, Artificial Sequence
  Synthetic
gguaacucuucacuuuaacgua

SEQ ID NO: 24377 - RNA, 22 nt, Artificial Sequence
  Synthetic
guaacucuucacuuuaacguac

SEQ ID NO: 24378 - RNA, 22 nt, Artificial Sequence
  Synthetic
uaacucuucacuuuaacguacc

SEQ ID NO: 24379 - RNA, 22 nt, Artificial Sequence
  Synthetic
aacucuucacuuuaacguaccu

SEQ ID NO: 24380 - RNA, 22 nt, Artificial Sequence
  Synthetic
acucuucacuuuaacguaccua

SEQ ID NO: 24381 - RNA, 22 nt, Artificial Sequence
  Synthetic
cucuucacuuuaacguaccuag

SEQ ID NO: 24382 - RNA, 22 nt, Artificial Sequence
  Synthetic
ucuucacuuuaacguaccuaga

SEQ ID NO: 24383 - RNA, 22 nt, Artificial Sequence
  Synthetic
cuucacuuuaacguaccuagaa

SEQ ID NO: 24384 - RNA, 22 nt, Artificial Sequence
  Synthetic
uucacuuuaacguaccuagaaa

SEQ ID NO: 24385 - RNA, 22 nt, Artificial Sequence
  Synthetic
ucacuuuaacguaccuagaaau

SEQ ID NO: 24386 - RNA, 22 nt, Artificial Sequence
  Synthetic
cacuuuaacguaccuagaaaug

SEQ ID NO: 24387 - RNA, 22 nt, Artificial Sequence
  Synthetic
acuuuaacguaccuagaaauga

SEQ ID NO: 24388 - RNA, 22 nt, Artificial Sequence
  Synthetic
cuuuaacguaccuagaaaugau

SEQ ID NO: 24389 - RNA, 22 nt, Artificial Sequence
  Synthetic
uuuaacguaccuagaaaugaua

SEQ ID NO: 24390 - RNA, 22 nt, Artificial Sequence
  Synthetic
uuaacguaccuagaaaugauau

SEQ ID NO: 24391 - RNA, 22 nt, Artificial Sequence
  Synthetic
uaacguaccuagaaaugauauc

SEQ ID NO: 24392 - RNA, 22 nt, Artificial Sequence
  Synthetic
aacguaccuagaaaugauaucu

SEQ ID NO: 24393 - RNA, 22 nt, Artificial Sequence
  Synthetic
acguaccuagaaaugauaucuc

SEQ ID NO: 24394 - RNA, 22 nt, Artificial Sequence
  Synthetic
cguaccuagaaaugauaucucc

SEQ ID NO: 24395 - RNA, 22 nt, Artificial Sequence
  Synthetic
guaccuagaaaugauaucuccu

SEQ ID NO: 24396 - RNA, 22 nt, Artificial Sequence
  Synthetic
uaccuagaaaugauaucuccuu

SEQ ID NO: 24397 - RNA, 22 nt, Artificial Sequence
  Synthetic
accuagaaaugauaucuccuug

SEQ ID NO: 24398 - RNA, 22 nt, Artificial Sequence
  Synthetic
ccuagaaaugauaucuccuugc

SEQ ID NO: 24399 - RNA, 22 nt, Artificial Sequence
  Synthetic
cuagaaaugauaucuccuugca

SEQ ID NO: 24400 - RNA, 22 nt, Artificial Sequence
  Synthetic
uagaaaugauaucuccuugcau

SEQ ID NO: 24401 - RNA, 22 nt, Artificial Sequence
  Synthetic
agaaaugauaucuccuugcaua

SEQ ID NO: 24402 - RNA, 22 nt, Artificial Sequence
  Synthetic
gaaaugauaucuccuugcauaa

SEQ ID NO: 24403 - RNA, 22 nt, Artificial Sequence
  Synthetic
aaaugauaucuccuugcauaau

SEQ ID NO: 24404 - RNA, 22 nt, Artificial Sequence
  Synthetic
aaugauaucuccuugcauaauu

SEQ ID NO: 24405 - RNA, 22 nt, Artificial Sequence
  Synthetic
augauaucuccuugcauaauua

SEQ ID NO: 24406 - RNA, 22 nt, Artificial Sequence
  Synthetic
ugauaucuccuugcauaauuag

SEQ ID NO: 24407 - RNA, 22 nt, Artificial Sequence
  Synthetic
gauaucuccuugcauaauuagu

SEQ ID NO: 24408 - RNA, 22 nt, Artificial Sequence
  Synthetic
auaucuccuugcauaauuaguc

SEQ ID NO: 24409 - RNA, 22 nt, Artificial Sequence
  Synthetic
uaucuccuugcauaauuaguca

SEQ ID NO: 24410 - RNA, 22 nt, Artificial Sequence
  Synthetic
aucuccuugcauaauuagucau

SEQ ID NO: 24411 - RNA, 22 nt, Artificial Sequence
  Synthetic
ucuccuugcauaauuagucauu

SEQ ID NO: 24412 - RNA, 22 nt, Artificial Sequence
  Synthetic
cuccuugcauaauuagucauuu

SEQ ID NO: 24413 - RNA, 22 nt, Artificial Sequence
  Synthetic
uccuugcauaauuagucauuua

SEQ ID NO: 24414 - RNA, 22 nt, Artificial Sequence
  Synthetic
ccuugcauaauuagucauuuaa

SEQ ID NO: 24415 - RNA, 22 nt, Artificial Sequence
  Synthetic
cuugcauaauuagucauuuaac

SEQ ID NO: 24416 - RNA, 22 nt, Artificial Sequence
  Synthetic
uugcauaauuagucauuuaaca

SEQ ID NO: 24417 - RNA, 22 nt, Artificial Sequence
  Synthetic
ugcauaauuagucauuuaacag

SEQ ID NO: 24418 - RNA, 22 nt, Artificial Sequence
  Synthetic
gcauaauuagucauuuaacaga

SEQ ID NO: 24419 - RNA, 22 nt, Artificial Sequence
  Synthetic
cauaauuagucauuuaacagag

SEQ ID NO: 24420 - RNA, 22 nt, Artificial Sequence
  Synthetic
auaauuagucauuuaacagagc

SEQ ID NO: 24421 - RNA, 22 nt, Artificial Sequence
  Synthetic
uaauuagucauuuaacagagcc

SEQ ID NO: 24422 - RNA, 22 nt, Artificial Sequence
  Synthetic
aauuagucauuuaacagagcca

SEQ ID NO: 24423 - RNA, 22 nt, Artificial Sequence
  Synthetic
auuagucauuuaacagagccag

SEQ ID NO: 24424 - RNA, 22 nt, Artificial Sequence
  Synthetic
uuagucauuuaacagagccagc

SEQ ID NO: 24425 - RNA, 22 nt, Artificial Sequence
  Synthetic
uagucauuuaacagagccagca

SEQ ID NO: 24426 - RNA, 22 nt, Artificial Sequence
  Synthetic
agucauuuaacagagccagcaa

SEQ ID NO: 24427 - RNA, 22 nt, Artificial Sequence
  Synthetic
gucauuuaacagagccagcaac

SEQ ID NO: 24428 - RNA, 22 nt, Artificial Sequence
  Synthetic
ucauuuaacagagccagcaacc

SEQ ID NO: 24429 - RNA, 22 nt, Artificial Sequence
  Synthetic
cauuuaacagagccagcaacca

SEQ ID NO: 24430 - RNA, 22 nt, Artificial Sequence
  Synthetic
auuuaacagagccagcaaccau

SEQ ID NO: 24431 - RNA, 22 nt, Artificial Sequence
  Synthetic
uuuaacagagccagcaaccauc

SEQ ID NO: 24432 - RNA, 22 nt, Artificial Sequence
  Synthetic
uuaacagagccagcaaccaucc

SEQ ID NO: 24433 - RNA, 22 nt, Artificial Sequence
  Synthetic
uaacagagccagcaaccaucca

SEQ ID NO: 24434 - RNA, 22 nt, Artificial Sequence
  Synthetic
aacagagccagcaaccauccag

SEQ ID NO: 24435 - RNA, 22 nt, Artificial Sequence
  Synthetic
acagagccagcaaccauccagg

SEQ ID NO: 24436 - RNA, 22 nt, Artificial Sequence
  Synthetic
cagagccagcaaccauccagga

SEQ ID NO: 24437 - RNA, 22 nt, Artificial Sequence
  Synthetic
agagccagcaaccauccaggag

SEQ ID NO: 24438 - RNA, 22 nt, Artificial Sequence
  Synthetic
gagccagcaaccauccaggagc

SEQ ID NO: 24439 - RNA, 22 nt, Artificial Sequence
  Synthetic
agccagcaaccauccaggagcu

SEQ ID NO: 24440 - RNA, 22 nt, Artificial Sequence
  Synthetic
gccagcaaccauccaggagcuu

SEQ ID NO: 24441 - RNA, 22 nt, Artificial Sequence
  Synthetic
ccagcaaccauccaggagcuug

SEQ ID NO: 24442 - RNA, 22 nt, Artificial Sequence
  Synthetic
cagcaaccauccaggagcuugg

SEQ ID NO: 24443 - RNA, 22 nt, Artificial Sequence
  Synthetic
agcaaccauccaggagcuuggc

SEQ ID NO: 24444 - RNA, 22 nt, Artificial Sequence
  Synthetic
gcaaccauccaggagcuuggcu

SEQ ID NO: 24445 - RNA, 22 nt, Artificial Sequence
  Synthetic
caaccauccaggagcuuggcuu

SEQ ID NO: 24446 - RNA, 22 nt, Artificial Sequence
  Synthetic
aaccauccaggagcuuggcuug

SEQ ID NO: 24447 - RNA, 22 nt, Artificial Sequence
  Synthetic
accauccaggagcuuggcuugg

SEQ ID NO: 24448 - RNA, 22 nt, Artificial Sequence
  Synthetic
ccauccaggagcuuggcuuggu

SEQ ID NO: 24449 - RNA, 22 nt, Artificial Sequence
  Synthetic
cauccaggagcuuggcuuggug

SEQ ID NO: 24450 - RNA, 22 nt, Artificial Sequence
  Synthetic
auccaggagcuuggcuuggugu

SEQ ID NO: 24451 - RNA, 22 nt, Artificial Sequence
  Synthetic
uccaggagcuuggcuugguguc

SEQ ID NO: 24452 - RNA, 22 nt, Artificial Sequence
  Synthetic
ccaggagcuuggcuugguguca

SEQ ID NO: 24453 - RNA, 22 nt, Artificial Sequence
  Synthetic
caggagcuuggcuuggugucau

SEQ ID NO: 24454 - RNA, 22 nt, Artificial Sequence
  Synthetic
aggagcuuggcuuggugucaua

SEQ ID NO: 24455 - RNA, 22 nt, Artificial Sequence
  Synthetic
ggagcuuggcuuggugucauaa

SEQ ID NO: 24456 - RNA, 22 nt, Artificial Sequence
  Synthetic
gagcuuggcuuggugucauaag

SEQ ID NO: 24457 - RNA, 22 nt, Artificial Sequence
  Synthetic
agcuuggcuuggugucauaaga

SEQ ID NO: 24458 - RNA, 22 nt, Artificial Sequence
  Synthetic
gcuuggcuuggugucauaagac

SEQ ID NO: 24459 - RNA, 22 nt, Artificial Sequence
  Synthetic
cuuggcuuggugucauaagaca

SEQ ID NO: 24460 - RNA, 22 nt, Artificial Sequence
  Synthetic
uuggcuuggugucauaagacau

SEQ ID NO: 24461 - RNA, 22 nt, Artificial Sequence
  Synthetic
uggcuuggugucauaagacaug

SEQ ID NO: 24462 - RNA, 22 nt, Artificial Sequence
  Synthetic
ggcuuggugucauaagacaugu

SEQ ID NO: 24463 - RNA, 22 nt, Artificial Sequence
  Synthetic
gcuuggugucauaagacaugug

SEQ ID NO: 24464 - RNA, 22 nt, Artificial Sequence
  Synthetic
cuuggugucauaagacaugugu

SEQ ID NO: 24465 - RNA, 22 nt, Artificial Sequence
  Synthetic
uuggugucauaagacaugugua

SEQ ID NO: 24466 - RNA, 22 nt, Artificial Sequence
  Synthetic
uggugucauaagacauguguaa

SEQ ID NO: 24467 - RNA, 22 nt, Artificial Sequence
  Synthetic
ggugucauaagacauguguaag

SEQ ID NO: 24468 - RNA, 22 nt, Artificial Sequence
  Synthetic
gugucauaagacauguguaagu

SEQ ID NO: 24469 - RNA, 22 nt, Artificial Sequence
  Synthetic
ugucauaagacauguguaagua

SEQ ID NO: 24470 - RNA, 22 nt, Artificial Sequence
  Synthetic
gucauaagacauguguaaguag

SEQ ID NO: 24471 - RNA, 22 nt, Artificial Sequence
  Synthetic
ucauaagacauguguaaguagc

SEQ ID NO: 24472 - RNA, 22 nt, Artificial Sequence
  Synthetic
cauaagacauguguaaguagca

SEQ ID NO: 24473 - RNA, 22 nt, Artificial Sequence
  Synthetic
auaagacauguguaaguagcaa

SEQ ID NO: 24474 - RNA, 22 nt, Artificial Sequence
  Synthetic
uaagacauguguaaguagcaaa

SEQ ID NO: 24475 - RNA, 22 nt, Artificial Sequence
  Synthetic
aagacauguguaaguagcaaag

SEQ ID NO: 24476 - RNA, 22 nt, Artificial Sequence
  Synthetic
agacauguguaaguagcaaagc

SEQ ID NO: 24477 - RNA, 22 nt, Artificial Sequence
  Synthetic
gacauguguaaguagcaaagca

SEQ ID NO: 24478 - RNA, 22 nt, Artificial Sequence
  Synthetic
acauguguaaguagcaaagcac

SEQ ID NO: 24479 - RNA, 22 nt, Artificial Sequence
  Synthetic
cauguguaaguagcaaagcacu

SEQ ID NO: 24480 - RNA, 22 nt, Artificial Sequence
  Synthetic
auguguaaguagcaaagcacug

SEQ ID NO: 24481 - RNA, 22 nt, Artificial Sequence
  Synthetic
uguguaaguagcaaagcacugu

SEQ ID NO: 24482 - RNA, 22 nt, Artificial Sequence
  Synthetic
guguaaguagcaaagcacuguc

SEQ ID NO: 24483 - RNA, 22 nt, Artificial Sequence
  Synthetic
uguaaguagcaaagcacugucu

SEQ ID NO: 24484 - RNA, 22 nt, Artificial Sequence
  Synthetic
guaaguagcaaagcacugucug

SEQ ID NO: 24485 - RNA, 22 nt, Artificial Sequence
  Synthetic
uaaguagcaaagcacugucugg

SEQ ID NO: 24486 - RNA, 22 nt, Artificial Sequence
  Synthetic
aaguagcaaagcacugucuggu

SEQ ID NO: 24487 - RNA, 22 nt, Artificial Sequence
  Synthetic
aguagcaaagcacugucugguu

SEQ ID NO: 24488 - RNA, 22 nt, Artificial Sequence
  Synthetic
guagcaaagcacugucugguuu

SEQ ID NO: 24489 - RNA, 22 nt, Artificial Sequence
  Synthetic
uagcaaagcacugucugguuuu

SEQ ID NO: 24490 - RNA, 22 nt, Artificial Sequence
  Synthetic
agcaaagcacugucugguuuug

SEQ ID NO: 24491 - RNA, 22 nt, Artificial Sequence
  Synthetic
gcaaagcacugucugguuuuga

SEQ ID NO: 24492 - RNA, 22 nt, Artificial Sequence
  Synthetic
caaagcacugucugguuuugaa

SEQ ID NO: 24493 - RNA, 22 nt, Artificial Sequence
  Synthetic
aaagcacugucugguuuugaaa

SEQ ID NO: 24494 - RNA, 22 nt, Artificial Sequence
  Synthetic
aagcacugucugguuuugaaau

SEQ ID NO: 24495 - RNA, 22 nt, Artificial Sequence
  Synthetic
agcacugucugguuuugaaauc

SEQ ID NO: 24496 - RNA, 22 nt, Artificial Sequence
  Synthetic
gcacugucugguuuugaaaucu

SEQ ID NO: 24497 - RNA, 22 nt, Artificial Sequence
  Synthetic
cacugucugguuuugaaaucuc

SEQ ID NO: 24498 - RNA, 22 nt, Artificial Sequence
  Synthetic
acugucugguuuugaaaucuca

SEQ ID NO: 24499 - RNA, 22 nt, Artificial Sequence
  Synthetic
cugucugguuuugaaaucucaa

SEQ ID NO: 24500 - RNA, 22 nt, Artificial Sequence
  Synthetic
ugucugguuuugaaaucucaaa

SEQ ID NO: 24501 - RNA, 22 nt, Artificial Sequence
  Synthetic
gucugguuuugaaaucucaaaa

SEQ ID NO: 24502 - RNA, 22 nt, Artificial Sequence
  Synthetic
ucugguuuugaaaucucaaaac

SEQ ID NO: 24503 - RNA, 22 nt, Artificial Sequence
  Synthetic
cugguuuugaaaucucaaaacc

SEQ ID NO: 24504 - RNA, 22 nt, Artificial Sequence
  Synthetic
ugguuuugaaaucucaaaacca

SEQ ID NO: 24505 - RNA, 22 nt, Artificial Sequence
  Synthetic
gguuuugaaaucucaaaaccau

SEQ ID NO: 24506 - RNA, 22 nt, Artificial Sequence
  Synthetic
guuuugaaaucucaaaaccaug

SEQ ID NO: 24507 - RNA, 22 nt, Artificial Sequence
  Synthetic
uuuugaaaucucaaaaccauga

SEQ ID NO: 24508 - RNA, 22 nt, Artificial Sequence
  Synthetic
uuugaaaucucaaaaccaugag

SEQ ID NO: 24509 - RNA, 22 nt, Artificial Sequence
  Synthetic
uugaaaucucaaaaccaugagu

SEQ ID NO: 24510 - RNA, 22 nt, Artificial Sequence
  Synthetic
ugaaaucucaaaaccaugagua

SEQ ID NO: 24511 - RNA, 22 nt, Artificial Sequence
  Synthetic
gaaaucucaaaaccaugaguau

SEQ ID NO: 24512 - RNA, 22 nt, Artificial Sequence
  Synthetic
aaaucucaaaaccaugaguauu

SEQ ID NO: 24513 - RNA, 22 nt, Artificial Sequence
  Synthetic
aaucucaaaaccaugaguauug

SEQ ID NO: 24514 - RNA, 22 nt, Artificial Sequence
  Synthetic
aucucaaaaccaugaguauuga

SEQ ID NO: 24515 - RNA, 22 nt, Artificial Sequence
  Synthetic
ucucaaaaccaugaguauugaa

SEQ ID NO: 24516 - RNA, 22 nt, Artificial Sequence
  Synthetic
cucaaaaccaugaguauugaaa

SEQ ID NO: 24517 - RNA, 22 nt, Artificial Sequence
  Synthetic
ucaaaaccaugaguauugaaau

SEQ ID NO: 24518 - RNA, 22 nt, Artificial Sequence
  Synthetic
caaaaccaugaguauugaaaug

SEQ ID NO: 24519 - RNA, 22 nt, Artificial Sequence
  Synthetic
aaaaccaugaguauugaaaugu

SEQ ID NO: 24520 - RNA, 22 nt, Artificial Sequence
  Synthetic
aaaccaugaguauugaaauguu

SEQ ID NO: 24521 - RNA, 22 nt, Artificial Sequence
  Synthetic
aaccaugaguauugaaauguug

SEQ ID NO: 24522 - RNA, 22 nt, Artificial Sequence
  Synthetic
accaugaguauugaaauguugu

SEQ ID NO: 24523 - RNA, 22 nt, Artificial Sequence
  Synthetic
ccaugaguauugaaauguugua

SEQ ID NO: 24524 - RNA, 22 nt, Artificial Sequence
  Synthetic
caugaguauugaaauguuguau

SEQ ID NO: 24525 - RNA, 22 nt, Artificial Sequence
  Synthetic
augaguauugaaauguuguauu

SEQ ID NO: 24526 - RNA, 22 nt, Artificial Sequence
  Synthetic
ugaguauugaaauguuguauuu

SEQ ID NO: 24527 - RNA, 22 nt, Artificial Sequence
  Synthetic
gaguauugaaauguuguauuug

SEQ ID NO: 24528 - RNA, 22 nt, Artificial Sequence
  Synthetic
aguauugaaauguuguauuuga

SEQ ID NO: 24529 - RNA, 22 nt, Artificial Sequence
  Synthetic
guauugaaauguuguauuugag

SEQ ID NO: 24530 - RNA, 22 nt, Artificial Sequence
  Synthetic
uauugaaauguuguauuugagu

SEQ ID NO: 24531 - RNA, 22 nt, Artificial Sequence
  Synthetic
auugaaauguuguauuugagug

SEQ ID NO: 24532 - RNA, 22 nt, Artificial Sequence
  Synthetic
uugaaauguuguauuugagugu

SEQ ID NO: 24533 - RNA, 22 nt, Artificial Sequence
  Synthetic
ugaaauguuguauuugaguguu

SEQ ID NO: 24534 - RNA, 22 nt, Artificial Sequence
  Synthetic
gaaauguuguauuugaguguuu

SEQ ID NO: 24535 - RNA, 22 nt, Artificial Sequence
  Synthetic
aaauguuguauuugaguguuua

SEQ ID NO: 24536 - RNA, 22 nt, Artificial Sequence
  Synthetic
aauguuguauuugaguguuuaa

SEQ ID NO: 24537 - RNA, 22 nt, Artificial Sequence
  Synthetic
auguuguauuugaguguuuaau

SEQ ID NO: 24538 - RNA, 22 nt, Artificial Sequence
  Synthetic
uguuguauuugaguguuuaaug

SEQ ID NO: 24539 - RNA, 22 nt, Artificial Sequence
  Synthetic
guuguauuugaguguuuaauga

SEQ ID NO: 24540 - RNA, 22 nt, Artificial Sequence
  Synthetic
uuguauuugaguguuuaaugag

SEQ ID NO: 24541 - RNA, 22 nt, Artificial Sequence
  Synthetic
uguauuugaguguuuaaugaga

SEQ ID NO: 24542 - RNA, 22 nt, Artificial Sequence
  Synthetic
guauuugaguguuuaaugagaa

SEQ ID NO: 24543 - RNA, 22 nt, Artificial Sequence
  Synthetic
uauuugaguguuuaaugagaag

SEQ ID NO: 24544 - RNA, 22 nt, Artificial Sequence
  Synthetic
auuugaguguuuaaugagaagu

SEQ ID NO: 24545 - RNA, 22 nt, Artificial Sequence
  Synthetic
uuugaguguuuaaugagaagug

SEQ ID NO: 24546 - RNA, 22 nt, Artificial Sequence
  Synthetic
uugaguguuuaaugagaagugg

SEQ ID NO: 24547 - RNA, 22 nt, Artificial Sequence
  Synthetic
ugaguguuuaaugagaaguggu

SEQ ID NO: 24548 - RNA, 22 nt, Artificial Sequence
  Synthetic
gaguguuuaaugagaagugguu

SEQ ID NO: 24549 - RNA, 22 nt, Artificial Sequence
  Synthetic
aguguuuaaugagaagugguua

SEQ ID NO: 24550 - RNA, 22 nt, Artificial Sequence
  Synthetic
guguuuaaugagaagugguuaa

SEQ ID NO: 24551 - RNA, 22 nt, Artificial Sequence
  Synthetic
uguuuaaugagaagugguuaau

SEQ ID NO: 24552 - RNA, 22 nt, Artificial Sequence
  Synthetic
guuuaaugagaagugguuaauc

SEQ ID NO: 24553 - RNA, 22 nt, Artificial Sequence
  Synthetic
uuuaaugagaagugguuaauca

SEQ ID NO: 24554 - RNA, 22 nt, Artificial Sequence
  Synthetic
uuaaugagaagugguuaaucau

SEQ ID NO: 24555 - RNA, 22 nt, Artificial Sequence
  Synthetic
uaaugagaagugguuaaucauu

SEQ ID NO: 24556 - RNA, 22 nt, Artificial Sequence
  Synthetic
aaugagaagugguuaaucauuu

SEQ ID NO: 24557 - RNA, 22 nt, Artificial Sequence
  Synthetic
augagaagugguuaaucauuua

SEQ ID NO: 24558 - RNA, 22 nt, Artificial Sequence
  Synthetic
ugagaagugguuaaucauuuac

SEQ ID NO: 24559 - RNA, 22 nt, Artificial Sequence
  Synthetic
gagaagugguuaaucauuuacu

SEQ ID NO: 24560 - RNA, 22 nt, Artificial Sequence
  Synthetic
agaagugguuaaucauuuacuu

SEQ ID NO: 24561 - RNA, 22 nt, Artificial Sequence
  Synthetic
gaagugguuaaucauuuacuuc

SEQ ID NO: 24562 - RNA, 22 nt, Artificial Sequence
  Synthetic
aagugguuaaucauuuacuucc

SEQ ID NO: 24563 - RNA, 22 nt, Artificial Sequence
  Synthetic
agugguuaaucauuuacuuccu

SEQ ID NO: 24564 - RNA, 22 nt, Artificial Sequence
  Synthetic
gugguuaaucauuuacuuccuu

SEQ ID NO: 24565 - RNA, 22 nt, Artificial Sequence
  Synthetic
ugguuaaucauuuacuuccuuu

SEQ ID NO: 24566 - RNA, 22 nt, Artificial Sequence
  Synthetic
gguuaaucauuuacuuccuuuu

SEQ ID NO: 24567 - RNA, 22 nt, Artificial Sequence
  Synthetic
guuaaucauuuacuuccuuuuu

SEQ ID NO: 24568 - RNA, 22 nt, Artificial Sequence
  Synthetic
uuaaucauuuacuuccuuuuuu

SEQ ID NO: 24569 - RNA, 22 nt, Artificial Sequence
  Synthetic
uaaucauuuacuuccuuuuuuc

SEQ ID NO: 24570 - RNA, 22 nt, Artificial Sequence
  Synthetic
aaucauuuacuuccuuuuuuca

SEQ ID NO: 24571 - RNA, 22 nt, Artificial Sequence
  Synthetic
aucauuuacuuccuuuuuucag

SEQ ID NO: 24572 - RNA, 22 nt, Artificial Sequence
  Synthetic
ucauuuacuuccuuuuuucagg

SEQ ID NO: 24573 - RNA, 22 nt, Artificial Sequence
  Synthetic
cauuuacuuccuuuuuucagga

SEQ ID NO: 24574 - RNA, 22 nt, Artificial Sequence
  Synthetic
auuuacuuccuuuuuucaggaa

SEQ ID NO: 24575 - RNA, 22 nt, Artificial Sequence
  Synthetic
uuuacuuccuuuuuucaggaaa

SEQ ID NO: 24576 - RNA, 22 nt, Artificial Sequence
  Synthetic
uuacuuccuuuuuucaggaaag

SEQ ID NO: 24577 - RNA, 22 nt, Artificial Sequence
  Synthetic
uacuuccuuuuuucaggaaagg

SEQ ID NO: 24578 - RNA, 22 nt, Artificial Sequence
  Synthetic
acuuccuuuuuucaggaaaggg

SEQ ID NO: 24579 - RNA, 22 nt, Artificial Sequence
  Synthetic
cuuccuuuuuucaggaaagggg

SEQ ID NO: 24580 - RNA, 22 nt, Artificial Sequence
  Synthetic
uuccuuuuuucaggaaagggga

SEQ ID NO: 24581 - RNA, 22 nt, Artificial Sequence
  Synthetic
uccuuuuuucaggaaaggggaa

SEQ ID NO: 24582 - RNA, 22 nt, Artificial Sequence
  Synthetic
ccuuuuuucaggaaaggggaac

SEQ ID NO: 24583 - RNA, 22 nt, Artificial Sequence
  Synthetic
cuuuuuucaggaaaggggaacu

SEQ ID NO: 24584 - RNA, 22 nt, Artificial Sequence
  Synthetic
uuuuuucaggaaaggggaacuc

SEQ ID NO: 24585 - RNA, 22 nt, Artificial Sequence
  Synthetic
uuuuucaggaaaggggaacucu

SEQ ID NO: 24586 - RNA, 22 nt, Artificial Sequence
  Synthetic
uuuucaggaaaggggaacucuc

SEQ ID NO: 24587 - RNA, 22 nt, Artificial Sequence
  Synthetic
uuucaggaaaggggaacucucu

SEQ ID NO: 24588 - RNA, 22 nt, Artificial Sequence
  Synthetic
uucaggaaaggggaacucucug

SEQ ID NO: 24589 - RNA, 22 nt, Artificial Sequence
  Synthetic
ucaggaaaggggaacucucugu

SEQ ID NO: 24590 - RNA, 22 nt, Artificial Sequence
  Synthetic
caggaaaggggaacucucuguc

SEQ ID NO: 24591 - RNA, 22 nt, Artificial Sequence
  Synthetic
aggaaaggggaacucucugucu

SEQ ID NO: 24592 - RNA, 22 nt, Artificial Sequence
  Synthetic
ggaaaggggaacucucugucuu

SEQ ID NO: 24593 - RNA, 22 nt, Artificial Sequence
  Synthetic
gaaaggggaacucucugucuuc

SEQ ID NO: 24594 - RNA, 22 nt, Artificial Sequence
  Synthetic
aaaggggaacucucugucuucu

SEQ ID NO: 24595 - RNA, 22 nt, Artificial Sequence
  Synthetic
aaggggaacucucugucuucua

SEQ ID NO: 24596 - RNA, 22 nt, Artificial Sequence
  Synthetic
aggggaacucucugucuucuag

SEQ ID NO: 24597 - RNA, 22 nt, Artificial Sequence
  Synthetic
ggggaacucucugucuucuaga

SEQ ID NO: 24598 - RNA, 22 nt, Artificial Sequence
  Synthetic
gggaacucucugucuucuagac

SEQ ID NO: 24599 - RNA, 22 nt, Artificial Sequence
  Synthetic
ggaacucucugucuucuagaca

SEQ ID NO: 24600 - RNA, 22 nt, Artificial Sequence
  Synthetic
gaacucucugucuucuagacaa

SEQ ID NO: 24601 - RNA, 22 nt, Artificial Sequence
  Synthetic
aacucucugucuucuagacaag

SEQ ID NO: 24602 - RNA, 22 nt, Artificial Sequence
  Synthetic
acucucugucuucuagacaagg

SEQ ID NO: 24603 - RNA, 22 nt, Artificial Sequence
  Synthetic
cucucugucuucuagacaaggu

SEQ ID NO: 24604 - RNA, 22 nt, Artificial Sequence
  Synthetic
ucucugucuucuagacaagguc

SEQ ID NO: 24605 - RNA, 22 nt, Artificial Sequence
  Synthetic
cucugucuucuagacaagguca

SEQ ID NO: 24606 - RNA, 22 nt, Artificial Sequence
  Synthetic
ucugucuucuagacaaggucac

SEQ ID NO: 24607 - RNA, 22 nt, Artificial Sequence
  Synthetic
cugucuucuagacaaggucacc

SEQ ID NO: 24608 - RNA, 22 nt, Artificial Sequence
  Synthetic
ugucuucuagacaaggucacca

SEQ ID NO: 24609 - RNA, 22 nt, Artificial Sequence
  Synthetic
gucuucuagacaaggucaccaa

SEQ ID NO: 24610 - RNA, 22 nt, Artificial Sequence
  Synthetic
ucuucuagacaaggucaccaac

SEQ ID NO: 24611 - RNA, 22 nt, Artificial Sequence
  Synthetic
cuucuagacaaggucaccaaca

SEQ ID NO: 24612 - RNA, 22 nt, Artificial Sequence
  Synthetic
uucuagacaaggucaccaacau

SEQ ID NO: 24613 - RNA, 22 nt, Artificial Sequence
  Synthetic
ucuagacaaggucaccaacauc

SEQ ID NO: 24614 - RNA, 22 nt, Artificial Sequence
  Synthetic
cuagacaaggucaccaacaucu

SEQ ID NO: 24615 - RNA, 22 nt, Artificial Sequence
  Synthetic
uagacaaggucaccaacaucua

SEQ ID NO: 24616 - RNA, 22 nt, Artificial Sequence
  Synthetic
agacaaggucaccaacaucuaa

SEQ ID NO: 24617 - RNA, 22 nt, Artificial Sequence
  Synthetic
gacaaggucaccaacaucuaac

SEQ ID NO: 24618 - RNA, 22 nt, Artificial Sequence
  Synthetic
acaaggucaccaacaucuaacc

SEQ ID NO: 24619 - RNA, 22 nt, Artificial Sequence
  Synthetic
caaggucaccaacaucuaaccu

SEQ ID NO: 24620 - RNA, 22 nt, Artificial Sequence
  Synthetic
aaggucaccaacaucuaaccuu

SEQ ID NO: 24621 - RNA, 22 nt, Artificial Sequence
  Synthetic
aggucaccaacaucuaaccuug

SEQ ID NO: 24622 - RNA, 22 nt, Artificial Sequence
  Synthetic
ggucaccaacaucuaaccuugg

SEQ ID NO: 24623 - RNA, 22 nt, Artificial Sequence
  Synthetic
gucaccaacaucuaaccuuggg

SEQ ID NO: 24624 - RNA, 22 nt, Artificial Sequence
  Synthetic
ucaccaacaucuaaccuugggc

SEQ ID NO: 24625 - RNA, 22 nt, Artificial Sequence
  Synthetic
caccaacaucuaaccuugggcu

SEQ ID NO: 24626 - RNA, 22 nt, Artificial Sequence
  Synthetic
accaacaucuaaccuugggcug

SEQ ID NO: 24627 - RNA, 22 nt, Artificial Sequence
  Synthetic
ccaacaucuaaccuugggcugu

SEQ ID NO: 24628 - RNA, 22 nt, Artificial Sequence
  Synthetic
caacaucuaaccuugggcugug

SEQ ID NO: 24629 - RNA, 22 nt, Artificial Sequence
  Synthetic
aacaucuaaccuugggcugugu

SEQ ID NO: 24630 - RNA, 22 nt, Artificial Sequence
  Synthetic
acaucuaaccuugggcuguguc

SEQ ID NO: 24631 - RNA, 22 nt, Artificial Sequence
  Synthetic
caucuaaccuugggcugugucu

SEQ ID NO: 24632 - RNA, 22 nt, Artificial Sequence
  Synthetic
aucuaaccuugggcugugucuu

SEQ ID NO: 24633 - RNA, 22 nt, Artificial Sequence
  Synthetic
ucuaaccuugggcugugucuuc

SEQ ID NO: 24634 - RNA, 22 nt, Artificial Sequence
  Synthetic
cuaaccuugggcugugucuucc

SEQ ID NO: 24635 - RNA, 22 nt, Artificial Sequence
  Synthetic
uaaccuugggcugugucuuccc

SEQ ID NO: 24636 - RNA, 22 nt, Artificial Sequence
  Synthetic
aaccuugggcugugucuuccca

SEQ ID NO: 24637 - RNA, 22 nt, Artificial Sequence
  Synthetic
accuugggcugugucuucccau

SEQ ID NO: 24638 - RNA, 22 nt, Artificial Sequence
  Synthetic
ccuugggcugugucuucccaua

SEQ ID NO: 24639 - RNA, 22 nt, Artificial Sequence
  Synthetic
cuugggcugugucuucccauac

SEQ ID NO: 24640 - RNA, 22 nt, Artificial Sequence
  Synthetic
uugggcugugucuucccauaca

SEQ ID NO: 24641 - RNA, 22 nt, Artificial Sequence
  Synthetic
ugggcugugucuucccauacaa

SEQ ID NO: 24642 - RNA, 22 nt, Artificial Sequence
  Synthetic
gggcugugucuucccauacaac

SEQ ID NO: 24643 - RNA, 22 nt, Artificial Sequence
  Synthetic
ggcugugucuucccauacaacc

SEQ ID NO: 24644 - RNA, 22 nt, Artificial Sequence
  Synthetic
gcugugucuucccauacaaccc

SEQ ID NO: 24645 - RNA, 22 nt, Artificial Sequence
  Synthetic
cugugucuucccauacaacccu

SEQ ID NO: 24646 - RNA, 22 nt, Artificial Sequence
  Synthetic
ugugucuucccauacaacccua

SEQ ID NO: 24647 - RNA, 22 nt, Artificial Sequence
  Synthetic
gugucuucccauacaacccuau

SEQ ID NO: 24648 - RNA, 22 nt, Artificial Sequence
  Synthetic
ugucuucccauacaacccuauu

SEQ ID NO: 24649 - RNA, 22 nt, Artificial Sequence
  Synthetic
gucuucccauacaacccuauuu

SEQ ID NO: 24650 - RNA, 22 nt, Artificial Sequence
  Synthetic
ucuucccauacaacccuauuua

SEQ ID NO: 24651 - RNA, 22 nt, Artificial Sequence
  Synthetic
cuucccauacaacccuauuuac

SEQ ID NO: 24652 - RNA, 22 nt, Artificial Sequence
  Synthetic
uucccauacaacccuauuuacg

SEQ ID NO: 24653 - RNA, 22 nt, Artificial Sequence
  Synthetic
ucccauacaacccuauuuacgu

SEQ ID NO: 24654 - RNA, 22 nt, Artificial Sequence
  Synthetic
cccauacaacccuauuuacguc

SEQ ID NO: 24655 - RNA, 22 nt, Artificial Sequence
  Synthetic
ccauacaacccuauuuacguca

SEQ ID NO: 24656 - RNA, 22 nt, Artificial Sequence
  Synthetic
cauacaacccuauuuacgucaa

SEQ ID NO: 24657 - RNA, 22 nt, Artificial Sequence
  Synthetic
auacaacccuauuuacgucaac

SEQ ID NO: 24658 - RNA, 22 nt, Artificial Sequence
  Synthetic
uacaacccuauuuacgucaacc

SEQ ID NO: 24659 - RNA, 22 nt, Artificial Sequence
  Synthetic
acaacccuauuuacgucaaccu

SEQ ID NO: 24660 - RNA, 22 nt, Artificial Sequence
  Synthetic
caacccuauuuacgucaaccuu

SEQ ID NO: 24661 - RNA, 22 nt, Artificial Sequence
  Synthetic
aacccuauuuacgucaaccuuc

SEQ ID NO: 24662 - RNA, 22 nt, Artificial Sequence
  Synthetic
acccuauuuacgucaaccuucc

SEQ ID NO: 24663 - RNA, 22 nt, Artificial Sequence
  Synthetic
cccuauuuacgucaaccuucca

SEQ ID NO: 24664 - RNA, 22 nt, Artificial Sequence
  Synthetic
ccuauuuacgucaaccuuccaa

SEQ ID NO: 24665 - RNA, 22 nt, Artificial Sequence
  Synthetic
cuauuuacgucaaccuuccaau

SEQ ID NO: 24666 - RNA, 22 nt, Artificial Sequence
  Synthetic
uauuuacgucaaccuuccaaug

SEQ ID NO: 24667 - RNA, 22 nt, Artificial Sequence
  Synthetic
auuuacgucaaccuuccaauga

SEQ ID NO: 24668 - RNA, 22 nt, Artificial Sequence
  Synthetic
uuuacgucaaccuuccaaugac

SEQ ID NO: 24669 - RNA, 22 nt, Artificial Sequence
  Synthetic
uuacgucaaccuuccaaugacu

SEQ ID NO: 24670 - RNA, 22 nt, Artificial Sequence
  Synthetic
uacgucaaccuuccaaugacug

SEQ ID NO: 24671 - RNA, 22 nt, Artificial Sequence
  Synthetic
acgucaaccuuccaaugacugc

SEQ ID NO: 24672 - RNA, 22 nt, Artificial Sequence
  Synthetic
cgucaaccuuccaaugacugcu

SEQ ID NO: 24673 - RNA, 22 nt, Artificial Sequence
  Synthetic
gucaaccuuccaaugacugcuc

SEQ ID NO: 24674 - RNA, 22 nt, Artificial Sequence
  Synthetic
ucaaccuuccaaugacugcucc

SEQ ID NO: 24675 - RNA, 22 nt, Artificial Sequence
  Synthetic
caaccuuccaaugacugcuccu

SEQ ID NO: 24676 - RNA, 22 nt, Artificial Sequence
  Synthetic
aaccuuccaaugacugcuccug

SEQ ID NO: 24677 - RNA, 22 nt, Artificial Sequence
  Synthetic
accuuccaaugacugcuccugg

SEQ ID NO: 24678 - RNA, 22 nt, Artificial Sequence
  Synthetic
ccuuccaaugacugcuccuggg

SEQ ID NO: 24679 - RNA, 22 nt, Artificial Sequence
  Synthetic
cuuccaaugacugcuccugggg

SEQ ID NO: 24680 - RNA, 22 nt, Artificial Sequence
  Synthetic
uuccaaugacugcuccugggga

SEQ ID NO: 24681 - RNA, 22 nt, Artificial Sequence
  Synthetic
uccaaugacugcuccuggggac

SEQ ID NO: 24682 - RNA, 22 nt, Artificial Sequence
  Synthetic
ccaaugacugcuccuggggaca

SEQ ID NO: 24683 - RNA, 22 nt, Artificial Sequence
  Synthetic
caaugacugcuccuggggacag

SEQ ID NO: 24684 - RNA, 22 nt, Artificial Sequence
  Synthetic
aaugacugcuccuggggacaga

SEQ ID NO: 24685 - RNA, 22 nt, Artificial Sequence
  Synthetic
augacugcuccuggggacagag

SEQ ID NO: 24686 - RNA, 22 nt, Artificial Sequence
  Synthetic
ugacugcuccuggggacagagu

SEQ ID NO: 24687 - RNA, 22 nt, Artificial Sequence
  Synthetic
gacugcuccuggggacagagug

SEQ ID NO: 24688 - RNA, 22 nt, Artificial Sequence
  Synthetic
acugcuccuggggacagagugg

SEQ ID NO: 24689 - RNA, 22 nt, Artificial Sequence
  Synthetic
cugcuccuggggacagaguggu

SEQ ID NO: 24690 - RNA, 22 nt, Artificial Sequence
  Synthetic
ugcuccuggggacagaguggug

SEQ ID NO: 24691 - RNA, 22 nt, Artificial Sequence
  Synthetic
gcuccuggggacagagugguga

SEQ ID NO: 24692 - RNA, 22 nt, Artificial Sequence
  Synthetic
cuccuggggacagaguggugaa

SEQ ID NO: 24693 - RNA, 22 nt, Artificial Sequence
  Synthetic
uccuggggacagaguggugaaa

SEQ ID NO: 24694 - RNA, 22 nt, Artificial Sequence
  Synthetic
ccuggggacagaguggugaaau

SEQ ID NO: 24695 - RNA, 22 nt, Artificial Sequence
  Synthetic
cuggggacagaguggugaaaug

SEQ ID NO: 24696 - RNA, 22 nt, Artificial Sequence
  Synthetic
uggggacagaguggugaaaugg

SEQ ID NO: 24697 - RNA, 22 nt, Artificial Sequence
  Synthetic
ggggacagaguggugaaauggu

SEQ ID NO: 24698 - RNA, 22 nt, Artificial Sequence
  Synthetic
gggacagaguggugaaauggua

SEQ ID NO: 24699 - RNA, 22 nt, Artificial Sequence
  Synthetic
ggacagaguggugaaaugguac

SEQ ID NO: 24700 - RNA, 22 nt, Artificial Sequence
  Synthetic
gacagaguggugaaaugguacc

SEQ ID NO: 24701 - RNA, 22 nt, Artificial Sequence
  Synthetic
acagaguggugaaaugguacca

SEQ ID NO: 24702 - RNA, 22 nt, Artificial Sequence
  Synthetic
cagaguggugaaaugguaccau

SEQ ID NO: 24703 - RNA, 22 nt, Artificial Sequence
  Synthetic
agaguggugaaaugguaccaug

SEQ ID NO: 24704 - RNA, 22 nt, Artificial Sequence
  Synthetic
gaguggugaaaugguaccaugg

SEQ ID NO: 24705 - RNA, 22 nt, Artificial Sequence
  Synthetic
aguggugaaaugguaccauggg

SEQ ID NO: 24706 - RNA, 22 nt, Artificial Sequence
  Synthetic
guggugaaaugguaccaugggc

SEQ ID NO: 24707 - RNA, 22 nt, Artificial Sequence
  Synthetic
uggugaaaugguaccaugggca

SEQ ID NO: 24708 - RNA, 22 nt, Artificial Sequence
  Synthetic
ggugaaaugguaccaugggcau

SEQ ID NO: 24709 - RNA, 22 nt, Artificial Sequence
  Synthetic
gugaaaugguaccaugggcauu

SEQ ID NO: 24710 - RNA, 22 nt, Artificial Sequence
  Synthetic
ugaaaugguaccaugggcauuc

SEQ ID NO: 24711 - RNA, 22 nt, Artificial Sequence
  Synthetic
gaaaugguaccaugggcauucu

SEQ ID NO: 24712 - RNA, 22 nt, Artificial Sequence
  Synthetic
aaaugguaccaugggcauucug

SEQ ID NO: 24713 - RNA, 22 nt, Artificial Sequence
  Synthetic
aaugguaccaugggcauucuga

SEQ ID NO: 24714 - RNA, 22 nt, Artificial Sequence
  Synthetic
augguaccaugggcauucugac

SEQ ID NO: 24715 - RNA, 22 nt, Artificial Sequence
  Synthetic
ugguaccaugggcauucugaca

SEQ ID NO: 24716 - RNA, 22 nt, Artificial Sequence
  Synthetic
gguaccaugggcauucugacaa

SEQ ID NO: 24717 - RNA, 22 nt, Artificial Sequence
  Synthetic
guaccaugggcauucugacaac

SEQ ID NO: 24718 - RNA, 22 nt, Artificial Sequence
  Synthetic
uaccaugggcauucugacaacc

SEQ ID NO: 24719 - RNA, 22 nt, Artificial Sequence
  Synthetic
accaugggcauucugacaacca

SEQ ID NO: 24720 - RNA, 22 nt, Artificial Sequence
  Synthetic
ccaugggcauucugacaaccaa

SEQ ID NO: 24721 - RNA, 22 nt, Artificial Sequence
  Synthetic
caugggcauucugacaaccaac

SEQ ID NO: 24722 - RNA, 22 nt, Artificial Sequence
  Synthetic
augggcauucugacaaccaacu

SEQ ID NO: 24723 - RNA, 22 nt, Artificial Sequence
  Synthetic
ugggcauucugacaaccaacuc

SEQ ID NO: 24724 - RNA, 22 nt, Artificial Sequence
  Synthetic
gggcauucugacaaccaacuca

SEQ ID NO: 24725 - RNA, 22 nt, Artificial Sequence
  Synthetic
ggcauucugacaaccaacucag

SEQ ID NO: 24726 - RNA, 22 nt, Artificial Sequence
  Synthetic
gcauucugacaaccaacucaga

SEQ ID NO: 24727 - RNA, 22 nt, Artificial Sequence
  Synthetic
cauucugacaaccaacucagag

SEQ ID NO: 24728 - RNA, 22 nt, Artificial Sequence
  Synthetic
auucugacaaccaacucagaga

SEQ ID NO: 24729 - RNA, 22 nt, Artificial Sequence
  Synthetic
uucugacaaccaacucagagaa

SEQ ID NO: 24730 - RNA, 22 nt, Artificial Sequence
  Synthetic
ucugacaaccaacucagagaag

SEQ ID NO: 24731 - RNA, 22 nt, Artificial Sequence
  Synthetic
cugacaaccaacucagagaaga

SEQ ID NO: 24732 - RNA, 22 nt, Artificial Sequence
  Synthetic
ugacaaccaacucagagaagag

SEQ ID NO: 24733 - RNA, 22 nt, Artificial Sequence
  Synthetic
gacaaccaacucagagaagaga

SEQ ID NO: 24734 - RNA, 22 nt, Artificial Sequence
  Synthetic
acaaccaacucagagaagagau

SEQ ID NO: 24735 - RNA, 22 nt, Artificial Sequence
  Synthetic
caaccaacucagagaagagaug

SEQ ID NO: 24736 - RNA, 22 nt, Artificial Sequence
  Synthetic
aaccaacucagagaagagaugc

SEQ ID NO: 24737 - RNA, 22 nt, Artificial Sequence
  Synthetic
accaacucagagaagagaugcu

SEQ ID NO: 24738 - RNA, 22 nt, Artificial Sequence
  Synthetic
ccaacucagagaagagaugcua

SEQ ID NO: 24739 - RNA, 22 nt, Artificial Sequence
  Synthetic
caacucagagaagagaugcuac

SEQ ID NO: 24740 - RNA, 22 nt, Artificial Sequence
  Synthetic
aacucagagaagagaugcuaca

SEQ ID NO: 24741 - RNA, 22 nt, Artificial Sequence
  Synthetic
acucagagaagagaugcuacau

SEQ ID NO: 24742 - RNA, 22 nt, Artificial Sequence
  Synthetic
cucagagaagagaugcuacauc

SEQ ID NO: 24743 - RNA, 22 nt, Artificial Sequence
  Synthetic
ucagagaagagaugcuacaucc

SEQ ID NO: 24744 - RNA, 22 nt, Artificial Sequence
  Synthetic
cagagaagagaugcuacauccu

SEQ ID NO: 24745 - RNA, 22 nt, Artificial Sequence
  Synthetic
agagaagagaugcuacauccuu

SEQ ID NO: 24746 - RNA, 22 nt, Artificial Sequence
  Synthetic
gagaagagaugcuacauccuuu

SEQ ID NO: 24747 - RNA, 22 nt, Artificial Sequence
  Synthetic
agaagagaugcuacauccuuug

SEQ ID NO: 24748 - RNA, 22 nt, Artificial Sequence
  Synthetic
gaagagaugcuacauccuuugc

SEQ ID NO: 24749 - RNA, 22 nt, Artificial Sequence
  Synthetic
aagagaugcuacauccuuugcc

SEQ ID NO: 24750 - RNA, 22 nt, Artificial Sequence
  Synthetic
agagaugcuacauccuuugccc

SEQ ID NO: 24751 - RNA, 22 nt, Artificial Sequence
  Synthetic
gagaugcuacauccuuugcccu

SEQ ID NO: 24752 - RNA, 22 nt, Artificial Sequence
  Synthetic
agaugcuacauccuuugcccuc

SEQ ID NO: 24753 - RNA, 22 nt, Artificial Sequence
  Synthetic
gaugcuacauccuuugcccucu

SEQ ID NO: 24754 - RNA, 22 nt, Artificial Sequence
  Synthetic
augcuacauccuuugcccucuc

SEQ ID NO: 24755 - RNA, 22 nt, Artificial Sequence
  Synthetic
ugcuacauccuuugcccucuca

SEQ ID NO: 24756 - RNA, 22 nt, Artificial Sequence
  Synthetic
gcuacauccuuugcccucucag

SEQ ID NO: 24757 - RNA, 22 nt, Artificial Sequence
  Synthetic
cuacauccuuugcccucucaga

SEQ ID NO: 24758 - RNA, 22 nt, Artificial Sequence
  Synthetic
uacauccuuugcccucucagag

SEQ ID NO: 24759 - RNA, 22 nt, Artificial Sequence
  Synthetic
acauccuuugcccucucagagg

SEQ ID NO: 24760 - RNA, 22 nt, Artificial Sequence
  Synthetic
cauccuuugcccucucagaggg

SEQ ID NO: 24761 - RNA, 22 nt, Artificial Sequence
  Synthetic
auccuuugcccucucagagggu

SEQ ID NO: 24762 - RNA, 22 nt, Artificial Sequence
  Synthetic
uccuuugcccucucagaggguc

SEQ ID NO: 24763 - RNA, 22 nt, Artificial Sequence
  Synthetic
ccuuugcccucucagaggguca

SEQ ID NO: 24764 - RNA, 22 nt, Artificial Sequence
  Synthetic
cuuugcccucucagagggucag

SEQ ID NO: 24765 - RNA, 22 nt, Artificial Sequence
  Synthetic
uuugcccucucagagggucaga

SEQ ID NO: 24766 - RNA, 22 nt, Artificial Sequence
  Synthetic
uugcccucucagagggucagaa

SEQ ID NO: 24767 - RNA, 22 nt, Artificial Sequence
  Synthetic
ugcccucucagagggucagaau

SEQ ID NO: 24768 - RNA, 22 nt, Artificial Sequence
  Synthetic
gcccucucagagggucagaauu

SEQ ID NO: 24769 - RNA, 22 nt, Artificial Sequence
  Synthetic
cccucucagagggucagaauug

SEQ ID NO: 24770 - RNA, 22 nt, Artificial Sequence
  Synthetic
ccucucagagggucagaauuga

SEQ ID NO: 24771 - RNA, 22 nt, Artificial Sequence
  Synthetic
cucucagagggucagaauugag

SEQ ID NO: 24772 - RNA, 22 nt, Artificial Sequence
  Synthetic
ucucagagggucagaauugaga

SEQ ID NO: 24773 - RNA, 22 nt, Artificial Sequence
  Synthetic
cucagagggucagaauugagaa

SEQ ID NO: 24774 - RNA, 22 nt, Artificial Sequence
  Synthetic
ucagagggucagaauugagaac

SEQ ID NO: 24775 - RNA, 22 nt, Artificial Sequence
  Synthetic
cagagggucagaauugagaaca

SEQ ID NO: 24776 - RNA, 22 nt, Artificial Sequence
  Synthetic
agagggucagaauugagaacau

SEQ ID NO: 24777 - RNA, 22 nt, Artificial Sequence
  Synthetic
gagggucagaauugagaacauc

SEQ ID NO: 24778 - RNA, 22 nt, Artificial Sequence
  Synthetic
agggucagaauugagaacaucu

SEQ ID NO: 24779 - RNA, 22 nt, Artificial Sequence
  Synthetic
gggucagaauugagaacaucuc

SEQ ID NO: 24780 - RNA, 22 nt, Artificial Sequence
  Synthetic
ggucagaauugagaacaucucc

SEQ ID NO: 24781 - RNA, 22 nt, Artificial Sequence
  Synthetic
gucagaauugagaacaucuccc

SEQ ID NO: 24782 - RNA, 22 nt, Artificial Sequence
  Synthetic
ucagaauugagaacaucuccca

SEQ ID NO: 24783 - RNA, 22 nt, Artificial Sequence
  Synthetic
cagaauugagaacaucucccag

SEQ ID NO: 24784 - RNA, 22 nt, Artificial Sequence
  Synthetic
agaauugagaacaucucccagu

SEQ ID NO: 24785 - RNA, 22 nt, Artificial Sequence
  Synthetic
gaauugagaacaucucccagua

SEQ ID NO: 24786 - RNA, 22 nt, Artificial Sequence
  Synthetic
aauugagaacaucucccaguac

SEQ ID NO: 24787 - RNA, 22 nt, Artificial Sequence
  Synthetic
auugagaacaucucccaguacc

SEQ ID NO: 24788 - RNA, 22 nt, Artificial Sequence
  Synthetic
uugagaacaucucccaguaccu

SEQ ID NO: 24789 - RNA, 22 nt, Artificial Sequence
  Synthetic
ugagaacaucucccaguaccua

SEQ ID NO: 24790 - RNA, 22 nt, Artificial Sequence
  Synthetic
gagaacaucucccaguaccuag

SEQ ID NO: 24791 - RNA, 22 nt, Artificial Sequence
  Synthetic
agaacaucucccaguaccuaga

SEQ ID NO: 24792 - RNA, 22 nt, Artificial Sequence
  Synthetic
gaacaucucccaguaccuagac

SEQ ID NO: 24793 - RNA, 22 nt, Artificial Sequence
  Synthetic
aacaucucccaguaccuagaca

SEQ ID NO: 24794 - RNA, 22 nt, Artificial Sequence
  Synthetic
acaucucccaguaccuagacau

SEQ ID NO: 24795 - RNA, 22 nt, Artificial Sequence
  Synthetic
caucucccaguaccuagacaua

SEQ ID NO: 24796 - RNA, 22 nt, Artificial Sequence
  Synthetic
aucucccaguaccuagacauac

SEQ ID NO: 24797 - RNA, 22 nt, Artificial Sequence
  Synthetic
ucucccaguaccuagacauacu

SEQ ID NO: 24798 - RNA, 22 nt, Artificial Sequence
  Synthetic
cucccaguaccuagacauacuc

SEQ ID NO: 24799 - RNA, 22 nt, Artificial Sequence
  Synthetic
ucccaguaccuagacauacucu

SEQ ID NO: 24800 - RNA, 22 nt, Artificial Sequence
  Synthetic
cccaguaccuagacauacucug

SEQ ID NO: 24801 - RNA, 22 nt, Artificial Sequence
  Synthetic
ccaguaccuagacauacucugg

SEQ ID NO: 24802 - RNA, 22 nt, Artificial Sequence
  Synthetic
caguaccuagacauacucuggu

SEQ ID NO: 24803 - RNA, 22 nt, Artificial Sequence
  Synthetic
aguaccuagacauacucuggua

SEQ ID NO: 24804 - RNA, 22 nt, Artificial Sequence
  Synthetic
guaccuagacauacucugguac

SEQ ID NO: 24805 - RNA, 22 nt, Artificial Sequence
  Synthetic
uaccuagacauacucugguaca

SEQ ID NO: 24806 - RNA, 22 nt, Artificial Sequence
  Synthetic
accuagacauacucugguacau

SEQ ID NO: 24807 - RNA, 22 nt, Artificial Sequence
  Synthetic
ccuagacauacucugguacaua

SEQ ID NO: 24808 - RNA, 22 nt, Artificial Sequence
  Synthetic
cuagacauacucugguacauau

SEQ ID NO: 24809 - RNA, 22 nt, Artificial Sequence
  Synthetic
uagacauacucugguacauaug

SEQ ID NO: 24810 - RNA, 22 nt, Artificial Sequence
  Synthetic
agacauacucugguacauauga

SEQ ID NO: 24811 - RNA, 22 nt, Artificial Sequence
  Synthetic
gacauacucugguacauaugaa

SEQ ID NO: 24812 - RNA, 22 nt, Artificial Sequence
  Synthetic
acauacucugguacauaugaag

SEQ ID NO: 24813 - RNA, 22 nt, Artificial Sequence
  Synthetic
cauacucugguacauaugaagu

SEQ ID NO: 24814 - RNA, 22 nt, Artificial Sequence
  Synthetic
auacucugguacauaugaaguu

SEQ ID NO: 24815 - RNA, 22 nt, Artificial Sequence
  Synthetic
uacucugguacauaugaaguuu

SEQ ID NO: 24816 - RNA, 22 nt, Artificial Sequence
  Synthetic
acucugguacauaugaaguuug

SEQ ID NO: 24817 - RNA, 22 nt, Artificial Sequence
  Synthetic
cucugguacauaugaaguuugu

SEQ ID NO: 24818 - RNA, 22 nt, Artificial Sequence
  Synthetic
ucugguacauaugaaguuugug

SEQ ID NO: 24819 - RNA, 22 nt, Artificial Sequence
  Synthetic
cugguacauaugaaguuuguga

SEQ ID NO: 24820 - RNA, 22 nt, Artificial Sequence
  Synthetic
ugguacauaugaaguuugugau

SEQ ID NO: 24821 - RNA, 22 nt, Artificial Sequence
  Synthetic
gguacauaugaaguuugugauc

SEQ ID NO: 24822 - RNA, 22 nt, Artificial Sequence
  Synthetic
guacauaugaaguuugugaucu

SEQ ID NO: 24823 - RNA, 22 nt, Artificial Sequence
  Synthetic
uacauaugaaguuugugaucua

SEQ ID NO: 24824 - RNA, 22 nt, Artificial Sequence
  Synthetic
acauaugaaguuugugaucuau

SEQ ID NO: 24825 - RNA, 22 nt, Artificial Sequence
  Synthetic
cauaugaaguuugugaucuaug

SEQ ID NO: 24826 - RNA, 22 nt, Artificial Sequence
  Synthetic
auaugaaguuugugaucuauga

SEQ ID NO: 24827 - RNA, 22 nt, Artificial Sequence
  Synthetic
uaugaaguuugugaucuaugaa

SEQ ID NO: 24828 - RNA, 22 nt, Artificial Sequence
  Synthetic
augaaguuugugaucuaugaau

SEQ ID NO: 24829 - RNA, 22 nt, Artificial Sequence
  Synthetic
ugaaguuugugaucuaugaauu

SEQ ID NO: 24830 - RNA, 22 nt, Artificial Sequence
  Synthetic
gaaguuugugaucuaugaauuu

SEQ ID NO: 24831 - RNA, 22 nt, Artificial Sequence
  Synthetic
aaguuugugaucuaugaauuug

SEQ ID NO: 24832 - RNA, 22 nt, Artificial Sequence
  Synthetic
aguuugugaucuaugaauuugg

SEQ ID NO: 24833 - RNA, 22 nt, Artificial Sequence
  Synthetic
guuugugaucuaugaauuugga

SEQ ID NO: 24834 - RNA, 22 nt, Artificial Sequence
  Synthetic
uuugugaucuaugaauuuggac

SEQ ID NO: 24835 - RNA, 22 nt, Artificial Sequence
  Synthetic
uugugaucuaugaauuuggacc

SEQ ID NO: 24836 - RNA, 22 nt, Artificial Sequence
  Synthetic
ugugaucuaugaauuuggacca

SEQ ID NO: 24837 - RNA, 22 nt, Artificial Sequence
  Synthetic
gugaucuaugaauuuggaccac

SEQ ID NO: 24838 - RNA, 22 nt, Artificial Sequence
  Synthetic
ugaucuaugaauuuggaccaca

SEQ ID NO: 24839 - RNA, 22 nt, Artificial Sequence
  Synthetic
gaucuaugaauuuggaccacag

SEQ ID NO: 24840 - RNA, 22 nt, Artificial Sequence
  Synthetic
aucuaugaauuuggaccacaga

SEQ ID NO: 24841 - RNA, 22 nt, Artificial Sequence
  Synthetic
ucuaugaauuuggaccacagaa

SEQ ID NO: 24842 - RNA, 22 nt, Artificial Sequence
  Synthetic
cuaugaauuuggaccacagaau

SEQ ID NO: 24843 - RNA, 22 nt, Artificial Sequence
  Synthetic
uaugaauuuggaccacagaauc

SEQ ID NO: 24844 - RNA, 22 nt, Artificial Sequence
  Synthetic
augaauuuggaccacagaaucc

SEQ ID NO: 24845 - RNA, 22 nt, Artificial Sequence
  Synthetic
ugaauuuggaccacagaaucca

SEQ ID NO: 24846 - RNA, 22 nt, Artificial Sequence
  Synthetic
gaauuuggaccacagaauccac

SEQ ID NO: 24847 - RNA, 22 nt, Artificial Sequence
  Synthetic
aauuuggaccacagaauccacc

SEQ ID NO: 24848 - RNA, 22 nt, Artificial Sequence
  Synthetic
auuuggaccacagaauccacca

SEQ ID NO: 24849 - RNA, 22 nt, Artificial Sequence
  Synthetic
uuuggaccacagaauccaccac

SEQ ID NO: 24850 - RNA, 22 nt, Artificial Sequence
  Synthetic
uuggaccacagaauccaccacu

SEQ ID NO: 24851 - RNA, 22 nt, Artificial Sequence
  Synthetic
uggaccacagaauccaccacua

SEQ ID NO: 24852 - RNA, 22 nt, Artificial Sequence
  Synthetic
ggaccacagaauccaccacuac

SEQ ID NO: 24853 - RNA, 22 nt, Artificial Sequence
  Synthetic
gaccacagaauccaccacuaca

SEQ ID NO: 24854 - RNA, 22 nt, Artificial Sequence
  Synthetic
accacagaauccaccacuacau

SEQ ID NO: 24855 - RNA, 22 nt, Artificial Sequence
  Synthetic
ccacagaauccaccacuacauc

SEQ ID NO: 24856 - RNA, 22 nt, Artificial Sequence
  Synthetic
cacagaauccaccacuacaucu

SEQ ID NO: 24857 - RNA, 22 nt, Artificial Sequence
  Synthetic
acagaauccaccacuacaucua

SEQ ID NO: 24858 - RNA, 22 nt, Artificial Sequence
  Synthetic
cagaauccaccacuacaucuag

SEQ ID NO: 24859 - RNA, 22 nt, Artificial Sequence
  Synthetic
agaauccaccacuacaucuagc

SEQ ID NO: 24860 - RNA, 22 nt, Artificial Sequence
  Synthetic
gaauccaccacuacaucuagcu

SEQ ID NO: 24861 - RNA, 22 nt, Artificial Sequence
  Synthetic
aauccaccacuacaucuagcuc

SEQ ID NO: 24862 - RNA, 22 nt, Artificial Sequence
  Synthetic
auccaccacuacaucuagcucu

SEQ ID NO: 24863 - RNA, 22 nt, Artificial Sequence
  Synthetic
uccaccacuacaucuagcucuu

SEQ ID NO: 24864 - RNA, 22 nt, Artificial Sequence
  Synthetic
ccaccacuacaucuagcucuua

SEQ ID NO: 24865 - RNA, 22 nt, Artificial Sequence
  Synthetic
caccacuacaucuagcucuuac

SEQ ID NO: 24866 - RNA, 22 nt, Artificial Sequence
  Synthetic
accacuacaucuagcucuuacu

SEQ ID NO: 24867 - RNA, 22 nt, Artificial Sequence
  Synthetic
ccacuacaucuagcucuuacuu

SEQ ID NO: 24868 - RNA, 22 nt, Artificial Sequence
  Synthetic
cacuacaucuagcucuuacuuc

SEQ ID NO: 24869 - RNA, 22 nt, Artificial Sequence
  Synthetic
acuacaucuagcucuuacuucu

SEQ ID NO: 24870 - RNA, 22 nt, Artificial Sequence
  Synthetic
cuacaucuagcucuuacuucuc

SEQ ID NO: 24871 - RNA, 22 nt, Artificial Sequence
  Synthetic
uacaucuagcucuuacuucucu

SEQ ID NO: 24872 - RNA, 22 nt, Artificial Sequence
  Synthetic
acaucuagcucuuacuucucuc

SEQ ID NO: 24873 - RNA, 22 nt, Artificial Sequence
  Synthetic
caucuagcucuuacuucucucc

SEQ ID NO: 24874 - RNA, 22 nt, Artificial Sequence
  Synthetic
aucuagcucuuacuucucucca

SEQ ID NO: 24875 - RNA, 22 nt, Artificial Sequence
  Synthetic
ucuagcucuuacuucucuccaa

SEQ ID NO: 24876 - RNA, 22 nt, Artificial Sequence
  Synthetic
cuagcucuuacuucucuccaau

SEQ ID NO: 24877 - RNA, 22 nt, Artificial Sequence
  Synthetic
uagcucuuacuucucuccaaug

SEQ ID NO: 24878 - RNA, 22 nt, Artificial Sequence
  Synthetic
agcucuuacuucucuccaaugc

SEQ ID NO: 24879 - RNA, 22 nt, Artificial Sequence
  Synthetic
gcucuuacuucucuccaaugcc

SEQ ID NO: 24880 - RNA, 22 nt, Artificial Sequence
  Synthetic
cucuuacuucucuccaaugccc

SEQ ID NO: 24881 - RNA, 22 nt, Artificial Sequence
  Synthetic
ucuuacuucucuccaaugcccu

SEQ ID NO: 24882 - RNA, 22 nt, Artificial Sequence
  Synthetic
cuuacuucucuccaaugcccug

SEQ ID NO: 24883 - RNA, 22 nt, Artificial Sequence
  Synthetic
uuacuucucuccaaugcccugc

SEQ ID NO: 24884 - RNA, 22 nt, Artificial Sequence
  Synthetic
uacuucucuccaaugcccugcu

SEQ ID NO: 24885 - RNA, 22 nt, Artificial Sequence
  Synthetic
acuucucuccaaugcccugcug

SEQ ID NO: 24886 - RNA, 22 nt, Artificial Sequence
  Synthetic
cuucucuccaaugcccugcugg

SEQ ID NO: 24887 - RNA, 22 nt, Artificial Sequence
  Synthetic
uucucuccaaugcccugcuggu

SEQ ID NO: 24888 - RNA, 22 nt, Artificial Sequence
  Synthetic
ucucuccaaugcccugcugguu

SEQ ID NO: 24889 - RNA, 22 nt, Artificial Sequence
  Synthetic
cucuccaaugcccugcugguuc

SEQ ID NO: 24890 - RNA, 22 nt, Artificial Sequence
  Synthetic
ucuccaaugcccugcugguuca

SEQ ID NO: 24891 - RNA, 22 nt, Artificial Sequence
  Synthetic
cuccaaugcccugcugguucag

SEQ ID NO: 24892 - RNA, 22 nt, Artificial Sequence
  Synthetic
uccaaugcccugcugguucagu

SEQ ID NO: 24893 - RNA, 22 nt, Artificial Sequence
  Synthetic
ccaaugcccugcugguucaguc

SEQ ID NO: 24894 - RNA, 22 nt, Artificial Sequence
  Synthetic
caaugcccugcugguucaguca

SEQ ID NO: 24895 - RNA, 22 nt, Artificial Sequence
  Synthetic
aaugcccugcugguucagucaa

SEQ ID NO: 24896 - RNA, 22 nt, Artificial Sequence
  Synthetic
augcccugcugguucagucaac

SEQ ID NO: 24897 - RNA, 22 nt, Artificial Sequence
  Synthetic
ugcccugcugguucagucaaca

SEQ ID NO: 24898 - RNA, 22 nt, Artificial Sequence
  Synthetic
gcccugcugguucagucaacag

SEQ ID NO: 24899 - RNA, 22 nt, Artificial Sequence
  Synthetic
cccugcugguucagucaacagu

SEQ ID NO: 24900 - RNA, 22 nt, Artificial Sequence
  Synthetic
ccugcugguucagucaacagua

SEQ ID NO: 24901 - RNA, 22 nt, Artificial Sequence
  Synthetic
cugcugguucagucaacaguaa

SEQ ID NO: 24902 - RNA, 22 nt, Artificial Sequence
  Synthetic
ugcugguucagucaacaguaag

SEQ ID NO: 24903 - RNA, 22 nt, Artificial Sequence
  Synthetic
gcugguucagucaacaguaagu

SEQ ID NO: 24904 - RNA, 22 nt, Artificial Sequence
  Synthetic
cugguucagucaacaguaaguc

SEQ ID NO: 24905 - RNA, 22 nt, Artificial Sequence
  Synthetic
ugguucagucaacaguaaguca

SEQ ID NO: 24906 - RNA, 22 nt, Artificial Sequence
  Synthetic
gguucagucaacaguaagucaa

SEQ ID NO: 24907 - RNA, 22 nt, Artificial Sequence
  Synthetic
guucagucaacaguaagucaac

SEQ ID NO: 24908 - RNA, 22 nt, Artificial Sequence
  Synthetic
uucagucaacaguaagucaaca

SEQ ID NO: 24909 - RNA, 22 nt, Artificial Sequence
  Synthetic
ucagucaacaguaagucaacag

SEQ ID NO: 24910 - RNA, 22 nt, Artificial Sequence
  Synthetic
cagucaacaguaagucaacaga

SEQ ID NO: 24911 - RNA, 22 nt, Artificial Sequence
  Synthetic
agucaacaguaagucaacagac

SEQ ID NO: 24912 - RNA, 22 nt, Artificial Sequence
  Synthetic
gucaacaguaagucaacagaca

SEQ ID NO: 24913 - RNA, 22 nt, Artificial Sequence
  Synthetic
ucaacaguaagucaacagacag

SEQ ID NO: 24914 - RNA, 22 nt, Artificial Sequence
  Synthetic
caacaguaagucaacagacaga

SEQ ID NO: 24915 - RNA, 22 nt, Artificial Sequence
  Synthetic
aacaguaagucaacagacagac

SEQ ID NO: 24916 - RNA, 22 nt, Artificial Sequence
  Synthetic
acaguaagucaacagacagaca

SEQ ID NO: 24917 - RNA, 22 nt, Artificial Sequence
  Synthetic
caguaagucaacagacagacau

SEQ ID NO: 24918 - RNA, 22 nt, Artificial Sequence
  Synthetic
aguaagucaacagacagacaug

SEQ ID NO: 24919 - RNA, 22 nt, Artificial Sequence
  Synthetic
guaagucaacagacagacaugu

SEQ ID NO: 24920 - RNA, 22 nt, Artificial Sequence
  Synthetic
uaagucaacagacagacaugua

SEQ ID NO: 24921 - RNA, 22 nt, Artificial Sequence
  Synthetic
aagucaacagacagacauguaa

SEQ ID NO: 24922 - RNA, 22 nt, Artificial Sequence
  Synthetic
agucaacagacagacauguaag

SEQ ID NO: 24923 - RNA, 22 nt, Artificial Sequence
  Synthetic
gucaacagacagacauguaaga

SEQ ID NO: 24924 - RNA, 22 nt, Artificial Sequence
  Synthetic
ucaacagacagacauguaagag

SEQ ID NO: 24925 - RNA, 22 nt, Artificial Sequence
  Synthetic
caacagacagacauguaagagc

SEQ ID NO: 24926 - RNA, 22 nt, Artificial Sequence
  Synthetic
aacagacagacauguaagagcu

SEQ ID NO: 24927 - RNA, 22 nt, Artificial Sequence
  Synthetic
acagacagacauguaagagcua

SEQ ID NO: 24928 - RNA, 22 nt, Artificial Sequence
  Synthetic
cagacagacauguaagagcuaa

SEQ ID NO: 24929 - RNA, 22 nt, Artificial Sequence
  Synthetic
agacagacauguaagagcuaau

SEQ ID NO: 24930 - RNA, 22 nt, Artificial Sequence
  Synthetic
gacagacauguaagagcuaaug

SEQ ID NO: 24931 - RNA, 22 nt, Artificial Sequence
  Synthetic
acagacauguaagagcuaaugu

SEQ ID NO: 24932 - RNA, 22 nt, Artificial Sequence
  Synthetic
cagacauguaagagcuaaugua

SEQ ID NO: 24933 - RNA, 22 nt, Artificial Sequence
  Synthetic
agacauguaagagcuaauguaa

SEQ ID NO: 24934 - RNA, 22 nt, Artificial Sequence
  Synthetic
gacauguaagagcuaauguaag

SEQ ID NO: 24935 - RNA, 22 nt, Artificial Sequence
  Synthetic
acauguaagagcuaauguaaga

SEQ ID NO: 24936 - RNA, 22 nt, Artificial Sequence
  Synthetic
cauguaagagcuaauguaagau

SEQ ID NO: 24937 - RNA, 22 nt, Artificial Sequence
  Synthetic
auguaagagcuaauguaagaug

SEQ ID NO: 24938 - RNA, 22 nt, Artificial Sequence
  Synthetic
uguaagagcuaauguaagaugc

SEQ ID NO: 24939 - RNA, 22 nt, Artificial Sequence
  Synthetic
guaagagcuaauguaagaugcu

SEQ ID NO: 24940 - RNA, 22 nt, Artificial Sequence
  Synthetic
uaagagcuaauguaagaugcua

SEQ ID NO: 24941 - RNA, 22 nt, Artificial Sequence
  Synthetic
aagagcuaauguaagaugcuag

SEQ ID NO: 24942 - RNA, 22 nt, Artificial Sequence
  Synthetic
agagcuaauguaagaugcuagg

SEQ ID NO: 24943 - RNA, 22 nt, Artificial Sequence
  Synthetic
gagcuaauguaagaugcuaggc

SEQ ID NO: 24944 - RNA, 22 nt, Artificial Sequence
  Synthetic
agcuaauguaagaugcuaggca

SEQ ID NO: 24945 - RNA, 22 nt, Artificial Sequence
  Synthetic
gcuaauguaagaugcuaggcag

SEQ ID NO: 24946 - RNA, 22 nt, Artificial Sequence
  Synthetic
cuaauguaagaugcuaggcaga

SEQ ID NO: 24947 - RNA, 22 nt, Artificial Sequence
  Synthetic
uaauguaagaugcuaggcagaa

SEQ ID NO: 24948 - RNA, 22 nt, Artificial Sequence
  Synthetic
aauguaagaugcuaggcagaau

SEQ ID NO: 24949 - RNA, 22 nt, Artificial Sequence
  Synthetic
auguaagaugcuaggcagaaug

SEQ ID NO: 24950 - RNA, 22 nt, Artificial Sequence
  Synthetic
uguaagaugcuaggcagaaugc

SEQ ID NO: 24951 - RNA, 22 nt, Artificial Sequence
  Synthetic
guaagaugcuaggcagaaugca

SEQ ID NO: 24952 - RNA, 22 nt, Artificial Sequence
  Synthetic
uaagaugcuaggcagaaugcaa

SEQ ID NO: 24953 - RNA, 22 nt, Artificial Sequence
  Synthetic
aagaugcuaggcagaaugcaag

SEQ ID NO: 24954 - RNA, 22 nt, Artificial Sequence
  Synthetic
agaugcuaggcagaaugcaaga

SEQ ID NO: 24955 - RNA, 22 nt, Artificial Sequence
  Synthetic
gaugcuaggcagaaugcaagau

SEQ ID NO: 24956 - RNA, 22 nt, Artificial Sequence
  Synthetic
augcuaggcagaaugcaagaug

SEQ ID NO: 24957 - RNA, 22 nt, Artificial Sequence
  Synthetic
ugcuaggcagaaugcaagaugu

SEQ ID NO: 24958 - RNA, 22 nt, Artificial Sequence
  Synthetic
gcuaggcagaaugcaagaugua

SEQ ID NO: 24959 - RNA, 22 nt, Artificial Sequence
  Synthetic
cuaggcagaaugcaagauguaa

SEQ ID NO: 24960 - RNA, 22 nt, Artificial Sequence
  Synthetic
uaggcagaaugcaagauguaag

SEQ ID NO: 24961 - RNA, 22 nt, Artificial Sequence
  Synthetic
aggcagaaugcaagauguaaga

SEQ ID NO: 24962 - RNA, 22 nt, Artificial Sequence
  Synthetic
ggcagaaugcaagauguaagau

SEQ ID NO: 24963 - RNA, 22 nt, Artificial Sequence
  Synthetic
gcagaaugcaagauguaagaug

SEQ ID NO: 24964 - RNA, 22 nt, Artificial Sequence
  Synthetic
cagaaugcaagauguaagaugu

SEQ ID NO: 24965 - RNA, 22 nt, Artificial Sequence
  Synthetic
agaaugcaagauguaagaugua

SEQ ID NO: 24966 - RNA, 22 nt, Artificial Sequence
  Synthetic
gaaugcaagauguaagauguaa

SEQ ID NO: 24967 - RNA, 22 nt, Artificial Sequence
  Synthetic
aaugcaagauguaagauguaag

SEQ ID NO: 24968 - RNA, 22 nt, Artificial Sequence
  Synthetic
augcaagauguaagauguaaga

SEQ ID NO: 24969 - RNA, 22 nt, Artificial Sequence
  Synthetic
ugcaagauguaagauguaagau

SEQ ID NO: 24970 - RNA, 22 nt, Artificial Sequence
  Synthetic
gcaagauguaagauguaagaug

SEQ ID NO: 24971 - RNA, 22 nt, Artificial Sequence
  Synthetic
caagauguaagauguaagaugu

SEQ ID NO: 24972 - RNA, 22 nt, Artificial Sequence
  Synthetic
aagauguaagauguaagaugua

SEQ ID NO: 24973 - RNA, 22 nt, Artificial Sequence
  Synthetic
agauguaagauguaagauguaa

SEQ ID NO: 24974 - RNA, 22 nt, Artificial Sequence
  Synthetic
gauguaagauguaagauguaag

SEQ ID NO: 24975 - RNA, 22 nt, Artificial Sequence
  Synthetic
auguaagauguaagauguaaga

SEQ ID NO: 24976 - RNA, 22 nt, Artificial Sequence
  Synthetic
uguaagauguaagauguaagau

SEQ ID NO: 24977 - RNA, 22 nt, Artificial Sequence
  Synthetic
guaagauguaagauguaagaug

SEQ ID NO: 24978 - RNA, 22 nt, Artificial Sequence
  Synthetic
uaagauguaagauguaagaugu

SEQ ID NO: 24979 - RNA, 22 nt, Artificial Sequence
  Synthetic
aagauguaagauguaagaugua

SEQ ID NO: 24980 - RNA, 22 nt, Artificial Sequence
  Synthetic
agauguaagauguaagauguaa

SEQ ID NO: 24981 - RNA, 22 nt, Artificial Sequence
  Synthetic
gauguaagauguaagauguaag

SEQ ID NO: 24982 - RNA, 22 nt, Artificial Sequence
  Synthetic
auguaagauguaagauguaagc

SEQ ID NO: 24983 - RNA, 22 nt, Artificial Sequence
  Synthetic
uguaagauguaagauguaagca

SEQ ID NO: 24984 - RNA, 22 nt, Artificial Sequence
  Synthetic
guaagauguaagauguaagcau

SEQ ID NO: 24985 - RNA, 22 nt, Artificial Sequence
  Synthetic
uaagauguaagauguaagcaug

SEQ ID NO: 24986 - RNA, 22 nt, Artificial Sequence
  Synthetic
aagauguaagauguaagcaugu

SEQ ID NO: 24987 - RNA, 22 nt, Artificial Sequence
  Synthetic
agauguaagauguaagcaugua

SEQ ID NO: 24988 - RNA, 22 nt, Artificial Sequence
  Synthetic
gauguaagauguaagcauguaa

SEQ ID NO: 24989 - RNA, 22 nt, Artificial Sequence
  Synthetic
auguaagauguaagcauguaag

SEQ ID NO: 24990 - RNA, 22 nt, Artificial Sequence
  Synthetic
uguaagauguaagcauguaaga

SEQ ID NO: 24991 - RNA, 22 nt, Artificial Sequence
  Synthetic
guaagauguaagcauguaagau

SEQ ID NO: 24992 - RNA, 22 nt, Artificial Sequence
  Synthetic
uaagauguaagcauguaagaug

SEQ ID NO: 24993 - RNA, 22 nt, Artificial Sequence
  Synthetic
aagauguaagcauguaagaugc

SEQ ID NO: 24994 - RNA, 22 nt, Artificial Sequence
  Synthetic
agauguaagcauguaagaugcu

SEQ ID NO: 24995 - RNA, 22 nt, Artificial Sequence
  Synthetic
gauguaagcauguaagaugcua

SEQ ID NO: 24996 - RNA, 22 nt, Artificial Sequence
  Synthetic
auguaagcauguaagaugcuag

SEQ ID NO: 24997 - RNA, 22 nt, Artificial Sequence
  Synthetic
uguaagcauguaagaugcuagg

SEQ ID NO: 24998 - RNA, 22 nt, Artificial Sequence
  Synthetic
guaagcauguaagaugcuaggc

SEQ ID NO: 24999 - RNA, 22 nt, Artificial Sequence
  Synthetic
uaagcauguaagaugcuaggca

SEQ ID NO: 25000 - RNA, 22 nt, Artificial Sequence
  Synthetic
aagcauguaagaugcuaggcag

SEQ ID NO: 25001 - RNA, 22 nt, Artificial Sequence
  Synthetic
agcauguaagaugcuaggcaga

SEQ ID NO: 25002 - RNA, 22 nt, Artificial Sequence
  Synthetic
gcauguaagaugcuaggcagaa

SEQ ID NO: 25003 - RNA, 22 nt, Artificial Sequence
  Synthetic
cauguaagaugcuaggcagaau

SEQ ID NO: 25004 - RNA, 22 nt, Artificial Sequence
  Synthetic
auguaagaugcuaggcagaauc

SEQ ID NO: 25005 - RNA, 22 nt, Artificial Sequence
  Synthetic
uguaagaugcuaggcagaaucc

SEQ ID NO: 25006 - RNA, 22 nt, Artificial Sequence
  Synthetic
guaagaugcuaggcagaaucca

SEQ ID NO: 25007 - RNA, 22 nt, Artificial Sequence
  Synthetic
uaagaugcuaggcagaauccag

SEQ ID NO: 25008 - RNA, 22 nt, Artificial Sequence
  Synthetic
aagaugcuaggcagaauccaga

SEQ ID NO: 25009 - RNA, 22 nt, Artificial Sequence
  Synthetic
agaugcuaggcagaauccagag

SEQ ID NO: 25010 - RNA, 22 nt, Artificial Sequence
  Synthetic
gaugcuaggcagaauccagaga

SEQ ID NO: 25011 - RNA, 22 nt, Artificial Sequence
  Synthetic
augcuaggcagaauccagagac

SEQ ID NO: 25012 - RNA, 22 nt, Artificial Sequence
  Synthetic
ugcuaggcagaauccagagaca

SEQ ID NO: 25013 - RNA, 22 nt, Artificial Sequence
  Synthetic
gcuaggcagaauccagagacaa

SEQ ID NO: 25014 - RNA, 22 nt, Artificial Sequence
  Synthetic
cuaggcagaauccagagacaaa

SEQ ID NO: 25015 - RNA, 22 nt, Artificial Sequence
  Synthetic
uaggcagaauccagagacaaag

SEQ ID NO: 25016 - RNA, 22 nt, Artificial Sequence
  Synthetic
aggcagaauccagagacaaagu

SEQ ID NO: 25017 - RNA, 22 nt, Artificial Sequence
  Synthetic
ggcagaauccagagacaaaguu

SEQ ID NO: 25018 - RNA, 22 nt, Artificial Sequence
  Synthetic
gcagaauccagagacaaaguug

SEQ ID NO: 25019 - RNA, 22 nt, Artificial Sequence
  Synthetic
cagaauccagagacaaaguugg

SEQ ID NO: 25020 - RNA, 22 nt, Artificial Sequence
  Synthetic
agaauccagagacaaaguugga

SEQ ID NO: 25021 - RNA, 22 nt, Artificial Sequence
  Synthetic
gaauccagagacaaaguuggaa

SEQ ID NO: 25022 - RNA, 22 nt, Artificial Sequence
  Synthetic
aauccagagacaaaguuggaag

SEQ ID NO: 25023 - RNA, 22 nt, Artificial Sequence
  Synthetic
auccagagacaaaguuggaaga

SEQ ID NO: 25024 - RNA, 22 nt, Artificial Sequence
  Synthetic
uccagagacaaaguuggaagau

SEQ ID NO: 25025 - RNA, 22 nt, Artificial Sequence
  Synthetic
ccagagacaaaguuggaagaug

SEQ ID NO: 25026 - RNA, 22 nt, Artificial Sequence
  Synthetic
cagagacaaaguuggaagaugu

SEQ ID NO: 25027 - RNA, 22 nt, Artificial Sequence
  Synthetic
agagacaaaguuggaagauguc

SEQ ID NO: 25028 - RNA, 22 nt, Artificial Sequence
  Synthetic
gagacaaaguuggaagauguca

SEQ ID NO: 25029 - RNA, 22 nt, Artificial Sequence
  Synthetic
agacaaaguuggaagaugucac

SEQ ID NO: 25030 - RNA, 22 nt, Artificial Sequence
  Synthetic
gacaaaguuggaagaugucacc

SEQ ID NO: 25031 - RNA, 22 nt, Artificial Sequence
  Synthetic
acaaaguuggaagaugucaccc

SEQ ID NO: 25032 - RNA, 22 nt, Artificial Sequence
  Synthetic
caaaguuggaagaugucacccu

SEQ ID NO: 25033 - RNA, 22 nt, Artificial Sequence
  Synthetic
aaaguuggaagaugucacccug

SEQ ID NO: 25034 - RNA, 22 nt, Artificial Sequence
  Synthetic
aaguuggaagaugucacccugu

SEQ ID NO: 25035 - RNA, 22 nt, Artificial Sequence
  Synthetic
aguuggaagaugucacccugug

SEQ ID NO: 25036 - RNA, 22 nt, Artificial Sequence
  Synthetic
guuggaagaugucacccugugu

SEQ ID NO: 25037 - RNA, 22 nt, Artificial Sequence
  Synthetic
uuggaagaugucacccugugua

SEQ ID NO: 25038 - RNA, 22 nt, Artificial Sequence
  Synthetic
uggaagaugucacccuguguaa

SEQ ID NO: 25039 - RNA, 22 nt, Artificial Sequence
  Synthetic
ggaagaugucacccuguguaac

SEQ ID NO: 25040 - RNA, 22 nt, Artificial Sequence
  Synthetic
gaagaugucacccuguguaaca

SEQ ID NO: 25041 - RNA, 22 nt, Artificial Sequence
  Synthetic
aagaugucacccuguguaacag

SEQ ID NO: 25042 - RNA, 22 nt, Artificial Sequence
  Synthetic
agaugucacccuguguaacaga

SEQ ID NO: 25043 - RNA, 22 nt, Artificial Sequence
  Synthetic
gaugucacccuguguaacagaa

SEQ ID NO: 25044 - RNA, 22 nt, Artificial Sequence
  Synthetic
augucacccuguguaacagaag

SEQ ID NO: 25045 - RNA, 22 nt, Artificial Sequence
  Synthetic
ugucacccuguguaacagaagu

SEQ ID NO: 25046 - RNA, 22 nt, Artificial Sequence
  Synthetic
gucacccuguguaacagaaguu

SEQ ID NO: 25047 - RNA, 22 nt, Artificial Sequence
  Synthetic
ucacccuguguaacagaaguuu

SEQ ID NO: 25048 - RNA, 22 nt, Artificial Sequence
  Synthetic
cacccuguguaacagaaguuuc

SEQ ID NO: 25049 - RNA, 22 nt, Artificial Sequence
  Synthetic
acccuguguaacagaaguuucu

SEQ ID NO: 25050 - RNA, 22 nt, Artificial Sequence
  Synthetic
cccuguguaacagaaguuucua

SEQ ID NO: 25051 - RNA, 22 nt, Artificial Sequence
  Synthetic
ccuguguaacagaaguuucuag

SEQ ID NO: 25052 - RNA, 22 nt, Artificial Sequence
  Synthetic
cuguguaacagaaguuucuagg

SEQ ID NO: 25053 - RNA, 22 nt, Artificial Sequence
  Synthetic
uguguaacagaaguuucuagga

SEQ ID NO: 25054 - RNA, 22 nt, Artificial Sequence
  Synthetic
guguaacagaaguuucuaggac

SEQ ID NO: 25055 - RNA, 22 nt, Artificial Sequence
  Synthetic
uguaacagaaguuucuaggacu

SEQ ID NO: 25056 - RNA, 22 nt, Artificial Sequence
  Synthetic
guaacagaaguuucuaggacuc

SEQ ID NO: 25057 - RNA, 22 nt, Artificial Sequence
  Synthetic
uaacagaaguuucuaggacucu

SEQ ID NO: 25058 - RNA, 22 nt, Artificial Sequence
  Synthetic
aacagaaguuucuaggacucug

SEQ ID NO: 25059 - RNA, 22 nt, Artificial Sequence
  Synthetic
acagaaguuucuaggacucugc

SEQ ID NO: 25060 - RNA, 22 nt, Artificial Sequence
  Synthetic
cagaaguuucuaggacucugca

SEQ ID NO: 25061 - RNA, 22 nt, Artificial Sequence
  Synthetic
agaaguuucuaggacucugcac

SEQ ID NO: 25062 - RNA, 22 nt, Artificial Sequence
  Synthetic
gaaguuucuaggacucugcaca

SEQ ID NO: 25063 - RNA, 22 nt, Artificial Sequence
  Synthetic
aaguuucuaggacucugcacac

SEQ ID NO: 25064 - RNA, 22 nt, Artificial Sequence
  Synthetic
aguuucuaggacucugcacacu

SEQ ID NO: 25065 - RNA, 22 nt, Artificial Sequence
  Synthetic
guuucuaggacucugcacacua

SEQ ID NO: 25066 - RNA, 22 nt, Artificial Sequence
  Synthetic
uuucuaggacucugcacacuau

SEQ ID NO: 25067 - RNA, 22 nt, Artificial Sequence
  Synthetic
uucuaggacucugcacacuaug

SEQ ID NO: 25068 - RNA, 22 nt, Artificial Sequence
  Synthetic
ucuaggacucugcacacuaugc

SEQ ID NO: 25069 - RNA, 22 nt, Artificial Sequence
  Synthetic
cuaggacucugcacacuaugca

SEQ ID NO: 25070 - RNA, 22 nt, Artificial Sequence
  Synthetic
uaggacucugcacacuaugcau

SEQ ID NO: 25071 - RNA, 22 nt, Artificial Sequence
  Synthetic
aggacucugcacacuaugcaua

SEQ ID NO: 25072 - RNA, 22 nt, Artificial Sequence
  Synthetic
ggacucugcacacuaugcauau

SEQ ID NO: 25073 - RNA, 22 nt, Artificial Sequence
  Synthetic
gacucugcacacuaugcauauu

SEQ ID NO: 25074 - RNA, 22 nt, Artificial Sequence
  Synthetic
acucugcacacuaugcauauua

SEQ ID NO: 25075 - RNA, 22 nt, Artificial Sequence
  Synthetic
cucugcacacuaugcauauuaa

SEQ ID NO: 25076 - RNA, 22 nt, Artificial Sequence
  Synthetic
ucugcacacuaugcauauuaau

SEQ ID NO: 25077 - RNA, 22 nt, Artificial Sequence
  Synthetic
cugcacacuaugcauauuaaua

SEQ ID NO: 25078 - RNA, 22 nt, Artificial Sequence
  Synthetic
ugcacacuaugcauauuaauaa

SEQ ID NO: 25079 - RNA, 22 nt, Artificial Sequence
  Synthetic
gcacacuaugcauauuaauaac

SEQ ID NO: 25080 - RNA, 22 nt, Artificial Sequence
  Synthetic
cacacuaugcauauuaauaacg

SEQ ID NO: 25081 - RNA, 22 nt, Artificial Sequence
  Synthetic
acacuaugcauauuaauaacgu

SEQ ID NO: 25082 - RNA, 22 nt, Artificial Sequence
  Synthetic
cacuaugcauauuaauaacgua

SEQ ID NO: 25083 - RNA, 22 nt, Artificial Sequence
  Synthetic
acuaugcauauuaauaacguau

SEQ ID NO: 25084 - RNA, 22 nt, Artificial Sequence
  Synthetic
cuaugcauauuaauaacguauu

SEQ ID NO: 25085 - RNA, 22 nt, Artificial Sequence
  Synthetic
uaugcauauuaauaacguauuu

SEQ ID NO: 25086 - RNA, 22 nt, Artificial Sequence
  Synthetic
augcauauuaauaacguauuua

SEQ ID NO: 25087 - RNA, 22 nt, Artificial Sequence
  Synthetic
ugcauauuaauaacguauuuaa

SEQ ID NO: 25088 - RNA, 22 nt, Artificial Sequence
  Synthetic
gcauauuaauaacguauuuaaa

SEQ ID NO: 25089 - RNA, 22 nt, Artificial Sequence
  Synthetic
cauauuaauaacguauuuaaag

SEQ ID NO: 25090 - RNA, 22 nt, Artificial Sequence
  Synthetic
auauuaauaacguauuuaaaga

SEQ ID NO: 25091 - RNA, 22 nt, Artificial Sequence
  Synthetic
uauuaauaacguauuuaaagag

SEQ ID NO: 25092 - RNA, 22 nt, Artificial Sequence
  Synthetic
auuaauaacguauuuaaagagg

SEQ ID NO: 25093 - RNA, 22 nt, Artificial Sequence
  Synthetic
uuaauaacguauuuaaagaggg

SEQ ID NO: 25094 - RNA, 22 nt, Artificial Sequence
  Synthetic
uaauaacguauuuaaagaggga

SEQ ID NO: 25095 - RNA, 22 nt, Artificial Sequence
  Synthetic
aauaacguauuuaaagagggaa

SEQ ID NO: 25096 - RNA, 22 nt, Artificial Sequence
  Synthetic
auaacguauuuaaagagggaac

SEQ ID NO: 25097 - RNA, 22 nt, Artificial Sequence
  Synthetic
uaacguauuuaaagagggaacu

SEQ ID NO: 25098 - RNA, 22 nt, Artificial Sequence
  Synthetic
aacguauuuaaagagggaacuu

SEQ ID NO: 25099 - RNA, 22 nt, Artificial Sequence
  Synthetic
acguauuuaaagagggaacuug

SEQ ID NO: 25100 - RNA, 22 nt, Artificial Sequence
  Synthetic
cguauuuaaagagggaacuuga

SEQ ID NO: 25101 - RNA, 22 nt, Artificial Sequence
  Synthetic
guauuuaaagagggaacuugaa

SEQ ID NO: 25102 - RNA, 22 nt, Artificial Sequence
  Synthetic
uauuuaaagagggaacuugaag

SEQ ID NO: 25103 - RNA, 22 nt, Artificial Sequence
  Synthetic
auuuaaagagggaacuugaaga

SEQ ID NO: 25104 - RNA, 22 nt, Artificial Sequence
  Synthetic
uuuaaagagggaacuugaagac

SEQ ID NO: 25105 - RNA, 22 nt, Artificial Sequence
  Synthetic
uuaaagagggaacuugaagaca

SEQ ID NO: 25106 - RNA, 22 nt, Artificial Sequence
  Synthetic
uaaagagggaacuugaagacag

SEQ ID NO: 25107 - RNA, 22 nt, Artificial Sequence
  Synthetic
aaagagggaacuugaagacagu

SEQ ID NO: 25108 - RNA, 22 nt, Artificial Sequence
  Synthetic
aagagggaacuugaagacaguu

SEQ ID NO: 25109 - RNA, 22 nt, Artificial Sequence
  Synthetic
agagggaacuugaagacaguuu

SEQ ID NO: 25110 - RNA, 22 nt, Artificial Sequence
  Synthetic
gagggaacuugaagacaguuua

SEQ ID NO: 25111 - RNA, 22 nt, Artificial Sequence
  Synthetic
agggaacuugaagacaguuuag

SEQ ID NO: 25112 - RNA, 22 nt, Artificial Sequence
  Synthetic
gggaacuugaagacaguuuagg

SEQ ID NO: 25113 - RNA, 22 nt, Artificial Sequence
  Synthetic
ggaacuugaagacaguuuaggc

SEQ ID NO: 25114 - RNA, 22 nt, Artificial Sequence
  Synthetic
gaacuugaagacaguuuaggca

SEQ ID NO: 25115 - RNA, 22 nt, Artificial Sequence
  Synthetic
aacuugaagacaguuuaggcag

SEQ ID NO: 25116 - RNA, 22 nt, Artificial Sequence
  Synthetic
acuugaagacaguuuaggcagg

SEQ ID NO: 25117 - RNA, 22 nt, Artificial Sequence
  Synthetic
cuugaagacaguuuaggcagga

SEQ ID NO: 25118 - RNA, 22 nt, Artificial Sequence
  Synthetic
uugaagacaguuuaggcaggag

SEQ ID NO: 25119 - RNA, 22 nt, Artificial Sequence
  Synthetic
ugaagacaguuuaggcaggaga

SEQ ID NO: 25120 - RNA, 22 nt, Artificial Sequence
  Synthetic
gaagacaguuuaggcaggagau

SEQ ID NO: 25121 - RNA, 22 nt, Artificial Sequence
  Synthetic
aagacaguuuaggcaggagauu

SEQ ID NO: 25122 - RNA, 22 nt, Artificial Sequence
  Synthetic
agacaguuuaggcaggagauua

SEQ ID NO: 25123 - RNA, 22 nt, Artificial Sequence
  Synthetic
gacaguuuaggcaggagauuaa

SEQ ID NO: 25124 - RNA, 22 nt, Artificial Sequence
  Synthetic
acaguuuaggcaggagauuaag

SEQ ID NO: 25125 - RNA, 22 nt, Artificial Sequence
  Synthetic
caguuuaggcaggagauuaagg

SEQ ID NO: 25126 - RNA, 22 nt, Artificial Sequence
  Synthetic
aguuuaggcaggagauuaagga

SEQ ID NO: 25127 - RNA, 22 nt, Artificial Sequence
  Synthetic
guuuaggcaggagauuaaggag

SEQ ID NO: 25128 - RNA, 22 nt, Artificial Sequence
  Synthetic
uuuaggcaggagauuaaggaga

SEQ ID NO: 25129 - RNA, 22 nt, Artificial Sequence
  Synthetic
uuaggcaggagauuaaggagac

SEQ ID NO: 25130 - RNA, 22 nt, Artificial Sequence
  Synthetic
uaggcaggagauuaaggagacc

SEQ ID NO: 25131 - RNA, 22 nt, Artificial Sequence
  Synthetic
aggcaggagauuaaggagaccu

SEQ ID NO: 25132 - RNA, 22 nt, Artificial Sequence
  Synthetic
ggcaggagauuaaggagaccuc

SEQ ID NO: 25133 - RNA, 22 nt, Artificial Sequence
  Synthetic
gcaggagauuaaggagaccucu

SEQ ID NO: 25134 - RNA, 22 nt, Artificial Sequence
  Synthetic
caggagauuaaggagaccucuc

SEQ ID NO: 25135 - RNA, 22 nt, Artificial Sequence
  Synthetic
aggagauuaaggagaccucuca

SEQ ID NO: 25136 - RNA, 22 nt, Artificial Sequence
  Synthetic
ggagauuaaggagaccucucau

SEQ ID NO: 25137 - RNA, 22 nt, Artificial Sequence
  Synthetic
gagauuaaggagaccucucaug

SEQ ID NO: 25138 - RNA, 22 nt, Artificial Sequence
  Synthetic
agauuaaggagaccucucaugu

SEQ ID NO: 25139 - RNA, 22 nt, Artificial Sequence
  Synthetic
gauuaaggagaccucucaugug

SEQ ID NO: 25140 - RNA, 22 nt, Artificial Sequence
  Synthetic
auuaaggagaccucucaugugu

SEQ ID NO: 25141 - RNA, 22 nt, Artificial Sequence
  Synthetic
uuaaggagaccucucauguguu

SEQ ID NO: 25142 - RNA, 22 nt, Artificial Sequence
  Synthetic
uaaggagaccucucauguguuu

SEQ ID NO: 25143 - RNA, 22 nt, Artificial Sequence
  Synthetic
aaggagaccucucauguguuuu

SEQ ID NO: 25144 - RNA, 22 nt, Artificial Sequence
  Synthetic
aggagaccucucauguguuuuc

SEQ ID NO: 25145 - RNA, 22 nt, Artificial Sequence
  Synthetic
ggagaccucucauguguuuuca

SEQ ID NO: 25146 - RNA, 22 nt, Artificial Sequence
  Synthetic
gagaccucucauguguuuucau

SEQ ID NO: 25147 - RNA, 22 nt, Artificial Sequence
  Synthetic
agaccucucauguguuuucaug

SEQ ID NO: 25148 - RNA, 22 nt, Artificial Sequence
  Synthetic
gaccucucauguguuuucaugu

SEQ ID NO: 25149 - RNA, 22 nt, Artificial Sequence
  Synthetic
accucucauguguuuucaugug

SEQ ID NO: 25150 - RNA, 22 nt, Artificial Sequence
  Synthetic
ccucucauguguuuucaugugu

SEQ ID NO: 25151 - RNA, 22 nt, Artificial Sequence
  Synthetic
cucucauguguuuucauguguu

SEQ ID NO: 25152 - RNA, 22 nt, Artificial Sequence
  Synthetic
ucucauguguuuucauguguug

SEQ ID NO: 25153 - RNA, 22 nt, Artificial Sequence
  Synthetic
cucauguguuuucauguguugu

SEQ ID NO: 25154 - RNA, 22 nt, Artificial Sequence
  Synthetic
ucauguguuuucauguguuguc

SEQ ID NO: 25155 - RNA, 22 nt, Artificial Sequence
  Synthetic
cauguguuuucauguguuguca

SEQ ID NO: 25156 - RNA, 22 nt, Artificial Sequence
  Synthetic
auguguuuucauguguugucau

SEQ ID NO: 25157 - RNA, 22 nt, Artificial Sequence
  Synthetic
uguguuuucauguguugucaua

SEQ ID NO: 25158 - RNA, 22 nt, Artificial Sequence
  Synthetic
guguuuucauguguugucauag

SEQ ID NO: 25159 - RNA, 22 nt, Artificial Sequence
  Synthetic
uguuuucauguguugucauagc

SEQ ID NO: 25160 - RNA, 22 nt, Artificial Sequence
  Synthetic
guuuucauguguugucauagcc

SEQ ID NO: 25161 - RNA, 22 nt, Artificial Sequence
  Synthetic
uuuucauguguugucauagccc

SEQ ID NO: 25162 - RNA, 22 nt, Artificial Sequence
  Synthetic
uuucauguguugucauagcccc

SEQ ID NO: 25163 - RNA, 22 nt, Artificial Sequence
  Synthetic
uucauguguugucauagcccca

SEQ ID NO: 25164 - RNA, 22 nt, Artificial Sequence
  Synthetic
ucauguguugucauagccccau

SEQ ID NO: 25165 - RNA, 22 nt, Artificial Sequence
  Synthetic
cauguguugucauagccccaug

SEQ ID NO: 25166 - RNA, 22 nt, Artificial Sequence
  Synthetic
auguguugucauagccccaugu

SEQ ID NO: 25167 - RNA, 22 nt, Artificial Sequence
  Synthetic
uguguugucauagccccauguu

SEQ ID NO: 25168 - RNA, 22 nt, Artificial Sequence
  Synthetic
guguugucauagccccauguuu

SEQ ID NO: 25169 - RNA, 22 nt, Artificial Sequence
  Synthetic
uguugucauagccccauguuug

SEQ ID NO: 25170 - RNA, 22 nt, Artificial Sequence
  Synthetic
guugucauagccccauguuugg

SEQ ID NO: 25171 - RNA, 22 nt, Artificial Sequence
  Synthetic
uugucauagccccauguuugga

SEQ ID NO: 25172 - RNA, 22 nt, Artificial Sequence
  Synthetic
ugucauagccccauguuuggaa

SEQ ID NO: 25173 - RNA, 22 nt, Artificial Sequence
  Synthetic
gucauagccccauguuuggaaa

SEQ ID NO: 25174 - RNA, 22 nt, Artificial Sequence
  Synthetic
ucauagccccauguuuggaaau

SEQ ID NO: 25175 - RNA, 22 nt, Artificial Sequence
  Synthetic
cauagccccauguuuggaaaug

SEQ ID NO: 25176 - RNA, 22 nt, Artificial Sequence
  Synthetic
auagccccauguuuggaaauga

SEQ ID NO: 25177 - RNA, 22 nt, Artificial Sequence
  Synthetic
uagccccauguuuggaaaugac

SEQ ID NO: 25178 - RNA, 22 nt, Artificial Sequence
  Synthetic
agccccauguuuggaaaugaca

SEQ ID NO: 25179 - RNA, 22 nt, Artificial Sequence
  Synthetic
gccccauguuuggaaaugacaa

SEQ ID NO: 25180 - RNA, 22 nt, Artificial Sequence
  Synthetic
ccccauguuuggaaaugacaau

SEQ ID NO: 25181 - RNA, 22 nt, Artificial Sequence
  Synthetic
cccauguuuggaaaugacaaua

SEQ ID NO: 25182 - RNA, 22 nt, Artificial Sequence
  Synthetic
ccauguuuggaaaugacaauau

SEQ ID NO: 25183 - RNA, 22 nt, Artificial Sequence
  Synthetic
cauguuuggaaaugacaauaug

SEQ ID NO: 25184 - RNA, 22 nt, Artificial Sequence
  Synthetic
auguuuggaaaugacaauaugu

SEQ ID NO: 25185 - RNA, 22 nt, Artificial Sequence
  Synthetic
uguuuggaaaugacaauaugug

SEQ ID NO: 25186 - RNA, 22 nt, Artificial Sequence
  Synthetic
guuuggaaaugacaauauguga

SEQ ID NO: 25187 - RNA, 22 nt, Artificial Sequence
  Synthetic
uuuggaaaugacaauaugugac

SEQ ID NO: 25188 - RNA, 22 nt, Artificial Sequence
  Synthetic
uuggaaaugacaauaugugaca

SEQ ID NO: 25189 - RNA, 22 nt, Artificial Sequence
  Synthetic
uggaaaugacaauaugugacac

SEQ ID NO: 25190 - RNA, 22 nt, Artificial Sequence
  Synthetic
ggaaaugacaauaugugacaca

SEQ ID NO: 25191 - RNA, 22 nt, Artificial Sequence
  Synthetic
gaaaugacaauaugugacacaa

SEQ ID NO: 25192 - RNA, 22 nt, Artificial Sequence
  Synthetic
aaaugacaauaugugacacaag

SEQ ID NO: 25193 - RNA, 22 nt, Artificial Sequence
  Synthetic
aaugacaauaugugacacaaga

SEQ ID NO: 25194 - RNA, 22 nt, Artificial Sequence
  Synthetic
augacaauaugugacacaagag

SEQ ID NO: 25195 - RNA, 22 nt, Artificial Sequence
  Synthetic
ugacaauaugugacacaagagu

SEQ ID NO: 25196 - RNA, 22 nt, Artificial Sequence
  Synthetic
gacaauaugugacacaagagug

SEQ ID NO: 25197 - RNA, 22 nt, Artificial Sequence
  Synthetic
acaauaugugacacaagagugu

SEQ ID NO: 25198 - RNA, 22 nt, Artificial Sequence
  Synthetic
caauaugugacacaagaguguc

SEQ ID NO: 25199 - RNA, 22 nt, Artificial Sequence
  Synthetic
aauaugugacacaagaguguca

SEQ ID NO: 25200 - RNA, 22 nt, Artificial Sequence
  Synthetic
auaugugacacaagagugucaa

SEQ ID NO: 25201 - RNA, 22 nt, Artificial Sequence
  Synthetic
uaugugacacaagagugucaaa

SEQ ID NO: 25202 - RNA, 22 nt, Artificial Sequence
  Synthetic
augugacacaagagugucaaaa

SEQ ID NO: 25203 - RNA, 22 nt, Artificial Sequence
  Synthetic
ugugacacaagagugucaaaau

SEQ ID NO: 25204 - RNA, 22 nt, Artificial Sequence
  Synthetic
gugacacaagagugucaaaaug

SEQ ID NO: 25205 - RNA, 22 nt, Artificial Sequence
  Synthetic
ugacacaagagugucaaaauga

SEQ ID NO: 25206 - RNA, 22 nt, Artificial Sequence
  Synthetic
gacacaagagugucaaaaugaa

SEQ ID NO: 25207 - RNA, 22 nt, Artificial Sequence
  Synthetic
acacaagagugucaaaaugaag

SEQ ID NO: 25208 - RNA, 22 nt, Artificial Sequence
  Synthetic
cacaagagugucaaaaugaaga

SEQ ID NO: 25209 - RNA, 22 nt, Artificial Sequence
  Synthetic
acaagagugucaaaaugaagac

SEQ ID NO: 25210 - RNA, 22 nt, Artificial Sequence
  Synthetic
caagagugucaaaaugaagaca

SEQ ID NO: 25211 - RNA, 22 nt, Artificial Sequence
  Synthetic
aagagugucaaaaugaagacac

SEQ ID NO: 25212 - RNA, 22 nt, Artificial Sequence
  Synthetic
agagugucaaaaugaagacacc

SEQ ID NO: 25213 - RNA, 22 nt, Artificial Sequence
  Synthetic
gagugucaaaaugaagacacca

SEQ ID NO: 25214 - RNA, 22 nt, Artificial Sequence
  Synthetic
agugucaaaaugaagacaccag

SEQ ID NO: 25215 - RNA, 22 nt, Artificial Sequence
  Synthetic
gugucaaaaugaagacaccaga

SEQ ID NO: 25216 - RNA, 22 nt, Artificial Sequence
  Synthetic
ugucaaaaugaagacaccagag

SEQ ID NO: 25217 - RNA, 22 nt, Artificial Sequence
  Synthetic
gucaaaaugaagacaccagagg

SEQ ID NO: 25218 - RNA, 22 nt, Artificial Sequence
  Synthetic
ucaaaaugaagacaccagagga

SEQ ID NO: 25219 - RNA, 22 nt, Artificial Sequence
  Synthetic
caaaaugaagacaccagaggau

SEQ ID NO: 25220 - RNA, 22 nt, Artificial Sequence
  Synthetic
aaaaugaagacaccagaggaug

SEQ ID NO: 25221 - RNA, 22 nt, Artificial Sequence
  Synthetic
aaaugaagacaccagaggauga

SEQ ID NO: 25222 - RNA, 22 nt, Artificial Sequence
  Synthetic
aaugaagacaccagaggaugac

SEQ ID NO: 25223 - RNA, 22 nt, Artificial Sequence
  Synthetic
augaagacaccagaggaugaca

SEQ ID NO: 25224 - RNA, 22 nt, Artificial Sequence
  Synthetic
ugaagacaccagaggaugacaa

SEQ ID NO: 25225 - RNA, 22 nt, Artificial Sequence
  Synthetic
gaagacaccagaggaugacaac

SEQ ID NO: 25226 - RNA, 22 nt, Artificial Sequence
  Synthetic
aagacaccagaggaugacaaca

SEQ ID NO: 25227 - RNA, 22 nt, Artificial Sequence
  Synthetic
agacaccagaggaugacaacag

SEQ ID NO: 25228 - RNA, 22 nt, Artificial Sequence
  Synthetic
gacaccagaggaugacaacagu

SEQ ID NO: 25229 - RNA, 22 nt, Artificial Sequence
  Synthetic
acaccagaggaugacaacaguc

SEQ ID NO: 25230 - RNA, 22 nt, Artificial Sequence
  Synthetic
caccagaggaugacaacaguca

SEQ ID NO: 25231 - RNA, 22 nt, Artificial Sequence
  Synthetic
accagaggaugacaacagucaa

SEQ ID NO: 25232 - RNA, 22 nt, Artificial Sequence
  Synthetic
ccagaggaugacaacagucaau

SEQ ID NO: 25233 - RNA, 22 nt, Artificial Sequence
  Synthetic
cagaggaugacaacagucaauc

SEQ ID NO: 25234 - RNA, 22 nt, Artificial Sequence
  Synthetic
agaggaugacaacagucaauca

SEQ ID NO: 25235 - RNA, 22 nt, Artificial Sequence
  Synthetic
gaggaugacaacagucaaucaa

SEQ ID NO: 25236 - RNA, 22 nt, Artificial Sequence
  Synthetic
aggaugacaacagucaaucaaa

SEQ ID NO: 25237 - RNA, 22 nt, Artificial Sequence
  Synthetic
ggaugacaacagucaaucaaag

SEQ ID NO: 25238 - RNA, 22 nt, Artificial Sequence
  Synthetic
gaugacaacagucaaucaaagc

SEQ ID NO: 25239 - RNA, 22 nt, Artificial Sequence
  Synthetic
augacaacagucaaucaaagcc

SEQ ID NO: 25240 - RNA, 22 nt, Artificial Sequence
  Synthetic
ugacaacagucaaucaaagccc

SEQ ID NO: 25241 - RNA, 22 nt, Artificial Sequence
  Synthetic
gacaacagucaaucaaagccca

SEQ ID NO: 25242 - RNA, 22 nt, Artificial Sequence
  Synthetic
acaacagucaaucaaagcccag

SEQ ID NO: 25243 - RNA, 22 nt, Artificial Sequence
  Synthetic
caacagucaaucaaagcccagu

SEQ ID NO: 25244 - RNA, 22 nt, Artificial Sequence
  Synthetic
aacagucaaucaaagcccagua

SEQ ID NO: 25245 - RNA, 22 nt, Artificial Sequence
  Synthetic
acagucaaucaaagcccaguag

SEQ ID NO: 25246 - RNA, 22 nt, Artificial Sequence
  Synthetic
cagucaaucaaagcccaguaga

SEQ ID NO: 25247 - RNA, 22 nt, Artificial Sequence
  Synthetic
agucaaucaaagcccaguagaa

SEQ ID NO: 25248 - RNA, 22 nt, Artificial Sequence
  Synthetic
gucaaucaaagcccaguagaau

SEQ ID NO: 25249 - RNA, 22 nt, Artificial Sequence
  Synthetic
ucaaucaaagcccaguagaauc

SEQ ID NO: 25250 - RNA, 22 nt, Artificial Sequence
  Synthetic
caaucaaagcccaguagaaucu

SEQ ID NO: 25251 - RNA, 22 nt, Artificial Sequence
  Synthetic
aaucaaagcccaguagaaucua

SEQ ID NO: 25252 - RNA, 22 nt, Artificial Sequence
  Synthetic
aucaaagcccaguagaaucuag

SEQ ID NO: 25253 - RNA, 22 nt, Artificial Sequence
  Synthetic
ucaaagcccaguagaaucuagg

SEQ ID NO: 25254 - RNA, 22 nt, Artificial Sequence
  Synthetic
caaagcccaguagaaucuagga

SEQ ID NO: 25255 - RNA, 22 nt, Artificial Sequence
  Synthetic
aaagcccaguagaaucuaggaa

SEQ ID NO: 25256 - RNA, 22 nt, Artificial Sequence
  Synthetic
aagcccaguagaaucuaggaac

SEQ ID NO: 25257 - RNA, 22 nt, Artificial Sequence
  Synthetic
agcccaguagaaucuaggaacu

SEQ ID NO: 25258 - RNA, 22 nt, Artificial Sequence
  Synthetic
gcccaguagaaucuaggaacug

SEQ ID NO: 25259 - RNA, 22 nt, Artificial Sequence
  Synthetic
cccaguagaaucuaggaacugg

SEQ ID NO: 25260 - RNA, 22 nt, Artificial Sequence
  Synthetic
ccaguagaaucuaggaacugga

SEQ ID NO: 25261 - RNA, 22 nt, Artificial Sequence
  Synthetic
caguagaaucuaggaacuggaa

SEQ ID NO: 25262 - RNA, 22 nt, Artificial Sequence
  Synthetic
aguagaaucuaggaacuggaag

SEQ ID NO: 25263 - RNA, 22 nt, Artificial Sequence
  Synthetic
guagaaucuaggaacuggaagc

SEQ ID NO: 25264 - RNA, 22 nt, Artificial Sequence
  Synthetic
uagaaucuaggaacuggaagca

SEQ ID NO: 25265 - RNA, 22 nt, Artificial Sequence
  Synthetic
agaaucuaggaacuggaagcaa

SEQ ID NO: 25266 - RNA, 22 nt, Artificial Sequence
  Synthetic
gaaucuaggaacuggaagcaag

SEQ ID NO: 25267 - RNA, 22 nt, Artificial Sequence
  Synthetic
aaucuaggaacuggaagcaagg

SEQ ID NO: 25268 - RNA, 22 nt, Artificial Sequence
  Synthetic
aucuaggaacuggaagcaagga

SEQ ID NO: 25269 - RNA, 22 nt, Artificial Sequence
  Synthetic
ucuaggaacuggaagcaaggaa

SEQ ID NO: 25270 - RNA, 22 nt, Artificial Sequence
  Synthetic
cuaggaacuggaagcaaggaag

SEQ ID NO: 25271 - RNA, 22 nt, Artificial Sequence
  Synthetic
uaggaacuggaagcaaggaagg

SEQ ID NO: 25272 - RNA, 22 nt, Artificial Sequence
  Synthetic
aggaacuggaagcaaggaaggu

SEQ ID NO: 25273 - RNA, 22 nt, Artificial Sequence
  Synthetic
ggaacuggaagcaaggaaggug

SEQ ID NO: 25274 - RNA, 22 nt, Artificial Sequence
  Synthetic
gaacuggaagcaaggaagguga

SEQ ID NO: 25275 - RNA, 22 nt, Artificial Sequence
  Synthetic
aacuggaagcaaggaaggugag

SEQ ID NO: 25276 - RNA, 22 nt, Artificial Sequence
  Synthetic
acuggaagcaaggaaggugaga

SEQ ID NO: 25277 - RNA, 22 nt, Artificial Sequence
  Synthetic
cuggaagcaaggaaggugagaa

SEQ ID NO: 25278 - RNA, 22 nt, Artificial Sequence
  Synthetic
uggaagcaaggaaggugagaau

SEQ ID NO: 25279 - RNA, 22 nt, Artificial Sequence
  Synthetic
ggaagcaaggaaggugagaauu

SEQ ID NO: 25280 - RNA, 22 nt, Artificial Sequence
  Synthetic
gaagcaaggaaggugagaauuu

SEQ ID NO: 25281 - RNA, 22 nt, Artificial Sequence
  Synthetic
aagcaaggaaggugagaauuug

SEQ ID NO: 25282 - RNA, 22 nt, Artificial Sequence
  Synthetic
agcaaggaaggugagaauuugu

SEQ ID NO: 25283 - RNA, 22 nt, Artificial Sequence
  Synthetic
gcaaggaaggugagaauuuguc

SEQ ID NO: 25284 - RNA, 22 nt, Artificial Sequence
  Synthetic
caaggaaggugagaauuuguca

SEQ ID NO: 25285 - RNA, 22 nt, Artificial Sequence
  Synthetic
aaggaaggugagaauuugucag

SEQ ID NO: 25286 - RNA, 22 nt, Artificial Sequence
  Synthetic
aggaaggugagaauuugucagu

SEQ ID NO: 25287 - RNA, 22 nt, Artificial Sequence
  Synthetic
ggaaggugagaauuugucagug

SEQ ID NO: 25288 - RNA, 22 nt, Artificial Sequence
  Synthetic
gaaggugagaauuugucagugu

SEQ ID NO: 25289 - RNA, 22 nt, Artificial Sequence
  Synthetic
aaggugagaauuugucagugug

SEQ ID NO: 25290 - RNA, 22 nt, Artificial Sequence
  Synthetic
aggugagaauuugucagugugg

SEQ ID NO: 25291 - RNA, 22 nt, Artificial Sequence
  Synthetic
ggugagaauuugucaguguggc

SEQ ID NO: 25292 - RNA, 22 nt, Artificial Sequence
  Synthetic
gugagaauuugucaguguggcu

SEQ ID NO: 25293 - RNA, 22 nt, Artificial Sequence
  Synthetic
ugagaauuugucaguguggcuu

SEQ ID NO: 25294 - RNA, 22 nt, Artificial Sequence
  Synthetic
gagaauuugucaguguggcuuc

SEQ ID NO: 25295 - RNA, 22 nt, Artificial Sequence
  Synthetic
agaauuugucaguguggcuuca

SEQ ID NO: 25296 - RNA, 22 nt, Artificial Sequence
  Synthetic
gaauuugucaguguggcuucau

SEQ ID NO: 25297 - RNA, 22 nt, Artificial Sequence
  Synthetic
aauuugucaguguggcuucauc

SEQ ID NO: 25298 - RNA, 22 nt, Artificial Sequence
  Synthetic
auuugucaguguggcuucauca

SEQ ID NO: 25299 - RNA, 22 nt, Artificial Sequence
  Synthetic
uuugucaguguggcuucaucac

SEQ ID NO: 25300 - RNA, 22 nt, Artificial Sequence
  Synthetic
uugucaguguggcuucaucacu

SEQ ID NO: 25301 - RNA, 22 nt, Artificial Sequence
  Synthetic
ugucaguguggcuucaucacua

SEQ ID NO: 25302 - RNA, 22 nt, Artificial Sequence
  Synthetic
gucaguguggcuucaucacuac

SEQ ID NO: 25303 - RNA, 22 nt, Artificial Sequence
  Synthetic
ucaguguggcuucaucacuacc

SEQ ID NO: 25304 - RNA, 22 nt, Artificial Sequence
  Synthetic
caguguggcuucaucacuaccu

SEQ ID NO: 25305 - RNA, 22 nt, Artificial Sequence
  Synthetic
aguguggcuucaucacuaccua

SEQ ID NO: 25306 - RNA, 22 nt, Artificial Sequence
  Synthetic
guguggcuucaucacuaccuau

SEQ ID NO: 25307 - RNA, 22 nt, Artificial Sequence
  Synthetic
uguggcuucaucacuaccuauu

SEQ ID NO: 25308 - RNA, 22 nt, Artificial Sequence
  Synthetic
guggcuucaucacuaccuauug

SEQ ID NO: 25309 - RNA, 22 nt, Artificial Sequence
  Synthetic
uggcuucaucacuaccuauugg

SEQ ID NO: 25310 - RNA, 22 nt, Artificial Sequence
  Synthetic
ggcuucaucacuaccuauuggu

SEQ ID NO: 25311 - RNA, 22 nt, Artificial Sequence
  Synthetic
gcuucaucacuaccuauuggug

SEQ ID NO: 25312 - RNA, 22 nt, Artificial Sequence
  Synthetic
cuucaucacuaccuauuggugg

SEQ ID NO: 25313 - RNA, 22 nt, Artificial Sequence
  Synthetic
uucaucacuaccuauuggugga

SEQ ID NO: 25314 - RNA, 22 nt, Artificial Sequence
  Synthetic
ucaucacuaccuauugguggaa

SEQ ID NO: 25315 - RNA, 22 nt, Artificial Sequence
  Synthetic
caucacuaccuauugguggaag

SEQ ID NO: 25316 - RNA, 22 nt, Artificial Sequence
  Synthetic
aucacuaccuauugguggaaga

SEQ ID NO: 25317 - RNA, 22 nt, Artificial Sequence
  Synthetic
ucacuaccuauugguggaagac

SEQ ID NO: 25318 - RNA, 22 nt, Artificial Sequence
  Synthetic
cacuaccuauugguggaagaca

SEQ ID NO: 25319 - RNA, 22 nt, Artificial Sequence
  Synthetic
acuaccuauugguggaagacac

SEQ ID NO: 25320 - RNA, 22 nt, Artificial Sequence
  Synthetic
cuaccuauugguggaagacaca

SEQ ID NO: 25321 - RNA, 22 nt, Artificial Sequence
  Synthetic
uaccuauugguggaagacacau

SEQ ID NO: 25322 - RNA, 22 nt, Artificial Sequence
  Synthetic
accuauugguggaagacacaua

SEQ ID NO: 25323 - RNA, 22 nt, Artificial Sequence
  Synthetic
ccuauugguggaagacacauac

SEQ ID NO: 25324 - RNA, 22 nt, Artificial Sequence
  Synthetic
cuauugguggaagacacauacc

SEQ ID NO: 25325 - RNA, 22 nt, Artificial Sequence
  Synthetic
uauugguggaagacacauaccu

SEQ ID NO: 25326 - RNA, 22 nt, Artificial Sequence
  Synthetic
auugguggaagacacauaccug

SEQ ID NO: 25327 - RNA, 22 nt, Artificial Sequence
  Synthetic
uugguggaagacacauaccuga

SEQ ID NO: 25328 - RNA, 22 nt, Artificial Sequence
  Synthetic
ugguggaagacacauaccugau

SEQ ID NO: 25329 - RNA, 22 nt, Artificial Sequence
  Synthetic
gguggaagacacauaccugaua

SEQ ID NO: 25330 - RNA, 22 nt, Artificial Sequence
  Synthetic
guggaagacacauaccugauaa

SEQ ID NO: 25331 - RNA, 22 nt, Artificial Sequence
  Synthetic
uggaagacacauaccugauaac

SEQ ID NO: 25332 - RNA, 22 nt, Artificial Sequence
  Synthetic
ggaagacacauaccugauaacu

SEQ ID NO: 25333 - RNA, 22 nt, Artificial Sequence
  Synthetic
gaagacacauaccugauaacua

SEQ ID NO: 25334 - RNA, 22 nt, Artificial Sequence
  Synthetic
aagacacauaccugauaacuac

SEQ ID NO: 25335 - RNA, 22 nt, Artificial Sequence
  Synthetic
agacacauaccugauaacuacu

SEQ ID NO: 25336 - RNA, 22 nt, Artificial Sequence
  Synthetic
gacacauaccugauaacuacuu

SEQ ID NO: 25337 - RNA, 22 nt, Artificial Sequence
  Synthetic
acacauaccugauaacuacuuu

SEQ ID NO: 25338 - RNA, 22 nt, Artificial Sequence
  Synthetic
cacauaccugauaacuacuuug

SEQ ID NO: 25339 - RNA, 22 nt, Artificial Sequence
  Synthetic
acauaccugauaacuacuuugc

SEQ ID NO: 25340 - RNA, 22 nt, Artificial Sequence
  Synthetic
cauaccugauaacuacuuugcu

SEQ ID NO: 25341 - RNA, 22 nt, Artificial Sequence
  Synthetic
auaccugauaacuacuuugcua

SEQ ID NO: 25342 - RNA, 22 nt, Artificial Sequence
  Synthetic
uaccugauaacuacuuugcuag

SEQ ID NO: 25343 - RNA, 22 nt, Artificial Sequence
  Synthetic
accugauaacuacuuugcuagu

SEQ ID NO: 25344 - RNA, 22 nt, Artificial Sequence
  Synthetic
ccugauaacuacuuugcuaguu

SEQ ID NO: 25345 - RNA, 22 nt, Artificial Sequence
  Synthetic
cugauaacuacuuugcuaguuc

SEQ ID NO: 25346 - RNA, 22 nt, Artificial Sequence
  Synthetic
ugauaacuacuuugcuaguucu

SEQ ID NO: 25347 - RNA, 22 nt, Artificial Sequence
  Synthetic
gauaacuacuuugcuaguucuu

SEQ ID NO: 25348 - RNA, 22 nt, Artificial Sequence
  Synthetic
auaacuacuuugcuaguucuua

SEQ ID NO: 25349 - RNA, 22 nt, Artificial Sequence
  Synthetic
uaacuacuuugcuaguucuuag

SEQ ID NO: 25350 - RNA, 22 nt, Artificial Sequence
  Synthetic
aacuacuuugcuaguucuuagc

SEQ ID NO: 25351 - RNA, 22 nt, Artificial Sequence
  Synthetic
acuacuuugcuaguucuuagca

SEQ ID NO: 25352 - RNA, 22 nt, Artificial Sequence
  Synthetic
cuacuuugcuaguucuuagcac

SEQ ID NO: 25353 - RNA, 22 nt, Artificial Sequence
  Synthetic
uacuuugcuaguucuuagcaca

SEQ ID NO: 25354 - RNA, 22 nt, Artificial Sequence
  Synthetic
acuuugcuaguucuuagcacau

SEQ ID NO: 25355 - RNA, 22 nt, Artificial Sequence
  Synthetic
cuuugcuaguucuuagcacauc

SEQ ID NO: 25356 - RNA, 22 nt, Artificial Sequence
  Synthetic
uuugcuaguucuuagcacauca

SEQ ID NO: 25357 - RNA, 22 nt, Artificial Sequence
  Synthetic
uugcuaguucuuagcacaucag

SEQ ID NO: 25358 - RNA, 22 nt, Artificial Sequence
  Synthetic
ugcuaguucuuagcacaucagg

SEQ ID NO: 25359 - RNA, 22 nt, Artificial Sequence
  Synthetic
gcuaguucuuagcacaucaggg

SEQ ID NO: 25360 - RNA, 22 nt, Artificial Sequence
  Synthetic
cuaguucuuagcacaucagggc

SEQ ID NO: 25361 - RNA, 22 nt, Artificial Sequence
  Synthetic
uaguucuuagcacaucagggcc

SEQ ID NO: 25362 - RNA, 22 nt, Artificial Sequence
  Synthetic
aguucuuagcacaucagggcca

SEQ ID NO: 25363 - RNA, 22 nt, Artificial Sequence
  Synthetic
guucuuagcacaucagggccau

SEQ ID NO: 25364 - RNA, 22 nt, Artificial Sequence
  Synthetic
uucuuagcacaucagggccauu

SEQ ID NO: 25365 - RNA, 22 nt, Artificial Sequence
  Synthetic
ucuuagcacaucagggccauuu

SEQ ID NO: 25366 - RNA, 22 nt, Artificial Sequence
  Synthetic
cuuagcacaucagggccauuuu

SEQ ID NO: 25367 - RNA, 22 nt, Artificial Sequence
  Synthetic
uuagcacaucagggccauuuuc

SEQ ID NO: 25368 - RNA, 22 nt, Artificial Sequence
  Synthetic
uagcacaucagggccauuuucu

SEQ ID NO: 25369 - RNA, 22 nt, Artificial Sequence
  Synthetic
agcacaucagggccauuuucug

SEQ ID NO: 25370 - RNA, 22 nt, Artificial Sequence
  Synthetic
gcacaucagggccauuuucugg

SEQ ID NO: 25371 - RNA, 22 nt, Artificial Sequence
  Synthetic
cacaucagggccauuuucugga

SEQ ID NO: 25372 - RNA, 22 nt, Artificial Sequence
  Synthetic
acaucagggccauuuucuggag

SEQ ID NO: 25373 - RNA, 22 nt, Artificial Sequence
  Synthetic
caucagggccauuuucuggagg

SEQ ID NO: 25374 - RNA, 22 nt, Artificial Sequence
  Synthetic
aucagggccauuuucuggaggc

SEQ ID NO: 25375 - RNA, 22 nt, Artificial Sequence
  Synthetic
ucagggccauuuucuggaggca

SEQ ID NO: 25376 - RNA, 22 nt, Artificial Sequence
  Synthetic
cagggccauuuucuggaggcau

SEQ ID NO: 25377 - RNA, 22 nt, Artificial Sequence
  Synthetic
agggccauuuucuggaggcaua

SEQ ID NO: 25378 - RNA, 22 nt, Artificial Sequence
  Synthetic
gggccauuuucuggaggcauaa

SEQ ID NO: 25379 - RNA, 22 nt, Artificial Sequence
  Synthetic
ggccauuuucuggaggcauaau

SEQ ID NO: 25380 - RNA, 22 nt, Artificial Sequence
  Synthetic
gccauuuucuggaggcauaaug

SEQ ID NO: 25381 - RNA, 22 nt, Artificial Sequence
  Synthetic
ccauuuucuggaggcauaaugu

SEQ ID NO: 25382 - RNA, 22 nt, Artificial Sequence
  Synthetic
cauuuucuggaggcauaaugua

SEQ ID NO: 25383 - RNA, 22 nt, Artificial Sequence
  Synthetic
auuuucuggaggcauaauguaa

SEQ ID NO: 25384 - RNA, 22 nt, Artificial Sequence
  Synthetic
uuuucuggaggcauaauguaau

SEQ ID NO: 25385 - RNA, 22 nt, Artificial Sequence
  Synthetic
uuucuggaggcauaauguaauc

SEQ ID NO: 25386 - RNA, 22 nt, Artificial Sequence
  Synthetic
uucuggaggcauaauguaaucu

SEQ ID NO: 25387 - RNA, 22 nt, Artificial Sequence
  Synthetic
ucuggaggcauaauguaaucua

SEQ ID NO: 25388 - RNA, 22 nt, Artificial Sequence
  Synthetic
cuggaggcauaauguaaucuac

SEQ ID NO: 25389 - RNA, 22 nt, Artificial Sequence
  Synthetic
uggaggcauaauguaaucuaca

SEQ ID NO: 25390 - RNA, 22 nt, Artificial Sequence
  Synthetic
ggaggcauaauguaaucuacag

SEQ ID NO: 25391 - RNA, 22 nt, Artificial Sequence
  Synthetic
gaggcauaauguaaucuacaga

SEQ ID NO: 25392 - RNA, 22 nt, Artificial Sequence
  Synthetic
aggcauaauguaaucuacagaa

SEQ ID NO: 25393 - RNA, 22 nt, Artificial Sequence
  Synthetic
ggcauaauguaaucuacagaaa

SEQ ID NO: 25394 - RNA, 22 nt, Artificial Sequence
  Synthetic
gcauaauguaaucuacagaaac

SEQ ID NO: 25395 - RNA, 22 nt, Artificial Sequence
  Synthetic
cauaauguaaucuacagaaaca

SEQ ID NO: 25396 - RNA, 22 nt, Artificial Sequence
  Synthetic
auaauguaaucuacagaaacag

SEQ ID NO: 25397 - RNA, 22 nt, Artificial Sequence
  Synthetic
uaauguaaucuacagaaacagc

SEQ ID NO: 25398 - RNA, 22 nt, Artificial Sequence
  Synthetic
aauguaaucuacagaaacagcu

SEQ ID NO: 25399 - RNA, 22 nt, Artificial Sequence
  Synthetic
auguaaucuacagaaacagcuc

SEQ ID NO: 25400 - RNA, 22 nt, Artificial Sequence
  Synthetic
uguaaucuacagaaacagcucu

SEQ ID NO: 25401 - RNA, 22 nt, Artificial Sequence
  Synthetic
guaaucuacagaaacagcucuc

SEQ ID NO: 25402 - RNA, 22 nt, Artificial Sequence
  Synthetic
uaaucuacagaaacagcucuca

SEQ ID NO: 25403 - RNA, 22 nt, Artificial Sequence
  Synthetic
aaucuacagaaacagcucucaa

SEQ ID NO: 25404 - RNA, 22 nt, Artificial Sequence
  Synthetic
aucuacagaaacagcucucaag

SEQ ID NO: 25405 - RNA, 22 nt, Artificial Sequence
  Synthetic
ucuacagaaacagcucucaagc

SEQ ID NO: 25406 - RNA, 22 nt, Artificial Sequence
  Synthetic
cuacagaaacagcucucaagcc

SEQ ID NO: 25407 - RNA, 22 nt, Artificial Sequence
  Synthetic
uacagaaacagcucucaagccu

SEQ ID NO: 25408 - RNA, 22 nt, Artificial Sequence
  Synthetic
acagaaacagcucucaagccug

SEQ ID NO: 25409 - RNA, 22 nt, Artificial Sequence
  Synthetic
cagaaacagcucucaagccuga

SEQ ID NO: 25410 - RNA, 22 nt, Artificial Sequence
  Synthetic
agaaacagcucucaagccugac

SEQ ID NO: 25411 - RNA, 22 nt, Artificial Sequence
  Synthetic
gaaacagcucucaagccugacc

SEQ ID NO: 25412 - RNA, 22 nt, Artificial Sequence
  Synthetic
aaacagcucucaagccugaccu

SEQ ID NO: 25413 - RNA, 22 nt, Artificial Sequence
  Synthetic
aacagcucucaagccugaccuu

SEQ ID NO: 25414 - RNA, 22 nt, Artificial Sequence
  Synthetic
acagcucucaagccugaccuuu

SEQ ID NO: 25415 - RNA, 22 nt, Artificial Sequence
  Synthetic
cagcucucaagccugaccuuug

SEQ ID NO: 25416 - RNA, 22 nt, Artificial Sequence
  Synthetic
agcucucaagccugaccuuugc

SEQ ID NO: 25417 - RNA, 22 nt, Artificial Sequence
  Synthetic
gcucucaagccugaccuuugcu

SEQ ID NO: 25418 - RNA, 22 nt, Artificial Sequence
  Synthetic
cucucaagccugaccuuugcuc

SEQ ID NO: 25419 - RNA, 22 nt, Artificial Sequence
  Synthetic
ucucaagccugaccuuugcucu

SEQ ID NO: 25420 - RNA, 22 nt, Artificial Sequence
  Synthetic
cucaagccugaccuuugcucua

SEQ ID NO: 25421 - RNA, 22 nt, Artificial Sequence
  Synthetic
ucaagccugaccuuugcucuac

SEQ ID NO: 25422 - RNA, 22 nt, Artificial Sequence
  Synthetic
caagccugaccuuugcucuaca

SEQ ID NO: 25423 - RNA, 22 nt, Artificial Sequence
  Synthetic
aagccugaccuuugcucuacag

SEQ ID NO: 25424 - RNA, 22 nt, Artificial Sequence
  Synthetic
agccugaccuuugcucuacaga

SEQ ID NO: 25425 - RNA, 22 nt, Artificial Sequence
  Synthetic
gccugaccuuugcucuacagau

SEQ ID NO: 25426 - RNA, 22 nt, Artificial Sequence
  Synthetic
ccugaccuuugcucuacagaua

SEQ ID NO: 25427 - RNA, 22 nt, Artificial Sequence
  Synthetic
cugaccuuugcucuacagauag

SEQ ID NO: 25428 - RNA, 22 nt, Artificial Sequence
  Synthetic
ugaccuuugcucuacagauagc

SEQ ID NO: 25429 - RNA, 22 nt, Artificial Sequence
  Synthetic
gaccuuugcucuacagauagcc

SEQ ID NO: 25430 - RNA, 22 nt, Artificial Sequence
  Synthetic
accuuugcucuacagauagccu

SEQ ID NO: 25431 - RNA, 22 nt, Artificial Sequence
  Synthetic
ccuuugcucuacagauagccuc

SEQ ID NO: 25432 - RNA, 22 nt, Artificial Sequence
  Synthetic
cuuugcucuacagauagccuca

SEQ ID NO: 25433 - RNA, 22 nt, Artificial Sequence
  Synthetic
uuugcucuacagauagccucag

SEQ ID NO: 25434 - RNA, 22 nt, Artificial Sequence
  Synthetic
uugcucuacagauagccucagu

SEQ ID NO: 25435 - RNA, 22 nt, Artificial Sequence
  Synthetic
ugcucuacagauagccucagua

SEQ ID NO: 25436 - RNA, 22 nt, Artificial Sequence
  Synthetic
gcucuacagauagccucaguau

SEQ ID NO: 25437 - RNA, 22 nt, Artificial Sequence
  Synthetic
cucuacagauagccucaguauu

SEQ ID NO: 25438 - RNA, 22 nt, Artificial Sequence
  Synthetic
ucuacagauagccucaguauuc

SEQ ID NO: 25439 - RNA, 22 nt, Artificial Sequence
  Synthetic
cuacagauagccucaguauuca

SEQ ID NO: 25440 - RNA, 22 nt, Artificial Sequence
  Synthetic
uacagauagccucaguauucac

SEQ ID NO: 25441 - RNA, 22 nt, Artificial Sequence
  Synthetic
acagauagccucaguauucacc

SEQ ID NO: 25442 - RNA, 22 nt, Artificial Sequence
  Synthetic
cagauagccucaguauucaccu

SEQ ID NO: 25443 - RNA, 22 nt, Artificial Sequence
  Synthetic
agauagccucaguauucaccuc

SEQ ID NO: 25444 - RNA, 22 nt, Artificial Sequence
  Synthetic
gauagccucaguauucaccucu

SEQ ID NO: 25445 - RNA, 22 nt, Artificial Sequence
  Synthetic
auagccucaguauucaccucug

SEQ ID NO: 25446 - RNA, 22 nt, Artificial Sequence
  Synthetic
uagccucaguauucaccucuga

SEQ ID NO: 25447 - RNA, 22 nt, Artificial Sequence
  Synthetic
agccucaguauucaccucugau

SEQ ID NO: 25448 - RNA, 22 nt, Artificial Sequence
  Synthetic
gccucaguauucaccucugauu

SEQ ID NO: 25449 - RNA, 22 nt, Artificial Sequence
  Synthetic
ccucaguauucaccucugauua

SEQ ID NO: 25450 - RNA, 22 nt, Artificial Sequence
  Synthetic
cucaguauucaccucugauuau

SEQ ID NO: 25451 - RNA, 22 nt, Artificial Sequence
  Synthetic
ucaguauucaccucugauuaug

SEQ ID NO: 25452 - RNA, 22 nt, Artificial Sequence
  Synthetic
caguauucaccucugauuaugu

SEQ ID NO: 25453 - RNA, 22 nt, Artificial Sequence
  Synthetic
aguauucaccucugauuaugug

SEQ ID NO: 25454 - RNA, 22 nt, Artificial Sequence
  Synthetic
guauucaccucugauuaugugu

SEQ ID NO: 25455 - RNA, 22 nt, Artificial Sequence
  Synthetic
uauucaccucugauuauguguc

SEQ ID NO: 25456 - RNA, 22 nt, Artificial Sequence
  Synthetic
auucaccucugauuaugugucc

SEQ ID NO: 25457 - RNA, 22 nt, Artificial Sequence
  Synthetic
uucaccucugauuaugugucca

SEQ ID NO: 25458 - RNA, 22 nt, Artificial Sequence
  Synthetic
ucaccucugauuauguguccag

SEQ ID NO: 25459 - RNA, 22 nt, Artificial Sequence
  Synthetic
caccucugauuauguguccaga

SEQ ID NO: 25460 - RNA, 22 nt, Artificial Sequence
  Synthetic
accucugauuauguguccagau

SEQ ID NO: 25461 - RNA, 22 nt, Artificial Sequence
  Synthetic
ccucugauuauguguccagauu

SEQ ID NO: 25462 - RNA, 22 nt, Artificial Sequence
  Synthetic
cucugauuauguguccagauug

SEQ ID NO: 25463 - RNA, 22 nt, Artificial Sequence
  Synthetic
ucugauuauguguccagauugc

SEQ ID NO: 25464 - RNA, 22 nt, Artificial Sequence
  Synthetic
cugauuauguguccagauugca

SEQ ID NO: 25465 - RNA, 22 nt, Artificial Sequence
  Synthetic
ugauuauguguccagauugcag

SEQ ID NO: 25466 - RNA, 22 nt, Artificial Sequence
  Synthetic
gauuauguguccagauugcagu

SEQ ID NO: 25467 - RNA, 22 nt, Artificial Sequence
  Synthetic
auuauguguccagauugcaguu

SEQ ID NO: 25468 - RNA, 22 nt, Artificial Sequence
  Synthetic
uuauguguccagauugcaguuu

SEQ ID NO: 25469 - RNA, 22 nt, Artificial Sequence
  Synthetic
uauguguccagauugcaguuuc

SEQ ID NO: 25470 - RNA, 22 nt, Artificial Sequence
  Synthetic
auguguccagauugcaguuuca

SEQ ID NO: 25471 - RNA, 22 nt, Artificial Sequence
  Synthetic
uguguccagauugcaguuucau

SEQ ID NO: 25472 - RNA, 22 nt, Artificial Sequence
  Synthetic
guguccagauugcaguuucauu

SEQ ID NO: 25473 - RNA, 22 nt, Artificial Sequence
  Synthetic
uguccagauugcaguuucauuc

SEQ ID NO: 25474 - RNA, 22 nt, Artificial Sequence
  Synthetic
guccagauugcaguuucauucc

SEQ ID NO: 25475 - RNA, 22 nt, Artificial Sequence
  Synthetic
uccagauugcaguuucauuccu

SEQ ID NO: 25476 - RNA, 22 nt, Artificial Sequence
  Synthetic
ccagauugcaguuucauuccug

SEQ ID NO: 25477 - RNA, 22 nt, Artificial Sequence
  Synthetic
cagauugcaguuucauuccugu

SEQ ID NO: 25478 - RNA, 22 nt, Artificial Sequence
  Synthetic
agauugcaguuucauuccuguu

SEQ ID NO: 25479 - RNA, 22 nt, Artificial Sequence
  Synthetic
gauugcaguuucauuccuguug

SEQ ID NO: 25480 - RNA, 22 nt, Artificial Sequence
  Synthetic
auugcaguuucauuccuguuga

SEQ ID NO: 25481 - RNA, 22 nt, Artificial Sequence
  Synthetic
uugcaguuucauuccuguugau

SEQ ID NO: 25482 - RNA, 22 nt, Artificial Sequence
  Synthetic
ugcaguuucauuccuguugaua

SEQ ID NO: 25483 - RNA, 22 nt, Artificial Sequence
  Synthetic
gcaguuucauuccuguugauac

SEQ ID NO: 25484 - RNA, 22 nt, Artificial Sequence
  Synthetic
caguuucauuccuguugauacg

SEQ ID NO: 25485 - RNA, 22 nt, Artificial Sequence
  Synthetic
aguuucauuccuguugauacgc

SEQ ID NO: 25486 - RNA, 22 nt, Artificial Sequence
  Synthetic
guuucauuccuguugauacgcc

SEQ ID NO: 25487 - RNA, 22 nt, Artificial Sequence
  Synthetic
uuucauuccuguugauacgccu

SEQ ID NO: 25488 - RNA, 22 nt, Artificial Sequence
  Synthetic
uucauuccuguugauacgccug

SEQ ID NO: 25489 - RNA, 22 nt, Artificial Sequence
  Synthetic
ucauuccuguugauacgccugg

SEQ ID NO: 25490 - RNA, 22 nt, Artificial Sequence
  Synthetic
cauuccuguugauacgccuggc

SEQ ID NO: 25491 - RNA, 22 nt, Artificial Sequence
  Synthetic
auuccuguugauacgccuggcu

SEQ ID NO: 25492 - RNA, 22 nt, Artificial Sequence
  Synthetic
uuccuguugauacgccuggcuu

SEQ ID NO: 25493 - RNA, 22 nt, Artificial Sequence
  Synthetic
uccuguugauacgccuggcuug

SEQ ID NO: 25494 - RNA, 22 nt, Artificial Sequence
  Synthetic
ccuguugauacgccuggcuugg

SEQ ID NO: 25495 - RNA, 22 nt, Artificial Sequence
  Synthetic
cuguugauacgccuggcuuggg

SEQ ID NO: 25496 - RNA, 22 nt, Artificial Sequence
  Synthetic
uguugauacgccuggcuugggu

SEQ ID NO: 25497 - RNA, 22 nt, Artificial Sequence
  Synthetic
guugauacgccuggcuugggug

SEQ ID NO: 25498 - RNA, 22 nt, Artificial Sequence
  Synthetic
uugauacgccuggcuugggugg

SEQ ID NO: 25499 - RNA, 22 nt, Artificial Sequence
  Synthetic
ugauacgccuggcuuggguggg

SEQ ID NO: 25500 - RNA, 22 nt, Artificial Sequence
  Synthetic
gauacgccuggcuugggugggg

SEQ ID NO: 25501 - RNA, 22 nt, Artificial Sequence
  Synthetic
auacgccuggcuugggugggga

SEQ ID NO: 25502 - RNA, 22 nt, Artificial Sequence
  Synthetic
uacgccuggcuuggguggggac

SEQ ID NO: 25503 - RNA, 22 nt, Artificial Sequence
  Synthetic
acgccuggcuuggguggggacc

SEQ ID NO: 25504 - RNA, 22 nt, Artificial Sequence
  Synthetic
cgccuggcuuggguggggaccu

SEQ ID NO: 25505 - RNA, 22 nt, Artificial Sequence
  Synthetic
gccuggcuuggguggggaccuu

SEQ ID NO: 25506 - RNA, 22 nt, Artificial Sequence
  Synthetic
ccuggcuuggguggggaccuuc

SEQ ID NO: 25507 - RNA, 22 nt, Artificial Sequence
  Synthetic
cuggcuuggguggggaccuucc

SEQ ID NO: 25508 - RNA, 22 nt, Artificial Sequence
  Synthetic
uggcuuggguggggaccuuccu

SEQ ID NO: 25509 - RNA, 22 nt, Artificial Sequence
  Synthetic
ggcuuggguggggaccuuccuu

SEQ ID NO: 25510 - RNA, 22 nt, Artificial Sequence
  Synthetic
gcuuggguggggaccuuccuuc

SEQ ID NO: 25511 - RNA, 22 nt, Artificial Sequence
  Synthetic
cuuggguggggaccuuccuucc

SEQ ID NO: 25512 - RNA, 22 nt, Artificial Sequence
  Synthetic
uuggguggggaccuuccuucca

SEQ ID NO: 25513 - RNA, 22 nt, Artificial Sequence
  Synthetic
uggguggggaccuuccuuccag

SEQ ID NO: 25514 - RNA, 22 nt, Artificial Sequence
  Synthetic
ggguggggaccuuccuuccaga

SEQ ID NO: 25515 - RNA, 22 nt, Artificial Sequence
  Synthetic
gguggggaccuuccuuccagau

SEQ ID NO: 25516 - RNA, 22 nt, Artificial Sequence
  Synthetic
guggggaccuuccuuccagauc

SEQ ID NO: 25517 - RNA, 22 nt, Artificial Sequence
  Synthetic
uggggaccuuccuuccagaucc

SEQ ID NO: 25518 - RNA, 22 nt, Artificial Sequence
  Synthetic
ggggaccuuccuuccagauccu

SEQ ID NO: 25519 - RNA, 22 nt, Artificial Sequence
  Synthetic
gggaccuuccuuccagauccuc

SEQ ID NO: 25520 - RNA, 22 nt, Artificial Sequence
  Synthetic
ggaccuuccuuccagauccucu

SEQ ID NO: 25521 - RNA, 22 nt, Artificial Sequence
  Synthetic
gaccuuccuuccagauccucua

SEQ ID NO: 25522 - RNA, 22 nt, Artificial Sequence
  Synthetic
accuuccuuccagauccucuaa

SEQ ID NO: 25523 - RNA, 22 nt, Artificial Sequence
  Synthetic
ccuuccuuccagauccucuaag

SEQ ID NO: 25524 - RNA, 22 nt, Artificial Sequence
  Synthetic
cuuccuuccagauccucuaagu

SEQ ID NO: 25525 - RNA, 22 nt, Artificial Sequence
  Synthetic
uuccuuccagauccucuaaguu

SEQ ID NO: 25526 - RNA, 22 nt, Artificial Sequence
  Synthetic
uccuuccagauccucuaaguuc

SEQ ID NO: 25527 - RNA, 22 nt, Artificial Sequence
  Synthetic
ccuuccagauccucuaaguucu

SEQ ID NO: 25528 - RNA, 22 nt, Artificial Sequence
  Synthetic
cuuccagauccucuaaguucuc

SEQ ID NO: 25529 - RNA, 22 nt, Artificial Sequence
  Synthetic
uuccagauccucuaaguucucu

SEQ ID NO: 25530 - RNA, 22 nt, Artificial Sequence
  Synthetic
uccagauccucuaaguucucuu

SEQ ID NO: 25531 - RNA, 22 nt, Artificial Sequence
  Synthetic
ccagauccucuaaguucucuuu

SEQ ID NO: 25532 - RNA, 22 nt, Artificial Sequence
  Synthetic
cagauccucuaaguucucuuuc

SEQ ID NO: 25533 - RNA, 22 nt, Artificial Sequence
  Synthetic
agauccucuaaguucucuuuca

SEQ ID NO: 25534 - RNA, 22 nt, Artificial Sequence
  Synthetic
gauccucuaaguucucuuucau

SEQ ID NO: 25535 - RNA, 22 nt, Artificial Sequence
  Synthetic
auccucuaaguucucuuucaua

SEQ ID NO: 25536 - RNA, 22 nt, Artificial Sequence
  Synthetic
uccucuaaguucucuuucauau

SEQ ID NO: 25537 - RNA, 22 nt, Artificial Sequence
  Synthetic
ccucuaaguucucuuucauaug

SEQ ID NO: 25538 - RNA, 22 nt, Artificial Sequence
  Synthetic
cucuaaguucucuuucauaugc

SEQ ID NO: 25539 - RNA, 22 nt, Artificial Sequence
  Synthetic
ucuaaguucucuuucauaugca

SEQ ID NO: 25540 - RNA, 22 nt, Artificial Sequence
  Synthetic
cuaaguucucuuucauaugcau

SEQ ID NO: 25541 - RNA, 22 nt, Artificial Sequence
  Synthetic
uaaguucucuuucauaugcauc

SEQ ID NO: 25542 - RNA, 22 nt, Artificial Sequence
  Synthetic
aaguucucuuucauaugcaucu

SEQ ID NO: 25543 - RNA, 22 nt, Artificial Sequence
  Synthetic
aguucucuuucauaugcaucuc

SEQ ID NO: 25544 - RNA, 22 nt, Artificial Sequence
  Synthetic
guucucuuucauaugcaucuca

SEQ ID NO: 25545 - RNA, 22 nt, Artificial Sequence
  Synthetic
uucucuuucauaugcaucucau

SEQ ID NO: 25546 - RNA, 22 nt, Artificial Sequence
  Synthetic
ucucuuucauaugcaucucauu

SEQ ID NO: 25547 - RNA, 22 nt, Artificial Sequence
  Synthetic
cucuuucauaugcaucucauuc

SEQ ID NO: 25548 - RNA, 22 nt, Artificial Sequence
  Synthetic
ucuuucauaugcaucucauucc

SEQ ID NO: 25549 - RNA, 22 nt, Artificial Sequence
  Synthetic
cuuucauaugcaucucauucca

SEQ ID NO: 25550 - RNA, 22 nt, Artificial Sequence
  Synthetic
uuucauaugcaucucauuccag

SEQ ID NO: 25551 - RNA, 22 nt, Artificial Sequence
  Synthetic
uucauaugcaucucauuccagg

SEQ ID NO: 25552 - RNA, 22 nt, Artificial Sequence
  Synthetic
ucauaugcaucucauuccaggg

SEQ ID NO: 25553 - RNA, 22 nt, Artificial Sequence
  Synthetic
cauaugcaucucauuccaggga

SEQ ID NO: 25554 - RNA, 22 nt, Artificial Sequence
  Synthetic
auaugcaucucauuccagggag

SEQ ID NO: 25555 - RNA, 22 nt, Artificial Sequence
  Synthetic
uaugcaucucauuccagggaga

SEQ ID NO: 25556 - RNA, 22 nt, Artificial Sequence
  Synthetic
augcaucucauuccagggagaa

SEQ ID NO: 25557 - RNA, 22 nt, Artificial Sequence
  Synthetic
ugcaucucauuccagggagaag

SEQ ID NO: 25558 - RNA, 22 nt, Artificial Sequence
  Synthetic
gcaucucauuccagggagaagg

SEQ ID NO: 25559 - RNA, 22 nt, Artificial Sequence
  Synthetic
caucucauuccagggagaaggg

SEQ ID NO: 25560 - RNA, 22 nt, Artificial Sequence
  Synthetic
aucucauuccagggagaagggg

SEQ ID NO: 25561 - RNA, 22 nt, Artificial Sequence
  Synthetic
ucucauuccagggagaagggga

SEQ ID NO: 25562 - RNA, 22 nt, Artificial Sequence
  Synthetic
cucauuccagggagaaggggag

SEQ ID NO: 25563 - RNA, 22 nt, Artificial Sequence
  Synthetic
ucauuccagggagaaggggaga

SEQ ID NO: 25564 - RNA, 22 nt, Artificial Sequence
  Synthetic
cauuccagggagaaggggagag

SEQ ID NO: 25565 - RNA, 22 nt, Artificial Sequence
  Synthetic
auuccagggagaaggggagagu

SEQ ID NO: 25566 - RNA, 22 nt, Artificial Sequence
  Synthetic
uuccagggagaaggggagaguu

SEQ ID NO: 25567 - RNA, 22 nt, Artificial Sequence
  Synthetic
uccagggagaaggggagaguuc

SEQ ID NO: 25568 - RNA, 22 nt, Artificial Sequence
  Synthetic
ccagggagaaggggagaguucu

SEQ ID NO: 25569 - RNA, 22 nt, Artificial Sequence
  Synthetic
cagggagaaggggagaguucua

SEQ ID NO: 25570 - RNA, 22 nt, Artificial Sequence
  Synthetic
agggagaaggggagaguucuaa

SEQ ID NO: 25571 - RNA, 22 nt, Artificial Sequence
  Synthetic
gggagaaggggagaguucuaag

SEQ ID NO: 25572 - RNA, 22 nt, Artificial Sequence
  Synthetic
ggagaaggggagaguucuaagu

SEQ ID NO: 25573 - RNA, 22 nt, Artificial Sequence
  Synthetic
gagaaggggagaguucuaaguc

SEQ ID NO: 25574 - RNA, 22 nt, Artificial Sequence
  Synthetic
agaaggggagaguucuaagucc

SEQ ID NO: 25575 - RNA, 22 nt, Artificial Sequence
  Synthetic
gaaggggagaguucuaaguccc

SEQ ID NO: 25576 - RNA, 22 nt, Artificial Sequence
  Synthetic
aaggggagaguucuaaguccca

SEQ ID NO: 25577 - RNA, 22 nt, Artificial Sequence
  Synthetic
aggggagaguucuaagucccaa

SEQ ID NO: 25578 - RNA, 22 nt, Artificial Sequence
  Synthetic
ggggagaguucuaagucccaag

SEQ ID NO: 25579 - RNA, 22 nt, Artificial Sequence
  Synthetic
gggagaguucuaagucccaagu

SEQ ID NO: 25580 - RNA, 22 nt, Artificial Sequence
  Synthetic
ggagaguucuaagucccaaguu

SEQ ID NO: 25581 - RNA, 22 nt, Artificial Sequence
  Synthetic
gagaguucuaagucccaaguuc

SEQ ID NO: 25582 - RNA, 22 nt, Artificial Sequence
  Synthetic
agaguucuaagucccaaguucu

SEQ ID NO: 25583 - RNA, 22 nt, Artificial Sequence
  Synthetic
gaguucuaagucccaaguucua

SEQ ID NO: 25584 - RNA, 22 nt, Artificial Sequence
  Synthetic
aguucuaagucccaaguucuaa

SEQ ID NO: 25585 - RNA, 22 nt, Artificial Sequence
  Synthetic
guucuaagucccaaguucuaag

SEQ ID NO: 25586 - RNA, 22 nt, Artificial Sequence
  Synthetic
uucuaagucccaaguucuaaga

SEQ ID NO: 25587 - RNA, 22 nt, Artificial Sequence
  Synthetic
ucuaagucccaaguucuaagac

SEQ ID NO: 25588 - RNA, 22 nt, Artificial Sequence
  Synthetic
cuaagucccaaguucuaagaca

SEQ ID NO: 25589 - RNA, 22 nt, Artificial Sequence
  Synthetic
uaagucccaaguucuaagacac

SEQ ID NO: 25590 - RNA, 22 nt, Artificial Sequence
  Synthetic
aagucccaaguucuaagacaca

SEQ ID NO: 25591 - RNA, 22 nt, Artificial Sequence
  Synthetic
agucccaaguucuaagacacau

SEQ ID NO: 25592 - RNA, 22 nt, Artificial Sequence
  Synthetic
gucccaaguucuaagacacaua

SEQ ID NO: 25593 - RNA, 22 nt, Artificial Sequence
  Synthetic
ucccaaguucuaagacacauac

SEQ ID NO: 25594 - RNA, 22 nt, Artificial Sequence
  Synthetic
cccaaguucuaagacacauaca

SEQ ID NO: 25595 - RNA, 22 nt, Artificial Sequence
  Synthetic
ccaaguucuaagacacauacag

SEQ ID NO: 25596 - RNA, 22 nt, Artificial Sequence
  Synthetic
caaguucuaagacacauacagg

SEQ ID NO: 25597 - RNA, 22 nt, Artificial Sequence
  Synthetic
aaguucuaagacacauacaggu

SEQ ID NO: 25598 - RNA, 22 nt, Artificial Sequence
  Synthetic
aguucuaagacacauacaggua

SEQ ID NO: 25599 - RNA, 22 nt, Artificial Sequence
  Synthetic
guucuaagacacauacagguac

SEQ ID NO: 25600 - RNA, 22 nt, Artificial Sequence
  Synthetic
uucuaagacacauacagguaca

SEQ ID NO: 25601 - RNA, 22 nt, Artificial Sequence
  Synthetic
ucuaagacacauacagguacac

SEQ ID NO: 25602 - RNA, 22 nt, Artificial Sequence
  Synthetic
cuaagacacauacagguacaca

SEQ ID NO: 25603 - RNA, 22 nt, Artificial Sequence
  Synthetic
uaagacacauacagguacacac

SEQ ID NO: 25604 - RNA, 22 nt, Artificial Sequence
  Synthetic
aagacacauacagguacacacc

SEQ ID NO: 25605 - RNA, 22 nt, Artificial Sequence
  Synthetic
agacacauacagguacacaccc

SEQ ID NO: 25606 - RNA, 22 nt, Artificial Sequence
  Synthetic
gacacauacagguacacaccca

SEQ ID NO: 25607 - RNA, 22 nt, Artificial Sequence
  Synthetic
acacauacagguacacacccac

SEQ ID NO: 25608 - RNA, 22 nt, Artificial Sequence
  Synthetic
cacauacagguacacacccaca

SEQ ID NO: 25609 - RNA, 22 nt, Artificial Sequence
  Synthetic
acauacagguacacacccacac

SEQ ID NO: 25610 - RNA, 22 nt, Artificial Sequence
  Synthetic
cauacagguacacacccacaca

SEQ ID NO: 25611 - RNA, 22 nt, Artificial Sequence
  Synthetic
auacagguacacacccacacau

SEQ ID NO: 25612 - RNA, 22 nt, Artificial Sequence
  Synthetic
uacagguacacacccacacaua

SEQ ID NO: 25613 - RNA, 22 nt, Artificial Sequence
  Synthetic
acagguacacacccacacauac

SEQ ID NO: 25614 - RNA, 22 nt, Artificial Sequence
  Synthetic
cagguacacacccacacauaca

SEQ ID NO: 25615 - RNA, 22 nt, Artificial Sequence
  Synthetic
agguacacacccacacauacaa

SEQ ID NO: 25616 - RNA, 22 nt, Artificial Sequence
  Synthetic
gguacacacccacacauacaag

SEQ ID NO: 25617 - RNA, 22 nt, Artificial Sequence
  Synthetic
guacacacccacacauacaagc

SEQ ID NO: 25618 - RNA, 22 nt, Artificial Sequence
  Synthetic
uacacacccacacauacaagca

SEQ ID NO: 25619 - RNA, 22 nt, Artificial Sequence
  Synthetic
acacacccacacauacaagcac

SEQ ID NO: 25620 - RNA, 22 nt, Artificial Sequence
  Synthetic
cacacccacacauacaagcacc

SEQ ID NO: 25621 - RNA, 22 nt, Artificial Sequence
  Synthetic
acacccacacauacaagcaccc

SEQ ID NO: 25622 - RNA, 22 nt, Artificial Sequence
  Synthetic
cacccacacauacaagcaccca

SEQ ID NO: 25623 - RNA, 22 nt, Artificial Sequence
  Synthetic
acccacacauacaagcacccac

SEQ ID NO: 25624 - RNA, 22 nt, Artificial Sequence
  Synthetic
cccacacauacaagcacccacc

SEQ ID NO: 25625 - RNA, 22 nt, Artificial Sequence
  Synthetic
ccacacauacaagcacccaccc

SEQ ID NO: 25626 - RNA, 22 nt, Artificial Sequence
  Synthetic
cacacauacaagcacccacccu

SEQ ID NO: 25627 - RNA, 22 nt, Artificial Sequence
  Synthetic
acacauacaagcacccacccuc

SEQ ID NO: 25628 - RNA, 22 nt, Artificial Sequence
  Synthetic
cacauacaagcacccacccuca

SEQ ID NO: 25629 - RNA, 22 nt, Artificial Sequence
  Synthetic
acauacaagcacccacccucac

SEQ ID NO: 25630 - RNA, 22 nt, Artificial Sequence
  Synthetic
cauacaagcacccacccucacu

SEQ ID NO: 25631 - RNA, 22 nt, Artificial Sequence
  Synthetic
auacaagcacccacccucacuu

SEQ ID NO: 25632 - RNA, 22 nt, Artificial Sequence
  Synthetic
uacaagcacccacccucacuuu

SEQ ID NO: 25633 - RNA, 22 nt, Artificial Sequence
  Synthetic
acaagcacccacccucacuuua

SEQ ID NO: 25634 - RNA, 22 nt, Artificial Sequence
  Synthetic
caagcacccacccucacuuuau

SEQ ID NO: 25635 - RNA, 22 nt, Artificial Sequence
  Synthetic
aagcacccacccucacuuuaug

SEQ ID NO: 25636 - RNA, 22 nt, Artificial Sequence
  Synthetic
agcacccacccucacuuuaugg

SEQ ID NO: 25637 - RNA, 22 nt, Artificial Sequence
  Synthetic
gcacccacccucacuuuaugga

SEQ ID NO: 25638 - RNA, 22 nt, Artificial Sequence
  Synthetic
cacccacccucacuuuauggaa

SEQ ID NO: 25639 - RNA, 22 nt, Artificial Sequence
  Synthetic
acccacccucacuuuauggaaa

SEQ ID NO: 25640 - RNA, 22 nt, Artificial Sequence
  Synthetic
cccacccucacuuuauggaaag

SEQ ID NO: 25641 - RNA, 22 nt, Artificial Sequence
  Synthetic
ccacccucacuuuauggaaagc

SEQ ID NO: 25642 - RNA, 22 nt, Artificial Sequence
  Synthetic
cacccucacuuuauggaaagca

SEQ ID NO: 25643 - RNA, 22 nt, Artificial Sequence
  Synthetic
acccucacuuuauggaaagcau

SEQ ID NO: 25644 - RNA, 22 nt, Artificial Sequence
  Synthetic
cccucacuuuauggaaagcauc

SEQ ID NO: 25645 - RNA, 22 nt, Artificial Sequence
  Synthetic
ccucacuuuauggaaagcaucc

SEQ ID NO: 25646 - RNA, 22 nt, Artificial Sequence
  Synthetic
cucacuuuauggaaagcaucca

SEQ ID NO: 25647 - RNA, 22 nt, Artificial Sequence
  Synthetic
ucacuuuauggaaagcauccag

SEQ ID NO: 25648 - RNA, 22 nt, Artificial Sequence
  Synthetic
cacuuuauggaaagcauccagu

SEQ ID NO: 25649 - RNA, 22 nt, Artificial Sequence
  Synthetic
acuuuauggaaagcauccagug

SEQ ID NO: 25650 - RNA, 22 nt, Artificial Sequence
  Synthetic
cuuuauggaaagcauccagugg

SEQ ID NO: 25651 - RNA, 22 nt, Artificial Sequence
  Synthetic
uuuauggaaagcauccaguggg

SEQ ID NO: 25652 - RNA, 22 nt, Artificial Sequence
  Synthetic
uuauggaaagcauccagugggg

SEQ ID NO: 25653 - RNA, 22 nt, Artificial Sequence
  Synthetic
uauggaaagcauccagugggga

SEQ ID NO: 25654 - RNA, 22 nt, Artificial Sequence
  Synthetic
auggaaagcauccaguggggag

SEQ ID NO: 25655 - RNA, 22 nt, Artificial Sequence
  Synthetic
uggaaagcauccaguggggaga

SEQ ID NO: 25656 - RNA, 22 nt, Artificial Sequence
  Synthetic
ggaaagcauccaguggggagac

SEQ ID NO: 25657 - RNA, 22 nt, Artificial Sequence
  Synthetic
gaaagcauccaguggggagacu

SEQ ID NO: 25658 - RNA, 22 nt, Artificial Sequence
  Synthetic
aaagcauccaguggggagacuc

SEQ ID NO: 25659 - RNA, 22 nt, Artificial Sequence
  Synthetic
aagcauccaguggggagacuca

SEQ ID NO: 25660 - RNA, 22 nt, Artificial Sequence
  Synthetic
agcauccaguggggagacucau

SEQ ID NO: 25661 - RNA, 22 nt, Artificial Sequence
  Synthetic
gcauccaguggggagacucaug

SEQ ID NO: 25662 - RNA, 22 nt, Artificial Sequence
  Synthetic
cauccaguggggagacucauga

SEQ ID NO: 25663 - RNA, 22 nt, Artificial Sequence
  Synthetic
auccaguggggagacucaugaa

SEQ ID NO: 25664 - RNA, 22 nt, Artificial Sequence
  Synthetic
uccaguggggagacucaugaac

SEQ ID NO: 25665 - RNA, 22 nt, Artificial Sequence
  Synthetic
ccaguggggagacucaugaaca

SEQ ID NO: 25666 - RNA, 22 nt, Artificial Sequence
  Synthetic
caguggggagacucaugaacau

SEQ ID NO: 25667 - RNA, 22 nt, Artificial Sequence
  Synthetic
aguggggagacucaugaacauc

SEQ ID NO: 25668 - RNA, 22 nt, Artificial Sequence
  Synthetic
guggggagacucaugaacauca

SEQ ID NO: 25669 - RNA, 22 nt, Artificial Sequence
  Synthetic
uggggagacucaugaacaucag

SEQ ID NO: 25670 - RNA, 22 nt, Artificial Sequence
  Synthetic
ggggagacucaugaacaucagu

SEQ ID NO: 25671 - RNA, 22 nt, Artificial Sequence
  Synthetic
gggagacucaugaacaucaguc

SEQ ID NO: 25672 - RNA, 22 nt, Artificial Sequence
  Synthetic
ggagacucaugaacaucaguca

SEQ ID NO: 25673 - RNA, 22 nt, Artificial Sequence
  Synthetic
gagacucaugaacaucagucau

SEQ ID NO: 25674 - RNA, 22 nt, Artificial Sequence
  Synthetic
agacucaugaacaucagucauu

SEQ ID NO: 25675 - RNA, 22 nt, Artificial Sequence
  Synthetic
gacucaugaacaucagucauuc

SEQ ID NO: 25676 - RNA, 22 nt, Artificial Sequence
  Synthetic
acucaugaacaucagucauucu

SEQ ID NO: 25677 - RNA, 22 nt, Artificial Sequence
  Synthetic
cucaugaacaucagucauucug

SEQ ID NO: 25678 - RNA, 22 nt, Artificial Sequence
  Synthetic
ucaugaacaucagucauucuga

SEQ ID NO: 25679 - RNA, 22 nt, Artificial Sequence
  Synthetic
caugaacaucagucauucugag

SEQ ID NO: 25680 - RNA, 22 nt, Artificial Sequence
  Synthetic
augaacaucagucauucugagg

SEQ ID NO: 25681 - RNA, 22 nt, Artificial Sequence
  Synthetic
ugaacaucagucauucugaggc

SEQ ID NO: 25682 - RNA, 22 nt, Artificial Sequence
  Synthetic
gaacaucagucauucugaggcc

SEQ ID NO: 25683 - RNA, 22 nt, Artificial Sequence
  Synthetic
aacaucagucauucugaggcca

SEQ ID NO: 25684 - RNA, 22 nt, Artificial Sequence
  Synthetic
acaucagucauucugaggccac

SEQ ID NO: 25685 - RNA, 22 nt, Artificial Sequence
  Synthetic
caucagucauucugaggccaca

SEQ ID NO: 25686 - RNA, 22 nt, Artificial Sequence
  Synthetic
aucagucauucugaggccacau

SEQ ID NO: 25687 - RNA, 22 nt, Artificial Sequence
  Synthetic
ucagucauucugaggccacauc

SEQ ID NO: 25688 - RNA, 22 nt, Artificial Sequence
  Synthetic
cagucauucugaggccacaucc

SEQ ID NO: 25689 - RNA, 22 nt, Artificial Sequence
  Synthetic
agucauucugaggccacauccu

SEQ ID NO: 25690 - RNA, 22 nt, Artificial Sequence
  Synthetic
gucauucugaggccacauccuu

SEQ ID NO: 25691 - RNA, 22 nt, Artificial Sequence
  Synthetic
ucauucugaggccacauccuuc

SEQ ID NO: 25692 - RNA, 22 nt, Artificial Sequence
  Synthetic
cauucugaggccacauccuucu

SEQ ID NO: 25693 - RNA, 22 nt, Artificial Sequence
  Synthetic
auucugaggccacauccuucua

SEQ ID NO: 25694 - RNA, 22 nt, Artificial Sequence
  Synthetic
uucugaggccacauccuucuac

SEQ ID NO: 25695 - RNA, 22 nt, Artificial Sequence
  Synthetic
ucugaggccacauccuucuacu

SEQ ID NO: 25696 - RNA, 22 nt, Artificial Sequence
  Synthetic
cugaggccacauccuucuacua

SEQ ID NO: 25697 - RNA, 22 nt, Artificial Sequence
  Synthetic
ugaggccacauccuucuacuaa

SEQ ID NO: 25698 - RNA, 22 nt, Artificial Sequence
  Synthetic
gaggccacauccuucuacuaaa

SEQ ID NO: 25699 - RNA, 22 nt, Artificial Sequence
  Synthetic
aggccacauccuucuacuaaac

SEQ ID NO: 25700 - RNA, 22 nt, Artificial Sequence
  Synthetic
ggccacauccuucuacuaaacu

SEQ ID NO: 25701 - RNA, 22 nt, Artificial Sequence
  Synthetic
gccacauccuucuacuaaacua

SEQ ID NO: 25702 - RNA, 22 nt, Artificial Sequence
  Synthetic
ccacauccuucuacuaaacuaa

SEQ ID NO: 25703 - RNA, 22 nt, Artificial Sequence
  Synthetic
cacauccuucuacuaaacuaau

SEQ ID NO: 25704 - RNA, 22 nt, Artificial Sequence
  Synthetic
acauccuucuacuaaacuaauc

SEQ ID NO: 25705 - RNA, 22 nt, Artificial Sequence
  Synthetic
cauccuucuacuaaacuaauca

SEQ ID NO: 25706 - RNA, 22 nt, Artificial Sequence
  Synthetic
auccuucuacuaaacuaaucau

SEQ ID NO: 25707 - RNA, 22 nt, Artificial Sequence
  Synthetic
uccuucuacuaaacuaaucauu

SEQ ID NO: 25708 - RNA, 22 nt, Artificial Sequence
  Synthetic
ccuucuacuaaacuaaucauuc

SEQ ID NO: 25709 - RNA, 22 nt, Artificial Sequence
  Synthetic
cuucuacuaaacuaaucauucc

SEQ ID NO: 25710 - RNA, 22 nt, Artificial Sequence
  Synthetic
uucuacuaaacuaaucauuccg

SEQ ID NO: 25711 - RNA, 22 nt, Artificial Sequence
  Synthetic
ucuacuaaacuaaucauuccgc

SEQ ID NO: 25712 - RNA, 22 nt, Artificial Sequence
  Synthetic
cuacuaaacuaaucauuccgca

SEQ ID NO: 25713 - RNA, 22 nt, Artificial Sequence
  Synthetic
uacuaaacuaaucauuccgcag

SEQ ID NO: 25714 - RNA, 22 nt, Artificial Sequence
  Synthetic
acuaaacuaaucauuccgcaga

SEQ ID NO: 25715 - RNA, 22 nt, Artificial Sequence
  Synthetic
cuaaacuaaucauuccgcagac

SEQ ID NO: 25716 - RNA, 22 nt, Artificial Sequence
  Synthetic
uaaacuaaucauuccgcagacu

SEQ ID NO: 25717 - RNA, 22 nt, Artificial Sequence
  Synthetic
aaacuaaucauuccgcagacuu

SEQ ID NO: 25718 - RNA, 22 nt, Artificial Sequence
  Synthetic
aacuaaucauuccgcagacuug

SEQ ID NO: 25719 - RNA, 22 nt, Artificial Sequence
  Synthetic
acuaaucauuccgcagacuugg

SEQ ID NO: 25720 - RNA, 22 nt, Artificial Sequence
  Synthetic
cuaaucauuccgcagacuugga

SEQ ID NO: 25721 - RNA, 22 nt, Artificial Sequence
  Synthetic
uaaucauuccgcagacuuggau

SEQ ID NO: 25722 - RNA, 22 nt, Artificial Sequence
  Synthetic
aaucauuccgcagacuuggaug

SEQ ID NO: 25723 - RNA, 22 nt, Artificial Sequence
  Synthetic
aucauuccgcagacuuggaugc

SEQ ID NO: 25724 - RNA, 22 nt, Artificial Sequence
  Synthetic
ucauuccgcagacuuggaugca

SEQ ID NO: 25725 - RNA, 22 nt, Artificial Sequence
  Synthetic
cauuccgcagacuuggaugcac

SEQ ID NO: 25726 - RNA, 22 nt, Artificial Sequence
  Synthetic
auuccgcagacuuggaugcacc

SEQ ID NO: 25727 - RNA, 22 nt, Artificial Sequence
  Synthetic
uuccgcagacuuggaugcaccc

SEQ ID NO: 25728 - RNA, 22 nt, Artificial Sequence
  Synthetic
uccgcagacuuggaugcacccc

SEQ ID NO: 25729 - RNA, 22 nt, Artificial Sequence
  Synthetic
ccgcagacuuggaugcaccccg

SEQ ID NO: 25730 - RNA, 22 nt, Artificial Sequence
  Synthetic
cgcagacuuggaugcaccccgc

SEQ ID NO: 25731 - RNA, 22 nt, Artificial Sequence
  Synthetic
gcagacuuggaugcaccccgcu

SEQ ID NO: 25732 - RNA, 22 nt, Artificial Sequence
  Synthetic
cagacuuggaugcaccccgcuu

SEQ ID NO: 25733 - RNA, 22 nt, Artificial Sequence
  Synthetic
agacuuggaugcaccccgcuuc

SEQ ID NO: 25734 - RNA, 22 nt, Artificial Sequence
  Synthetic
gacuuggaugcaccccgcuucc

SEQ ID NO: 25735 - RNA, 22 nt, Artificial Sequence
  Synthetic
acuuggaugcaccccgcuucca

SEQ ID NO: 25736 - RNA, 22 nt, Artificial Sequence
  Synthetic
cuuggaugcaccccgcuuccac

SEQ ID NO: 25737 - RNA, 22 nt, Artificial Sequence
  Synthetic
uuggaugcaccccgcuuccaca

SEQ ID NO: 25738 - RNA, 22 nt, Artificial Sequence
  Synthetic
uggaugcaccccgcuuccacau

SEQ ID NO: 25739 - RNA, 22 nt, Artificial Sequence
  Synthetic
ggaugcaccccgcuuccacaug

SEQ ID NO: 25740 - RNA, 22 nt, Artificial Sequence
  Synthetic
gaugcaccccgcuuccacaugg

SEQ ID NO: 25741 - RNA, 22 nt, Artificial Sequence
  Synthetic
augcaccccgcuuccacaugga

SEQ ID NO: 25742 - RNA, 22 nt, Artificial Sequence
  Synthetic
ugcaccccgcuuccacauggac

SEQ ID NO: 25743 - RNA, 22 nt, Artificial Sequence
  Synthetic
gcaccccgcuuccacauggacu

SEQ ID NO: 25744 - RNA, 22 nt, Artificial Sequence
  Synthetic
caccccgcuuccacauggacuu

SEQ ID NO: 25745 - RNA, 22 nt, Artificial Sequence
  Synthetic
accccgcuuccacauggacuuu

SEQ ID NO: 25746 - RNA, 22 nt, Artificial Sequence
  Synthetic
ccccgcuuccacauggacuuua

SEQ ID NO: 25747 - RNA, 22 nt, Artificial Sequence
  Synthetic
cccgcuuccacauggacuuuac

SEQ ID NO: 25748 - RNA, 22 nt, Artificial Sequence
  Synthetic
ccgcuuccacauggacuuuacc

SEQ ID NO: 25749 - RNA, 22 nt, Artificial Sequence
  Synthetic
cgcuuccacauggacuuuacca

SEQ ID NO: 25750 - RNA, 22 nt, Artificial Sequence
  Synthetic
gcuuccacauggacuuuaccau

SEQ ID NO: 25751 - RNA, 22 nt, Artificial Sequence
  Synthetic
cuuccacauggacuuuaccauc

SEQ ID NO: 25752 - RNA, 22 nt, Artificial Sequence
  Synthetic
uuccacauggacuuuaccaucc

SEQ ID NO: 25753 - RNA, 22 nt, Artificial Sequence
  Synthetic
uccacauggacuuuaccaucca

SEQ ID NO: 25754 - RNA, 22 nt, Artificial Sequence
  Synthetic
ccacauggacuuuaccauccac

SEQ ID NO: 25755 - RNA, 22 nt, Artificial Sequence
  Synthetic
cacauggacuuuaccauccaca

SEQ ID NO: 25756 - RNA, 22 nt, Artificial Sequence
  Synthetic
acauggacuuuaccauccacaa

SEQ ID NO: 25757 - RNA, 22 nt, Artificial Sequence
  Synthetic
cauggacuuuaccauccacaac

SEQ ID NO: 25758 - RNA, 22 nt, Artificial Sequence
  Synthetic
auggacuuuaccauccacaacu

SEQ ID NO: 25759 - RNA, 22 nt, Artificial Sequence
  Synthetic
uggacuuuaccauccacaacuu

SEQ ID NO: 25760 - RNA, 22 nt, Artificial Sequence
  Synthetic
ggacuuuaccauccacaacuua

SEQ ID NO: 25761 - RNA, 22 nt, Artificial Sequence
  Synthetic
gacuuuaccauccacaacuuac

SEQ ID NO: 25762 - RNA, 22 nt, Artificial Sequence
  Synthetic
acuuuaccauccacaacuuacc

SEQ ID NO: 25763 - RNA, 22 nt, Artificial Sequence
  Synthetic
cuuuaccauccacaacuuacca

SEQ ID NO: 25764 - RNA, 22 nt, Artificial Sequence
  Synthetic
uuuaccauccacaacuuaccag

SEQ ID NO: 25765 - RNA, 22 nt, Artificial Sequence
  Synthetic
uuaccauccacaacuuaccagc

SEQ ID NO: 25766 - RNA, 22 nt, Artificial Sequence
  Synthetic
uaccauccacaacuuaccagca

SEQ ID NO: 25767 - RNA, 22 nt, Artificial Sequence
  Synthetic
accauccacaacuuaccagcaa

SEQ ID NO: 25768 - RNA, 22 nt, Artificial Sequence
  Synthetic
ccauccacaacuuaccagcaag

SEQ ID NO: 25769 - RNA, 22 nt, Artificial Sequence
  Synthetic
cauccacaacuuaccagcaaga

SEQ ID NO: 25770 - RNA, 22 nt, Artificial Sequence
  Synthetic
auccacaacuuaccagcaagaa

SEQ ID NO: 25771 - RNA, 22 nt, Artificial Sequence
  Synthetic
uccacaacuuaccagcaagaau

SEQ ID NO: 25772 - RNA, 22 nt, Artificial Sequence
  Synthetic
ccacaacuuaccagcaagaauu

SEQ ID NO: 25773 - RNA, 22 nt, Artificial Sequence
  Synthetic
cacaacuuaccagcaagaauuu

SEQ ID NO: 25774 - RNA, 22 nt, Artificial Sequence
  Synthetic
acaacuuaccagcaagaauuug

SEQ ID NO: 25775 - RNA, 22 nt, Artificial Sequence
  Synthetic
caacuuaccagcaagaauuugg

SEQ ID NO: 25776 - RNA, 22 nt, Artificial Sequence
  Synthetic
aacuuaccagcaagaauuugga

SEQ ID NO: 25777 - RNA, 22 nt, Artificial Sequence
  Synthetic
acuuaccagcaagaauuuggaa

SEQ ID NO: 25778 - RNA, 22 nt, Artificial Sequence
  Synthetic
cuuaccagcaagaauuuggaag

SEQ ID NO: 25779 - RNA, 22 nt, Artificial Sequence
  Synthetic
uuaccagcaagaauuuggaaga

SEQ ID NO: 25780 - RNA, 22 nt, Artificial Sequence
  Synthetic
uaccagcaagaauuuggaagau

SEQ ID NO: 25781 - RNA, 22 nt, Artificial Sequence
  Synthetic
accagcaagaauuuggaagauu

SEQ ID NO: 25782 - RNA, 22 nt, Artificial Sequence
  Synthetic
ccagcaagaauuuggaagauuc

SEQ ID NO: 25783 - RNA, 22 nt, Artificial Sequence
  Synthetic
cagcaagaauuuggaagauucc

SEQ ID NO: 25784 - RNA, 22 nt, Artificial Sequence
  Synthetic
agcaagaauuuggaagauucca

SEQ ID NO: 25785 - RNA, 22 nt, Artificial Sequence
  Synthetic
gcaagaauuuggaagauuccag

SEQ ID NO: 25786 - RNA, 22 nt, Artificial Sequence
  Synthetic
caagaauuuggaagauuccagu

SEQ ID NO: 25787 - RNA, 22 nt, Artificial Sequence
  Synthetic
aagaauuuggaagauuccagug

SEQ ID NO: 25788 - RNA, 22 nt, Artificial Sequence
  Synthetic
agaauuuggaagauuccaguga

SEQ ID NO: 25789 - RNA, 22 nt, Artificial Sequence
  Synthetic
gaauuuggaagauuccagugau

SEQ ID NO: 25790 - RNA, 22 nt, Artificial Sequence
  Synthetic
aauuuggaagauuccagugaug

SEQ ID NO: 25791 - RNA, 22 nt, Artificial Sequence
  Synthetic
auuuggaagauuccagugaugu

SEQ ID NO: 25792 - RNA, 22 nt, Artificial Sequence
  Synthetic
uuuggaagauuccagugaugua

SEQ ID NO: 25793 - RNA, 22 nt, Artificial Sequence
  Synthetic
uuggaagauuccagugauguaa

SEQ ID NO: 25794 - RNA, 22 nt, Artificial Sequence
  Synthetic
uggaagauuccagugauguaaa

SEQ ID NO: 25795 - RNA, 22 nt, Artificial Sequence
  Synthetic
ggaagauuccagugauguaaaa

SEQ ID NO: 25796 - RNA, 22 nt, Artificial Sequence
  Synthetic
gaagauuccagugauguaaaac

SEQ ID NO: 25797 - RNA, 22 nt, Artificial Sequence
  Synthetic
aagauuccagugauguaaaacc

SEQ ID NO: 25798 - RNA, 22 nt, Artificial Sequence
  Synthetic
agauuccagugauguaaaaccu

SEQ ID NO: 25799 - RNA, 22 nt, Artificial Sequence
  Synthetic
gauuccagugauguaaaaccug

SEQ ID NO: 25800 - RNA, 22 nt, Artificial Sequence
  Synthetic
auuccagugauguaaaaccugc

SEQ ID NO: 25801 - RNA, 22 nt, Artificial Sequence
  Synthetic
uuccagugauguaaaaccugcc

SEQ ID NO: 25802 - RNA, 22 nt, Artificial Sequence
  Synthetic
uccagugauguaaaaccugccc

SEQ ID NO: 25803 - RNA, 22 nt, Artificial Sequence
  Synthetic
ccagugauguaaaaccugcccc

SEQ ID NO: 25804 - RNA, 22 nt, Artificial Sequence
  Synthetic
cagugauguaaaaccugccccc

SEQ ID NO: 25805 - RNA, 22 nt, Artificial Sequence
  Synthetic
agugauguaaaaccugcccccc

SEQ ID NO: 25806 - RNA, 22 nt, Artificial Sequence
  Synthetic
gugauguaaaaccugccccccu

SEQ ID NO: 25807 - RNA, 22 nt, Artificial Sequence
  Synthetic
ugauguaaaaccugccccccuu

SEQ ID NO: 25808 - RNA, 22 nt, Artificial Sequence
  Synthetic
gauguaaaaccugccccccuug

SEQ ID NO: 25809 - RNA, 22 nt, Artificial Sequence
  Synthetic
auguaaaaccugccccccuugg

SEQ ID NO: 25810 - RNA, 22 nt, Artificial Sequence
  Synthetic
uguaaaaccugccccccuuggu

SEQ ID NO: 25811 - RNA, 22 nt, Artificial Sequence
  Synthetic
guaaaaccugccccccuuggug

SEQ ID NO: 25812 - RNA, 22 nt, Artificial Sequence
  Synthetic
uaaaaccugccccccuugguga

SEQ ID NO: 25813 - RNA, 22 nt, Artificial Sequence
  Synthetic
aaaaccugccccccuuggugag

SEQ ID NO: 25814 - RNA, 22 nt, Artificial Sequence
  Synthetic
aaaccugccccccuuggugagg

SEQ ID NO: 25815 - RNA, 22 nt, Artificial Sequence
  Synthetic
aaccugccccccuuggugaggg

SEQ ID NO: 25816 - RNA, 22 nt, Artificial Sequence
  Synthetic
accugccccccuuggugagggu

SEQ ID NO: 25817 - RNA, 22 nt, Artificial Sequence
  Synthetic
ccugccccccuuggugagggug

SEQ ID NO: 25818 - RNA, 22 nt, Artificial Sequence
  Synthetic
cugccccccuuggugaggguga

SEQ ID NO: 25819 - RNA, 22 nt, Artificial Sequence
  Synthetic
ugccccccuuggugagggugaa

SEQ ID NO: 25820 - RNA, 22 nt, Artificial Sequence
  Synthetic
gccccccuuggugagggugaag

SEQ ID NO: 25821 - RNA, 22 nt, Artificial Sequence
  Synthetic
ccccccuuggugagggugaaga

SEQ ID NO: 25822 - RNA, 22 nt, Artificial Sequence
  Synthetic
cccccuuggugagggugaagag

SEQ ID NO: 25823 - RNA, 22 nt, Artificial Sequence
  Synthetic
ccccuuggugagggugaagagu

SEQ ID NO: 25824 - RNA, 22 nt, Artificial Sequence
  Synthetic
cccuuggugagggugaagaguu

SEQ ID NO: 25825 - RNA, 22 nt, Artificial Sequence
  Synthetic
ccuuggugagggugaagaguug

SEQ ID NO: 25826 - RNA, 22 nt, Artificial Sequence
  Synthetic
cuuggugagggugaagaguugg

SEQ ID NO: 25827 - RNA, 22 nt, Artificial Sequence
  Synthetic
uuggugagggugaagaguuggc

SEQ ID NO: 25828 - RNA, 22 nt, Artificial Sequence
  Synthetic
uggugagggugaagaguuggca

SEQ ID NO: 25829 - RNA, 22 nt, Artificial Sequence
  Synthetic
ggugagggugaagaguuggcag

SEQ ID NO: 25830 - RNA, 22 nt, Artificial Sequence
  Synthetic
gugagggugaagaguuggcaga

SEQ ID NO: 25831 - RNA, 22 nt, Artificial Sequence
  Synthetic
ugagggugaagaguuggcagaa

SEQ ID NO: 25832 - RNA, 22 nt, Artificial Sequence
  Synthetic
gagggugaagaguuggcagaag

SEQ ID NO: 25833 - RNA, 22 nt, Artificial Sequence
  Synthetic
agggugaagaguuggcagaaga

SEQ ID NO: 25834 - RNA, 22 nt, Artificial Sequence
  Synthetic
gggugaagaguuggcagaagaa

SEQ ID NO: 25835 - RNA, 22 nt, Artificial Sequence
  Synthetic
ggugaagaguuggcagaagaac

SEQ ID NO: 25836 - RNA, 22 nt, Artificial Sequence
  Synthetic
gugaagaguuggcagaagaaca

SEQ ID NO: 25837 - RNA, 22 nt, Artificial Sequence
  Synthetic
ugaagaguuggcagaagaacag

SEQ ID NO: 25838 - RNA, 22 nt, Artificial Sequence
  Synthetic
gaagaguuggcagaagaacagg

SEQ ID NO: 25839 - RNA, 22 nt, Artificial Sequence
  Synthetic
aagaguuggcagaagaacagga

SEQ ID NO: 25840 - RNA, 22 nt, Artificial Sequence
  Synthetic
agaguuggcagaagaacaggaa

SEQ ID NO: 25841 - RNA, 22 nt, Artificial Sequence
  Synthetic
gaguuggcagaagaacaggaac

SEQ ID NO: 25842 - RNA, 22 nt, Artificial Sequence
  Synthetic
aguuggcagaagaacaggaaca

SEQ ID NO: 25843 - RNA, 22 nt, Artificial Sequence
  Synthetic
guuggcagaagaacaggaacag

SEQ ID NO: 25844 - RNA, 22 nt, Artificial Sequence
  Synthetic
uuggcagaagaacaggaacaga

SEQ ID NO: 25845 - RNA, 22 nt, Artificial Sequence
  Synthetic
uggcagaagaacaggaacagag

SEQ ID NO: 25846 - RNA, 22 nt, Artificial Sequence
  Synthetic
ggcagaagaacaggaacagaga

SEQ ID NO: 25847 - RNA, 22 nt, Artificial Sequence
  Synthetic
gcagaagaacaggaacagagac

SEQ ID NO: 25848 - RNA, 22 nt, Artificial Sequence
  Synthetic
cagaagaacaggaacagagaca

SEQ ID NO: 25849 - RNA, 22 nt, Artificial Sequence
  Synthetic
agaagaacaggaacagagacag

SEQ ID NO: 25850 - RNA, 22 nt, Artificial Sequence
  Synthetic
gaagaacaggaacagagacaga

SEQ ID NO: 25851 - RNA, 22 nt, Artificial Sequence
  Synthetic
aagaacaggaacagagacagaa

SEQ ID NO: 25852 - RNA, 22 nt, Artificial Sequence
  Synthetic
agaacaggaacagagacagaau

SEQ ID NO: 25853 - RNA, 22 nt, Artificial Sequence
  Synthetic
gaacaggaacagagacagaaug

SEQ ID NO: 25854 - RNA, 22 nt, Artificial Sequence
  Synthetic
aacaggaacagagacagaaugc

SEQ ID NO: 25855 - RNA, 22 nt, Artificial Sequence
  Synthetic
acaggaacagagacagaaugcu

SEQ ID NO: 25856 - RNA, 22 nt, Artificial Sequence
  Synthetic
caggaacagagacagaaugcug

SEQ ID NO: 25857 - RNA, 22 nt, Artificial Sequence
  Synthetic
aggaacagagacagaaugcuga

SEQ ID NO: 25858 - RNA, 22 nt, Artificial Sequence
  Synthetic
ggaacagagacagaaugcugaa

SEQ ID NO: 25859 - RNA, 22 nt, Artificial Sequence
  Synthetic
gaacagagacagaaugcugaag

SEQ ID NO: 25860 - RNA, 22 nt, Artificial Sequence
  Synthetic
aacagagacagaaugcugaaga

SEQ ID NO: 25861 - RNA, 22 nt, Artificial Sequence
  Synthetic
acagagacagaaugcugaagau

SEQ ID NO: 25862 - RNA, 22 nt, Artificial Sequence
  Synthetic
cagagacagaaugcugaagaug

SEQ ID NO: 25863 - RNA, 22 nt, Artificial Sequence
  Synthetic
agagacagaaugcugaagauga

SEQ ID NO: 25864 - RNA, 22 nt, Artificial Sequence
  Synthetic
gagacagaaugcugaagaugau

SEQ ID NO: 25865 - RNA, 22 nt, Artificial Sequence
  Synthetic
agacagaaugcugaagaugauc

SEQ ID NO: 25866 - RNA, 22 nt, Artificial Sequence
  Synthetic
gacagaaugcugaagaugaucg

SEQ ID NO: 25867 - RNA, 22 nt, Artificial Sequence
  Synthetic
acagaaugcugaagaugaucga

SEQ ID NO: 25868 - RNA, 22 nt, Artificial Sequence
  Synthetic
cagaaugcugaagaugaucgac

SEQ ID NO: 25869 - RNA, 22 nt, Artificial Sequence
  Synthetic
agaaugcugaagaugaucgaca

SEQ ID NO: 25870 - RNA, 22 nt, Artificial Sequence
  Synthetic
gaaugcugaagaugaucgacag

SEQ ID NO: 25871 - RNA, 22 nt, Artificial Sequence
  Synthetic
aaugcugaagaugaucgacagg

SEQ ID NO: 25872 - RNA, 22 nt, Artificial Sequence
  Synthetic
augcugaagaugaucgacagga

SEQ ID NO: 25873 - RNA, 22 nt, Artificial Sequence
  Synthetic
ugcugaagaugaucgacaggau

SEQ ID NO: 25874 - RNA, 22 nt, Artificial Sequence
  Synthetic
gcugaagaugaucgacaggauc

SEQ ID NO: 25875 - RNA, 22 nt, Artificial Sequence
  Synthetic
cugaagaugaucgacaggauca

SEQ ID NO: 25876 - RNA, 22 nt, Artificial Sequence
  Synthetic
ugaagaugaucgacaggaucau

SEQ ID NO: 25877 - RNA, 22 nt, Artificial Sequence
  Synthetic
gaagaugaucgacaggaucaug

SEQ ID NO: 25878 - RNA, 22 nt, Artificial Sequence
  Synthetic
aagaugaucgacaggaucaugg

SEQ ID NO: 25879 - RNA, 22 nt, Artificial Sequence
  Synthetic
agaugaucgacaggaucauggu

SEQ ID NO: 25880 - RNA, 22 nt, Artificial Sequence
  Synthetic
gaugaucgacaggaucauggug

SEQ ID NO: 25881 - RNA, 22 nt, Artificial Sequence
  Synthetic
augaucgacaggaucauggugg

SEQ ID NO: 25882 - RNA, 22 nt, Artificial Sequence
  Synthetic
ugaucgacaggaucaugguggc

SEQ ID NO: 25883 - RNA, 22 nt, Artificial Sequence
  Synthetic
gaucgacaggaucaugguggcc

SEQ ID NO: 25884 - RNA, 22 nt, Artificial Sequence
  Synthetic
aucgacaggaucaugguggccu

SEQ ID NO: 25885 - RNA, 22 nt, Artificial Sequence
  Synthetic
ucgacaggaucaugguggccug

SEQ ID NO: 25886 - RNA, 22 nt, Artificial Sequence
  Synthetic
cgacaggaucaugguggccugg

SEQ ID NO: 25887 - RNA, 22 nt, Artificial Sequence
  Synthetic
gacaggaucaugguggccugga

SEQ ID NO: 25888 - RNA, 22 nt, Artificial Sequence
  Synthetic
acaggaucaugguggccuggac

SEQ ID NO: 25889 - RNA, 22 nt, Artificial Sequence
  Synthetic
caggaucaugguggccuggaca

SEQ ID NO: 25890 - RNA, 22 nt, Artificial Sequence
  Synthetic
aggaucaugguggccuggacag

SEQ ID NO: 25891 - RNA, 22 nt, Artificial Sequence
  Synthetic
ggaucaugguggccuggacaga

SEQ ID NO: 25892 - RNA, 22 nt, Artificial Sequence
  Synthetic
gaucaugguggccuggacagac

SEQ ID NO: 25893 - RNA, 22 nt, Artificial Sequence
  Synthetic
aucaugguggccuggacagacu

SEQ ID NO: 25894 - RNA, 22 nt, Artificial Sequence
  Synthetic
ucaugguggccuggacagacug

SEQ ID NO: 25895 - RNA, 22 nt, Artificial Sequence
  Synthetic
caugguggccuggacagacugc

SEQ ID NO: 25896 - RNA, 22 nt, Artificial Sequence
  Synthetic
augguggccuggacagacugca

SEQ ID NO: 25897 - RNA, 22 nt, Artificial Sequence
  Synthetic
ugguggccuggacagacugcag

SEQ ID NO: 25898 - RNA, 22 nt, Artificial Sequence
  Synthetic
gguggccuggacagacugcagc

SEQ ID NO: 25899 - RNA, 22 nt, Artificial Sequence
  Synthetic
guggccuggacagacugcagcc

SEQ ID NO: 25900 - RNA, 22 nt, Artificial Sequence
  Synthetic
uggccuggacagacugcagcca

SEQ ID NO: 25901 - RNA, 22 nt, Artificial Sequence
  Synthetic
ggccuggacagacugcagccau

SEQ ID NO: 25902 - RNA, 22 nt, Artificial Sequence
  Synthetic
gccuggacagacugcagccauu

SEQ ID NO: 25903 - RNA, 22 nt, Artificial Sequence
  Synthetic
ccuggacagacugcagccauuc

SEQ ID NO: 25904 - RNA, 22 nt, Artificial Sequence
  Synthetic
cuggacagacugcagccauucg

SEQ ID NO: 25905 - RNA, 22 nt, Artificial Sequence
  Synthetic
uggacagacugcagccauucgu

SEQ ID NO: 25906 - RNA, 22 nt, Artificial Sequence
  Synthetic
ggacagacugcagccauucguu

SEQ ID NO: 25907 - RNA, 22 nt, Artificial Sequence
  Synthetic
gacagacugcagccauucguuu

SEQ ID NO: 25908 - RNA, 22 nt, Artificial Sequence
  Synthetic
acagacugcagccauucguuug

SEQ ID NO: 25909 - RNA, 22 nt, Artificial Sequence
  Synthetic
cagacugcagccauucguuugg

SEQ ID NO: 25910 - RNA, 22 nt, Artificial Sequence
  Synthetic
agacugcagccauucguuuggu

SEQ ID NO: 25911 - RNA, 22 nt, Artificial Sequence
  Synthetic
gacugcagccauucguuuggug

SEQ ID NO: 25912 - RNA, 22 nt, Artificial Sequence
  Synthetic
acugcagccauucguuugguga

SEQ ID NO: 25913 - RNA, 22 nt, Artificial Sequence
  Synthetic
cugcagccauucguuuggugau

SEQ ID NO: 25914 - RNA, 22 nt, Artificial Sequence
  Synthetic
ugcagccauucguuuggugaug

SEQ ID NO: 25915 - RNA, 22 nt, Artificial Sequence
  Synthetic
gcagccauucguuuggugauga

SEQ ID NO: 25916 - RNA, 22 nt, Artificial Sequence
  Synthetic
cagccauucguuuggugaugau

SEQ ID NO: 25917 - RNA, 22 nt, Artificial Sequence
  Synthetic
agccauucguuuggugaugaug

SEQ ID NO: 25918 - RNA, 22 nt, Artificial Sequence
  Synthetic
gccauucguuuggugaugauga

SEQ ID NO: 25919 - RNA, 22 nt, Artificial Sequence
  Synthetic
ccauucguuuggugaugaugag

SEQ ID NO: 25920 - RNA, 22 nt, Artificial Sequence
  Synthetic
cauucguuuggugaugaugaga

SEQ ID NO: 25921 - RNA, 22 nt, Artificial Sequence
  Synthetic
auucguuuggugaugaugagaa

SEQ ID NO: 25922 - RNA, 22 nt, Artificial Sequence
  Synthetic
uucguuuggugaugaugagaaa

SEQ ID NO: 25923 - RNA, 22 nt, Artificial Sequence
  Synthetic
ucguuuggugaugaugagaaac

SEQ ID NO: 25924 - RNA, 22 nt, Artificial Sequence
  Synthetic
cguuuggugaugaugagaaaca

SEQ ID NO: 25925 - RNA, 22 nt, Artificial Sequence
  Synthetic
guuuggugaugaugagaaacag

SEQ ID NO: 25926 - RNA, 22 nt, Artificial Sequence
  Synthetic
uuuggugaugaugagaaacagu

SEQ ID NO: 25927 - RNA, 22 nt, Artificial Sequence
  Synthetic
uuggugaugaugagaaacagug

SEQ ID NO: 25928 - RNA, 22 nt, Artificial Sequence
  Synthetic
uggugaugaugagaaacagugg

SEQ ID NO: 25929 - RNA, 22 nt, Artificial Sequence
  Synthetic
ggugaugaugagaaacaguggu

SEQ ID NO: 25930 - RNA, 22 nt, Artificial Sequence
  Synthetic
gugaugaugagaaacaguggug

SEQ ID NO: 25931 - RNA, 22 nt, Artificial Sequence
  Synthetic
ugaugaugagaaacaguggugg

SEQ ID NO: 25932 - RNA, 22 nt, Artificial Sequence
  Synthetic
gaugaugagaaacaguggugga

SEQ ID NO: 25933 - RNA, 22 nt, Artificial Sequence
  Synthetic
augaugagaaacagugguggac

SEQ ID NO: 25934 - RNA, 22 nt, Artificial Sequence
  Synthetic
ugaugagaaacagugguggaca

SEQ ID NO: 25935 - RNA, 22 nt, Artificial Sequence
  Synthetic
gaugagaaacagugguggacau

SEQ ID NO: 25936 - RNA, 22 nt, Artificial Sequence
  Synthetic
augagaaacagugguggacauu

SEQ ID NO: 25937 - RNA, 22 nt, Artificial Sequence
  Synthetic
ugagaaacagugguggacauuu

SEQ ID NO: 25938 - RNA, 22 nt, Artificial Sequence
  Synthetic
gagaaacagugguggacauuuc

SEQ ID NO: 25939 - RNA, 22 nt, Artificial Sequence
  Synthetic
agaaacagugguggacauuucc

SEQ ID NO: 25940 - RNA, 22 nt, Artificial Sequence
  Synthetic
gaaacagugguggacauuuccu

SEQ ID NO: 25941 - RNA, 22 nt, Artificial Sequence
  Synthetic
aaacagugguggacauuuccug

SEQ ID NO: 25942 - RNA, 22 nt, Artificial Sequence
  Synthetic
aacagugguggacauuuccuga

SEQ ID NO: 25943 - RNA, 22 nt, Artificial Sequence
  Synthetic
acagugguggacauuuccugag

SEQ ID NO: 25944 - RNA, 22 nt, Artificial Sequence
  Synthetic
cagugguggacauuuccugagg

SEQ ID NO: 25945 - RNA, 22 nt, Artificial Sequence
  Synthetic
agugguggacauuuccugagga

SEQ ID NO: 25946 - RNA, 22 nt, Artificial Sequence
  Synthetic
gugguggacauuuccugaggaa

SEQ ID NO: 25947 - RNA, 22 nt, Artificial Sequence
  Synthetic
ugguggacauuuccugaggaag

SEQ ID NO: 25948 - RNA, 22 nt, Artificial Sequence
  Synthetic
gguggacauuuccugaggaaga

SEQ ID NO: 25949 - RNA, 22 nt, Artificial Sequence
  Synthetic
guggacauuuccugaggaagag

SEQ ID NO: 25950 - RNA, 22 nt, Artificial Sequence
  Synthetic
uggacauuuccugaggaagagg

SEQ ID NO: 25951 - RNA, 22 nt, Artificial Sequence
  Synthetic
ggacauuuccugaggaagaggu

SEQ ID NO: 25952 - RNA, 22 nt, Artificial Sequence
  Synthetic
gacauuuccugaggaagaggug

SEQ ID NO: 25953 - RNA, 22 nt, Artificial Sequence
  Synthetic
acauuuccugaggaagaggugc

SEQ ID NO: 25954 - RNA, 22 nt, Artificial Sequence
  Synthetic
cauuuccugaggaagaggugcu

SEQ ID NO: 25955 - RNA, 22 nt, Artificial Sequence
  Synthetic
auuuccugaggaagaggugcua

SEQ ID NO: 25956 - RNA, 22 nt, Artificial Sequence
  Synthetic
uuuccugaggaagaggugcuac

SEQ ID NO: 25957 - RNA, 22 nt, Artificial Sequence
  Synthetic
uuccugaggaagaggugcuaca

SEQ ID NO: 25958 - RNA, 22 nt, Artificial Sequence
  Synthetic
uccugaggaagaggugcuacag

SEQ ID NO: 25959 - RNA, 22 nt, Artificial Sequence
  Synthetic
ccugaggaagaggugcuacagu

SEQ ID NO: 25960 - RNA, 22 nt, Artificial Sequence
  Synthetic
cugaggaagaggugcuacaguu

SEQ ID NO: 25961 - RNA, 22 nt, Artificial Sequence
  Synthetic
ugaggaagaggugcuacaguuc

SEQ ID NO: 25962 - RNA, 22 nt, Artificial Sequence
  Synthetic
gaggaagaggugcuacaguucu

SEQ ID NO: 25963 - RNA, 22 nt, Artificial Sequence
  Synthetic
aggaagaggugcuacaguucug

SEQ ID NO: 25964 - RNA, 22 nt, Artificial Sequence
  Synthetic
ggaagaggugcuacaguucugc

SEQ ID NO: 25965 - RNA, 22 nt, Artificial Sequence
  Synthetic
gaagaggugcuacaguucugcc

SEQ ID NO: 25966 - RNA, 22 nt, Artificial Sequence
  Synthetic
aagaggugcuacaguucugcca

SEQ ID NO: 25967 - RNA, 22 nt, Artificial Sequence
  Synthetic
agaggugcuacaguucugccag

SEQ ID NO: 25968 - RNA, 22 nt, Artificial Sequence
  Synthetic
gaggugcuacaguucugccaga

SEQ ID NO: 25969 - RNA, 22 nt, Artificial Sequence
  Synthetic
aggugcuacaguucugccagag

SEQ ID NO: 25970 - RNA, 22 nt, Artificial Sequence
  Synthetic
ggugcuacaguucugccagaga

SEQ ID NO: 25971 - RNA, 22 nt, Artificial Sequence
  Synthetic
gugcuacaguucugccagagau

SEQ ID NO: 25972 - RNA, 22 nt, Artificial Sequence
  Synthetic
ugcuacaguucugccagagauc

SEQ ID NO: 25973 - RNA, 22 nt, Artificial Sequence
  Synthetic
gcuacaguucugccagagauca

SEQ ID NO: 25974 - RNA, 22 nt, Artificial Sequence
  Synthetic
cuacaguucugccagagaucag

SEQ ID NO: 25975 - RNA, 22 nt, Artificial Sequence
  Synthetic
uacaguucugccagagaucagu

SEQ ID NO: 25976 - RNA, 22 nt, Artificial Sequence
  Synthetic
acaguucugccagagaucaguu

SEQ ID NO: 25977 - RNA, 22 nt, Artificial Sequence
  Synthetic
caguucugccagagaucaguug

SEQ ID NO: 25978 - RNA, 22 nt, Artificial Sequence
  Synthetic
aguucugccagagaucaguugc

SEQ ID NO: 25979 - RNA, 22 nt, Artificial Sequence
  Synthetic
guucugccagagaucaguugcg

SEQ ID NO: 25980 - RNA, 22 nt, Artificial Sequence
  Synthetic
uucugccagagaucaguugcgu

SEQ ID NO: 25981 - RNA, 22 nt, Artificial Sequence
  Synthetic
ucugccagagaucaguugcgug

SEQ ID NO: 25982 - RNA, 22 nt, Artificial Sequence
  Synthetic
cugccagagaucaguugcgugu

SEQ ID NO: 25983 - RNA, 22 nt, Artificial Sequence
  Synthetic
ugccagagaucaguugcguguc

SEQ ID NO: 25984 - RNA, 22 nt, Artificial Sequence
  Synthetic
gccagagaucaguugcgugucc

SEQ ID NO: 25985 - RNA, 22 nt, Artificial Sequence
  Synthetic
ccagagaucaguugcgugucca

SEQ ID NO: 25986 - RNA, 22 nt, Artificial Sequence
  Synthetic
cagagaucaguugcguguccau

SEQ ID NO: 25987 - RNA, 22 nt, Artificial Sequence
  Synthetic
agagaucaguugcguguccauu

SEQ ID NO: 25988 - RNA, 22 nt, Artificial Sequence
  Synthetic
gagaucaguugcguguccauug

SEQ ID NO: 25989 - RNA, 22 nt, Artificial Sequence
  Synthetic
agaucaguugcguguccauugc

SEQ ID NO: 25990 - RNA, 22 nt, Artificial Sequence
  Synthetic
gaucaguugcguguccauugcc

SEQ ID NO: 25991 - RNA, 22 nt, Artificial Sequence
  Synthetic
aucaguugcguguccauugccc

SEQ ID NO: 25992 - RNA, 22 nt, Artificial Sequence
  Synthetic
ucaguugcguguccauugccca

SEQ ID NO: 25993 - RNA, 22 nt, Artificial Sequence
  Synthetic
caguugcguguccauugcccac

SEQ ID NO: 25994 - RNA, 22 nt, Artificial Sequence
  Synthetic
aguugcguguccauugcccacg

SEQ ID NO: 25995 - RNA, 22 nt, Artificial Sequence
  Synthetic
guugcguguccauugcccacga

SEQ ID NO: 25996 - RNA, 22 nt, Artificial Sequence
  Synthetic
uugcguguccauugcccacgau

SEQ ID NO: 25997 - RNA, 22 nt, Artificial Sequence
  Synthetic
ugcguguccauugcccacgauc

SEQ ID NO: 25998 - RNA, 22 nt, Artificial Sequence
  Synthetic
gcguguccauugcccacgaucc

SEQ ID NO: 25999 - RNA, 22 nt, Artificial Sequence
  Synthetic
cguguccauugcccacgaucca

SEQ ID NO: 26000 - RNA, 22 nt, Artificial Sequence
  Synthetic
guguccauugcccacgauccau

SEQ ID NO: 26001 - RNA, 22 nt, Artificial Sequence
  Synthetic
uguccauugcccacgauccauu

SEQ ID NO: 26002 - RNA, 22 nt, Artificial Sequence
  Synthetic
guccauugcccacgauccauug

SEQ ID NO: 26003 - RNA, 22 nt, Artificial Sequence
  Synthetic
uccauugcccacgauccauugg

SEQ ID NO: 26004 - RNA, 22 nt, Artificial Sequence
  Synthetic
ccauugcccacgauccauuggc

SEQ ID NO: 26005 - RNA, 22 nt, Artificial Sequence
  Synthetic
cauugcccacgauccauuggcu

SEQ ID NO: 26006 - RNA, 22 nt, Artificial Sequence
  Synthetic
auugcccacgauccauuggcug

SEQ ID NO: 26007 - RNA, 22 nt, Artificial Sequence
  Synthetic
uugcccacgauccauuggcuga

SEQ ID NO: 26008 - RNA, 22 nt, Artificial Sequence
  Synthetic
ugcccacgauccauuggcugac

SEQ ID NO: 26009 - RNA, 22 nt, Artificial Sequence
  Synthetic
gcccacgauccauuggcugacg

SEQ ID NO: 26010 - RNA, 22 nt, Artificial Sequence
  Synthetic
cccacgauccauuggcugacga

SEQ ID NO: 26011 - RNA, 22 nt, Artificial Sequence
  Synthetic
ccacgauccauuggcugacgau

SEQ ID NO: 26012 - RNA, 22 nt, Artificial Sequence
  Synthetic
cacgauccauuggcugacgauc

SEQ ID NO: 26013 - RNA, 22 nt, Artificial Sequence
  Synthetic
acgauccauuggcugacgaucg

SEQ ID NO: 26014 - RNA, 22 nt, Artificial Sequence
  Synthetic
cgauccauuggcugacgaucgu

SEQ ID NO: 26015 - RNA, 22 nt, Artificial Sequence
  Synthetic
gauccauuggcugacgaucgug

SEQ ID NO: 26016 - RNA, 22 nt, Artificial Sequence
  Synthetic
auccauuggcugacgaucgugg

SEQ ID NO: 26017 - RNA, 22 nt, Artificial Sequence
  Synthetic
uccauuggcugacgaucgugga

SEQ ID NO: 26018 - RNA, 22 nt, Artificial Sequence
  Synthetic
ccauuggcugacgaucguggag

SEQ ID NO: 26019 - RNA, 22 nt, Artificial Sequence
  Synthetic
cauuggcugacgaucguggaga

SEQ ID NO: 26020 - RNA, 22 nt, Artificial Sequence
  Synthetic
auuggcugacgaucguggagac

SEQ ID NO: 26021 - RNA, 22 nt, Artificial Sequence
  Synthetic
uuggcugacgaucguggagacg

SEQ ID NO: 26022 - RNA, 22 nt, Artificial Sequence
  Synthetic
uggcugacgaucguggagacga

SEQ ID NO: 26023 - RNA, 22 nt, Artificial Sequence
  Synthetic
ggcugacgaucguggagacgaa

SEQ ID NO: 26024 - RNA, 22 nt, Artificial Sequence
  Synthetic
gcugacgaucguggagacgaac

SEQ ID NO: 26025 - RNA, 22 nt, Artificial Sequence
  Synthetic
cugacgaucguggagacgaaca

SEQ ID NO: 26026 - RNA, 22 nt, Artificial Sequence
  Synthetic
ugacgaucguggagacgaacag

SEQ ID NO: 26027 - RNA, 22 nt, Artificial Sequence
  Synthetic
gacgaucguggagacgaacagc

SEQ ID NO: 26028 - RNA, 22 nt, Artificial Sequence
  Synthetic
acgaucguggagacgaacagca

SEQ ID NO: 26029 - RNA, 22 nt, Artificial Sequence
  Synthetic
cgaucguggagacgaacagcag

SEQ ID NO: 26030 - RNA, 22 nt, Artificial Sequence
  Synthetic
gaucguggagacgaacagcagc

SEQ ID NO: 26031 - RNA, 22 nt, Artificial Sequence
  Synthetic
aucguggagacgaacagcagca

SEQ ID NO: 26032 - RNA, 22 nt, Artificial Sequence
  Synthetic
ucguggagacgaacagcagcac

SEQ ID NO: 26033 - RNA, 22 nt, Artificial Sequence
  Synthetic
cguggagacgaacagcagcacc

SEQ ID NO: 26034 - RNA, 22 nt, Artificial Sequence
  Synthetic
guggagacgaacagcagcacca

SEQ ID NO: 26035 - RNA, 22 nt, Artificial Sequence
  Synthetic
uggagacgaacagcagcaccag

SEQ ID NO: 26036 - RNA, 22 nt, Artificial Sequence
  Synthetic
ggagacgaacagcagcaccagc

SEQ ID NO: 26037 - RNA, 22 nt, Artificial Sequence
  Synthetic
gagacgaacagcagcaccagca

SEQ ID NO: 26038 - RNA, 22 nt, Artificial Sequence
  Synthetic
agacgaacagcagcaccagcac

SEQ ID NO: 26039 - RNA, 22 nt, Artificial Sequence
  Synthetic
gacgaacagcagcaccagcacc

SEQ ID NO: 26040 - RNA, 22 nt, Artificial Sequence
  Synthetic
acgaacagcagcaccagcaccg

SEQ ID NO: 26041 - RNA, 22 nt, Artificial Sequence
  Synthetic
cgaacagcagcaccagcaccgc

SEQ ID NO: 26042 - RNA, 22 nt, Artificial Sequence
  Synthetic
gaacagcagcaccagcaccgcg

SEQ ID NO: 26043 - RNA, 22 nt, Artificial Sequence
  Synthetic
aacagcagcaccagcaccgcga

SEQ ID NO: 26044 - RNA, 22 nt, Artificial Sequence
  Synthetic
acagcagcaccagcaccgcgac

SEQ ID NO: 26045 - RNA, 22 nt, Artificial Sequence
  Synthetic
cagcagcaccagcaccgcgacg

SEQ ID NO: 26046 - RNA, 22 nt, Artificial Sequence
  Synthetic
agcagcaccagcaccgcgacgu

SEQ ID NO: 26047 - RNA, 22 nt, Artificial Sequence
  Synthetic
gcagcaccagcaccgcgacgug

SEQ ID NO: 26048 - RNA, 22 nt, Artificial Sequence
  Synthetic
cagcaccagcaccgcgacgugg

SEQ ID NO: 26049 - RNA, 22 nt, Artificial Sequence
  Synthetic
agcaccagcaccgcgacgugga

SEQ ID NO: 26050 - RNA, 22 nt, Artificial Sequence
  Synthetic
gcaccagcaccgcgacguggag

SEQ ID NO: 26051 - RNA, 22 nt, Artificial Sequence
  Synthetic
caccagcaccgcgacguggagg

SEQ ID NO: 26052 - RNA, 22 nt, Artificial Sequence
  Synthetic
accagcaccgcgacguggagga

SEQ ID NO: 26053 - RNA, 22 nt, Artificial Sequence
  Synthetic
ccagcaccgcgacguggaggac

SEQ ID NO: 26054 - RNA, 22 nt, Artificial Sequence
  Synthetic
cagcaccgcgacguggaggacg

SEQ ID NO: 26055 - RNA, 22 nt, Artificial Sequence
  Synthetic
agcaccgcgacguggaggacga

SEQ ID NO: 26056 - RNA, 22 nt, Artificial Sequence
  Synthetic
gcaccgcgacguggaggacgau

SEQ ID NO: 26057 - RNA, 22 nt, Artificial Sequence
  Synthetic
caccgcgacguggaggacgaug

SEQ ID NO: 26058 - RNA, 22 nt, Artificial Sequence
  Synthetic
accgcgacguggaggacgauga

SEQ ID NO: 26059 - RNA, 22 nt, Artificial Sequence
  Synthetic
ccgcgacguggaggacgaugau

SEQ ID NO: 26060 - RNA, 22 nt, Artificial Sequence
  Synthetic
cgcgacguggaggacgaugaua

SEQ ID NO: 26061 - RNA, 22 nt, Artificial Sequence
  Synthetic
gcgacguggaggacgaugauac

SEQ ID NO: 26062 - RNA, 22 nt, Artificial Sequence
  Synthetic
cgacguggaggacgaugauacu

SEQ ID NO: 26063 - RNA, 22 nt, Artificial Sequence
  Synthetic
gacguggaggacgaugauacuc

SEQ ID NO: 26064 - RNA, 22 nt, Artificial Sequence
  Synthetic
acguggaggacgaugauacuca

SEQ ID NO: 26065 - RNA, 22 nt, Artificial Sequence
  Synthetic
cguggaggacgaugauacucag

SEQ ID NO: 26066 - RNA, 22 nt, Artificial Sequence
  Synthetic
guggaggacgaugauacucagc

SEQ ID NO: 26067 - RNA, 22 nt, Artificial Sequence
  Synthetic
uggaggacgaugauacucagca

SEQ ID NO: 26068 - RNA, 22 nt, Artificial Sequence
  Synthetic
ggaggacgaugauacucagcaa

SEQ ID NO: 26069 - RNA, 22 nt, Artificial Sequence
  Synthetic
gaggacgaugauacucagcaac

SEQ ID NO: 26070 - RNA, 22 nt, Artificial Sequence
  Synthetic
aggacgaugauacucagcaaca

SEQ ID NO: 26071 - RNA, 22 nt, Artificial Sequence
  Synthetic
ggacgaugauacucagcaacag

SEQ ID NO: 26072 - RNA, 22 nt, Artificial Sequence
  Synthetic
gacgaugauacucagcaacagg

SEQ ID NO: 26073 - RNA, 22 nt, Artificial Sequence
  Synthetic
acgaugauacucagcaacagga

SEQ ID NO: 26074 - RNA, 22 nt, Artificial Sequence
  Synthetic
cgaugauacucagcaacaggag

SEQ ID NO: 26075 - RNA, 22 nt, Artificial Sequence
  Synthetic
gaugauacucagcaacaggagg

SEQ ID NO: 26076 - RNA, 22 nt, Artificial Sequence
  Synthetic
augauacucagcaacaggagga

SEQ ID NO: 26077 - RNA, 22 nt, Artificial Sequence
  Synthetic
ugauacucagcaacaggaggag

SEQ ID NO: 26078 - RNA, 22 nt, Artificial Sequence
  Synthetic
gauacucagcaacaggaggagc

SEQ ID NO: 26079 - RNA, 22 nt, Artificial Sequence
  Synthetic
auacucagcaacaggaggagca

SEQ ID NO: 26080 - RNA, 22 nt, Artificial Sequence
  Synthetic
uacucagcaacaggaggagcau

SEQ ID NO: 26081 - RNA, 22 nt, Artificial Sequence
  Synthetic
acucagcaacaggaggagcauu

SEQ ID NO: 26082 - RNA, 22 nt, Artificial Sequence
  Synthetic
cucagcaacaggaggagcauuc

SEQ ID NO: 26083 - RNA, 22 nt, Artificial Sequence
  Synthetic
ucagcaacaggaggagcauucu

SEQ ID NO: 26084 - RNA, 22 nt, Artificial Sequence
  Synthetic
cagcaacaggaggagcauucug

SEQ ID NO: 26085 - RNA, 22 nt, Artificial Sequence
  Synthetic
agcaacaggaggagcauucugg

SEQ ID NO: 26086 - RNA, 22 nt, Artificial Sequence
  Synthetic
gcaacaggaggagcauucuggc

SEQ ID NO: 26087 - RNA, 22 nt, Artificial Sequence
  Synthetic
caacaggaggagcauucuggcg

SEQ ID NO: 26088 - RNA, 22 nt, Artificial Sequence
  Synthetic
aacaggaggagcauucuggcgg

SEQ ID NO: 26089 - RNA, 22 nt, Artificial Sequence
  Synthetic
acaggaggagcauucuggcggc

SEQ ID NO: 26090 - RNA, 22 nt, Artificial Sequence
  Synthetic
caggaggagcauucuggcggca

SEQ ID NO: 26091 - RNA, 22 nt, Artificial Sequence
  Synthetic
aggaggagcauucuggcggcaa

SEQ ID NO: 26092 - RNA, 22 nt, Artificial Sequence
  Synthetic
ggaggagcauucuggcggcaag

SEQ ID NO: 26093 - RNA, 22 nt, Artificial Sequence
  Synthetic
gaggagcauucuggcggcaagu

SEQ ID NO: 26094 - RNA, 22 nt, Artificial Sequence
  Synthetic
aggagcauucuggcggcaaguu

SEQ ID NO: 26095 - RNA, 22 nt, Artificial Sequence
  Synthetic
ggagcauucuggcggcaaguuc

SEQ ID NO: 26096 - RNA, 22 nt, Artificial Sequence
  Synthetic
gagcauucuggcggcaaguucu

SEQ ID NO: 26097 - RNA, 22 nt, Artificial Sequence
  Synthetic
agcauucuggcggcaaguucug

SEQ ID NO: 26098 - RNA, 22 nt, Artificial Sequence
  Synthetic
gcauucuggcggcaaguucugc

SEQ ID NO: 26099 - RNA, 22 nt, Artificial Sequence
  Synthetic
cauucuggcggcaaguucugcu

SEQ ID NO: 26100 - RNA, 22 nt, Artificial Sequence
  Synthetic
auucuggcggcaaguucugcuc

SEQ ID NO: 26101 - RNA, 22 nt, Artificial Sequence
  Synthetic
uucuggcggcaaguucugcuca

SEQ ID NO: 26102 - RNA, 22 nt, Artificial Sequence
  Synthetic
ucuggcggcaaguucugcucag

SEQ ID NO: 26103 - RNA, 22 nt, Artificial Sequence
  Synthetic
cuggcggcaaguucugcucagc

SEQ ID NO: 26104 - RNA, 22 nt, Artificial Sequence
  Synthetic
uggcggcaaguucugcucagcg

SEQ ID NO: 26105 - RNA, 22 nt, Artificial Sequence
  Synthetic
ggcggcaaguucugcucagcgg

SEQ ID NO: 26106 - RNA, 22 nt, Artificial Sequence
  Synthetic
gcggcaaguucugcucagcgga

SEQ ID NO: 26107 - RNA, 22 nt, Artificial Sequence
  Synthetic
cggcaaguucugcucagcggag

SEQ ID NO: 26108 - RNA, 22 nt, Artificial Sequence
  Synthetic
ggcaaguucugcucagcggagu

SEQ ID NO: 26109 - RNA, 22 nt, Artificial Sequence
  Synthetic
gcaaguucugcucagcggaguu

SEQ ID NO: 26110 - RNA, 22 nt, Artificial Sequence
  Synthetic
caaguucugcucagcggaguuu

SEQ ID NO: 26111 - RNA, 22 nt, Artificial Sequence
  Synthetic
aaguucugcucagcggaguuuc

SEQ ID NO: 26112 - RNA, 22 nt, Artificial Sequence
  Synthetic
aguucugcucagcggaguuucu

SEQ ID NO: 26113 - RNA, 22 nt, Artificial Sequence
  Synthetic
guucugcucagcggaguuucug

SEQ ID NO: 26114 - RNA, 22 nt, Artificial Sequence
  Synthetic
uucugcucagcggaguuucugc

SEQ ID NO: 26115 - RNA, 22 nt, Artificial Sequence
  Synthetic
ucugcucagcggaguuucugca

SEQ ID NO: 26116 - RNA, 22 nt, Artificial Sequence
  Synthetic
cugcucagcggaguuucugcag

SEQ ID NO: 26117 - RNA, 22 nt, Artificial Sequence
  Synthetic
ugcucagcggaguuucugcagc

SEQ ID NO: 26118 - RNA, 22 nt, Artificial Sequence
  Synthetic
gcucagcggaguuucugcagcc

SEQ ID NO: 26119 - RNA, 22 nt, Artificial Sequence
  Synthetic
cucagcggaguuucugcagccc

SEQ ID NO: 26120 - RNA, 22 nt, Artificial Sequence
  Synthetic
ucagcggaguuucugcagccca

SEQ ID NO: 26121 - RNA, 22 nt, Artificial Sequence
  Synthetic
cagcggaguuucugcagcccaa

SEQ ID NO: 26122 - RNA, 22 nt, Artificial Sequence
  Synthetic
agcggaguuucugcagcccaaa

SEQ ID NO: 26123 - RNA, 22 nt, Artificial Sequence
  Synthetic
gcggaguuucugcagcccaaag

SEQ ID NO: 26124 - RNA, 22 nt, Artificial Sequence
  Synthetic
cggaguuucugcagcccaaagg

SEQ ID NO: 26125 - RNA, 22 nt, Artificial Sequence
  Synthetic
ggaguuucugcagcccaaagga

SEQ ID NO: 26126 - RNA, 22 nt, Artificial Sequence
  Synthetic
gaguuucugcagcccaaaggaa

SEQ ID NO: 26127 - RNA, 22 nt, Artificial Sequence
  Synthetic
aguuucugcagcccaaaggaac

SEQ ID NO: 26128 - RNA, 22 nt, Artificial Sequence
  Synthetic
guuucugcagcccaaaggaaca

SEQ ID NO: 26129 - RNA, 22 nt, Artificial Sequence
  Synthetic
uuucugcagcccaaaggaacag

SEQ ID NO: 26130 - RNA, 22 nt, Artificial Sequence
  Synthetic
uucugcagcccaaaggaacagc

SEQ ID NO: 26131 - RNA, 22 nt, Artificial Sequence
  Synthetic
ucugcagcccaaaggaacagcu

SEQ ID NO: 26132 - RNA, 22 nt, Artificial Sequence
  Synthetic
cugcagcccaaaggaacagcug

SEQ ID NO: 26133 - RNA, 22 nt, Artificial Sequence
  Synthetic
ugcagcccaaaggaacagcugu

SEQ ID NO: 26134 - RNA, 22 nt, Artificial Sequence
  Synthetic
gcagcccaaaggaacagcuguc

SEQ ID NO: 26135 - RNA, 22 nt, Artificial Sequence
  Synthetic
cagcccaaaggaacagcugucc

SEQ ID NO: 26136 - RNA, 22 nt, Artificial Sequence
  Synthetic
agcccaaaggaacagcuguccc

SEQ ID NO: 26137 - RNA, 22 nt, Artificial Sequence
  Synthetic
gcccaaaggaacagcugucccg

SEQ ID NO: 26138 - RNA, 22 nt, Artificial Sequence
  Synthetic
cccaaaggaacagcugucccga

SEQ ID NO: 26139 - RNA, 22 nt, Artificial Sequence
  Synthetic
ccaaaggaacagcugucccgau

SEQ ID NO: 26140 - RNA, 22 nt, Artificial Sequence
  Synthetic
caaaggaacagcugucccgauc

SEQ ID NO: 26141 - RNA, 22 nt, Artificial Sequence
  Synthetic
aaaggaacagcugucccgaucc

SEQ ID NO: 26142 - RNA, 22 nt, Artificial Sequence
  Synthetic
aaggaacagcugucccgauccu

SEQ ID NO: 26143 - RNA, 22 nt, Artificial Sequence
  Synthetic
aggaacagcugucccgauccuc

SEQ ID NO: 26144 - RNA, 22 nt, Artificial Sequence
  Synthetic
ggaacagcugucccgauccuca

SEQ ID NO: 26145 - RNA, 22 nt, Artificial Sequence
  Synthetic
gaacagcugucccgauccucag

SEQ ID NO: 26146 - RNA, 22 nt, Artificial Sequence
  Synthetic
aacagcugucccgauccucagg

SEQ ID NO: 26147 - RNA, 22 nt, Artificial Sequence
  Synthetic
acagcugucccgauccucaggg

SEQ ID NO: 26148 - RNA, 22 nt, Artificial Sequence
  Synthetic
cagcugucccgauccucagggu

SEQ ID NO: 26149 - RNA, 22 nt, Artificial Sequence
  Synthetic
agcugucccgauccucagggug

SEQ ID NO: 26150 - RNA, 22 nt, Artificial Sequence
  Synthetic
gcugucccgauccucagggugg

SEQ ID NO: 26151 - RNA, 22 nt, Artificial Sequence
  Synthetic
cugucccgauccucaggguggc

SEQ ID NO: 26152 - RNA, 22 nt, Artificial Sequence
  Synthetic
ugucccgauccucaggguggcc

SEQ ID NO: 26153 - RNA, 22 nt, Artificial Sequence
  Synthetic
gucccgauccucaggguggccu

SEQ ID NO: 26154 - RNA, 22 nt, Artificial Sequence
  Synthetic
ucccgauccucaggguggccuc

SEQ ID NO: 26155 - RNA, 22 nt, Artificial Sequence
  Synthetic
cccgauccucaggguggccuca

SEQ ID NO: 26156 - RNA, 22 nt, Artificial Sequence
  Synthetic
ccgauccucaggguggccucaa

SEQ ID NO: 26157 - RNA, 22 nt, Artificial Sequence
  Synthetic
cgauccucaggguggccucaaa

SEQ ID NO: 26158 - RNA, 22 nt, Artificial Sequence
  Synthetic
gauccucaggguggccucaaac

SEQ ID NO: 26159 - RNA, 22 nt, Artificial Sequence
  Synthetic
auccucaggguggccucaaaca

SEQ ID NO: 26160 - RNA, 22 nt, Artificial Sequence
  Synthetic
uccucaggguggccucaaacac

SEQ ID NO: 26161 - RNA, 22 nt, Artificial Sequence
  Synthetic
ccucaggguggccucaaacaca

SEQ ID NO: 26162 - RNA, 22 nt, Artificial Sequence
  Synthetic
cucaggguggccucaaacacaa

SEQ ID NO: 26163 - RNA, 22 nt, Artificial Sequence
  Synthetic
ucaggguggccucaaacacaaa

SEQ ID NO: 26164 - RNA, 22 nt, Artificial Sequence
  Synthetic
caggguggccucaaacacaaac

SEQ ID NO: 26165 - RNA, 22 nt, Artificial Sequence
  Synthetic
aggguggccucaaacacaaacu

SEQ ID NO: 26166 - RNA, 22 nt, Artificial Sequence
  Synthetic
ggguggccucaaacacaaacuc

SEQ ID NO: 26167 - RNA, 22 nt, Artificial Sequence
  Synthetic
gguggccucaaacacaaacucg

SEQ ID NO: 26168 - RNA, 22 nt, Artificial Sequence
  Synthetic
guggccucaaacacaaacucgg

SEQ ID NO: 26169 - RNA, 22 nt, Artificial Sequence
  Synthetic
uggccucaaacacaaacucggg

SEQ ID NO: 26170 - RNA, 22 nt, Artificial Sequence
  Synthetic
ggccucaaacacaaacucgggu

SEQ ID NO: 26171 - RNA, 22 nt, Artificial Sequence
  Synthetic
gccucaaacacaaacucgggug

SEQ ID NO: 26172 - RNA, 22 nt, Artificial Sequence
  Synthetic
ccucaaacacaaacucgggugc

SEQ ID NO: 26173 - RNA, 22 nt, Artificial Sequence
  Synthetic
cucaaacacaaacucgggugcg

SEQ ID NO: 26174 - RNA, 22 nt, Artificial Sequence
  Synthetic
ucaaacacaaacucgggugcgu

SEQ ID NO: 26175 - RNA, 22 nt, Artificial Sequence
  Synthetic
caaacacaaacucgggugcguu

SEQ ID NO: 26176 - RNA, 22 nt, Artificial Sequence
  Synthetic
aaacacaaacucgggugcguug

SEQ ID NO: 26177 - RNA, 22 nt, Artificial Sequence
  Synthetic
aacacaaacucgggugcguugg

SEQ ID NO: 26178 - RNA, 22 nt, Artificial Sequence
  Synthetic
acacaaacucgggugcguuggc

SEQ ID NO: 26179 - RNA, 22 nt, Artificial Sequence
  Synthetic
cacaaacucgggugcguuggcu

SEQ ID NO: 26180 - RNA, 22 nt, Artificial Sequence
  Synthetic
acaaacucgggugcguuggcuc

SEQ ID NO: 26181 - RNA, 22 nt, Artificial Sequence
  Synthetic
caaacucgggugcguuggcucc

SEQ ID NO: 26182 - RNA, 22 nt, Artificial Sequence
  Synthetic
aaacucgggugcguuggcuccg

SEQ ID NO: 26183 - RNA, 22 nt, Artificial Sequence
  Synthetic
aacucgggugcguuggcuccgc

SEQ ID NO: 26184 - RNA, 22 nt, Artificial Sequence
  Synthetic
acucgggugcguuggcuccgcu

SEQ ID NO: 26185 - RNA, 22 nt, Artificial Sequence
  Synthetic
cucgggugcguuggcuccgcug

SEQ ID NO: 26186 - RNA, 22 nt, Artificial Sequence
  Synthetic
ucgggugcguuggcuccgcugc

SEQ ID NO: 26187 - RNA, 22 nt, Artificial Sequence
  Synthetic
cgggugcguuggcuccgcugcu

SEQ ID NO: 26188 - RNA, 22 nt, Artificial Sequence
  Synthetic
gggugcguuggcuccgcugcug

SEQ ID NO: 26189 - RNA, 22 nt, Artificial Sequence
  Synthetic
ggugcguuggcuccgcugcugg

SEQ ID NO: 26190 - RNA, 22 nt, Artificial Sequence
  Synthetic
gugcguuggcuccgcugcuggc

SEQ ID NO: 26191 - RNA, 22 nt, Artificial Sequence
  Synthetic
ugcguuggcuccgcugcuggcg

SEQ ID NO: 26192 - RNA, 22 nt, Artificial Sequence
  Synthetic
gcguuggcuccgcugcuggcgc

SEQ ID NO: 26193 - RNA, 22 nt, Artificial Sequence
  Synthetic
cguuggcuccgcugcuggcgcc

SEQ ID NO: 26194 - RNA, 22 nt, Artificial Sequence
  Synthetic
guuggcuccgcugcuggcgccg

SEQ ID NO: 26195 - RNA, 22 nt, Artificial Sequence
  Synthetic
uuggcuccgcugcuggcgccgc

SEQ ID NO: 26196 - RNA, 22 nt, Artificial Sequence
  Synthetic
uggcuccgcugcuggcgccgcc

SEQ ID NO: 26197 - RNA, 22 nt, Artificial Sequence
  Synthetic
ggcuccgcugcuggcgccgcca

SEQ ID NO: 26198 - RNA, 22 nt, Artificial Sequence
  Synthetic
gcuccgcugcuggcgccgccaa

SEQ ID NO: 26199 - RNA, 22 nt, Artificial Sequence
  Synthetic
cuccgcugcuggcgccgccaaa

SEQ ID NO: 26200 - RNA, 22 nt, Artificial Sequence
  Synthetic
uccgcugcuggcgccgccaaag

SEQ ID NO: 26201 - RNA, 22 nt, Artificial Sequence
  Synthetic
ccgcugcuggcgccgccaaagc

SEQ ID NO: 26202 - RNA, 22 nt, Artificial Sequence
  Synthetic
cgcugcuggcgccgccaaagcu

SEQ ID NO: 26203 - RNA, 22 nt, Artificial Sequence
  Synthetic
gcugcuggcgccgccaaagcug

SEQ ID NO: 26204 - RNA, 22 nt, Artificial Sequence
  Synthetic
cugcuggcgccgccaaagcugc

SEQ ID NO: 26205 - RNA, 22 nt, Artificial Sequence
  Synthetic
ugcuggcgccgccaaagcugcg

SEQ ID NO: 26206 - RNA, 22 nt, Artificial Sequence
  Synthetic
gcuggcgccgccaaagcugcgc

SEQ ID NO: 26207 - RNA, 22 nt, Artificial Sequence
  Synthetic
cuggcgccgccaaagcugcgcu

SEQ ID NO: 26208 - RNA, 22 nt, Artificial Sequence
  Synthetic
uggcgccgccaaagcugcgcug

SEQ ID NO: 26209 - RNA, 22 nt, Artificial Sequence
  Synthetic
ggcgccgccaaagcugcgcugc

SEQ ID NO: 26210 - RNA, 22 nt, Artificial Sequence
  Synthetic
gcgccgccaaagcugcgcugcg

SEQ ID NO: 26211 - RNA, 22 nt, Artificial Sequence
  Synthetic
cgccgccaaagcugcgcugcgg

SEQ ID NO: 26212 - RNA, 22 nt, Artificial Sequence
  Synthetic
gccgccaaagcugcgcugcggg

SEQ ID NO: 26213 - RNA, 22 nt, Artificial Sequence
  Synthetic
ccgccaaagcugcgcugcgggg

SEQ ID NO: 26214 - RNA, 22 nt, Artificial Sequence
  Synthetic
cgccaaagcugcgcugcggggc

SEQ ID NO: 26215 - RNA, 22 nt, Artificial Sequence
  Synthetic
gccaaagcugcgcugcggggcu

SEQ ID NO: 26216 - RNA, 22 nt, Artificial Sequence
  Synthetic
ccaaagcugcgcugcggggcug

SEQ ID NO: 26217 - RNA, 22 nt, Artificial Sequence
  Synthetic
caaagcugcgcugcggggcugc

SEQ ID NO: 26218 - RNA, 22 nt, Artificial Sequence
  Synthetic
aaagcugcgcugcggggcugcg

SEQ ID NO: 26219 - RNA, 22 nt, Artificial Sequence
  Synthetic
aagcugcgcugcggggcugcgc

SEQ ID NO: 26220 - RNA, 22 nt, Artificial Sequence
  Synthetic
agcugcgcugcggggcugcgcg

SEQ ID NO: 26221 - RNA, 22 nt, Artificial Sequence
  Synthetic
gcugcgcugcggggcugcgcgc

SEQ ID NO: 26222 - RNA, 22 nt, Artificial Sequence
  Synthetic
cugcgcugcggggcugcgcgcg

SEQ ID NO: 26223 - RNA, 22 nt, Artificial Sequence
  Synthetic
ugcgcugcggggcugcgcgcgc

SEQ ID NO: 26224 - RNA, 22 nt, Artificial Sequence
  Synthetic
gcgcugcggggcugcgcgcgcg

SEQ ID NO: 26225 - RNA, 22 nt, Artificial Sequence
  Synthetic
cgcugcggggcugcgcgcgcgc

SEQ ID NO: 26226 - RNA, 22 nt, Artificial Sequence
  Synthetic
gcugcggggcugcgcgcgcgcg

SEQ ID NO: 26227 - RNA, 22 nt, Artificial Sequence
  Synthetic
cugcggggcugcgcgcgcgcga

SEQ ID NO: 26228 - RNA, 22 nt, Artificial Sequence
  Synthetic
ugcggggcugcgcgcgcgcgaa

SEQ ID NO: 26229 - RNA, 22 nt, Artificial Sequence
  Synthetic
gcggggcugcgcgcgcgcgaag

SEQ ID NO: 26230 - RNA, 22 nt, Artificial Sequence
  Synthetic
cggggcugcgcgcgcgcgaagc

SEQ ID NO: 26231 - RNA, 22 nt, Artificial Sequence
  Synthetic
ggggcugcgcgcgcgcgaagca

SEQ ID NO: 26232 - RNA, 22 nt, Artificial Sequence
  Synthetic
gggcugcgcgcgcgcgaagcaa

SEQ ID NO: 26233 - RNA, 22 nt, Artificial Sequence
  Synthetic
ggcugcgcgcgcgcgaagcaag

SEQ ID NO: 26234 - RNA, 22 nt, Artificial Sequence
  Synthetic
gcugcgcgcgcgcgaagcaagg

SEQ ID NO: 26235 - RNA, 22 nt, Artificial Sequence
  Synthetic
cugcgcgcgcgcgaagcaaggg

SEQ ID NO: 26236 - RNA, 22 nt, Artificial Sequence
  Synthetic
ugcgcgcgcgcgaagcaagggg

SEQ ID NO: 26237 - RNA, 22 nt, Artificial Sequence
  Synthetic
gcgcgcgcgcgaagcaaggggg

SEQ ID NO: 26238 - RNA, 22 nt, Artificial Sequence
  Synthetic
cgcgcgcgcgaagcaagggggc

SEQ ID NO: 26239 - RNA, 23 nt, Artificial Sequence
  Synthetic
gucacccccaggcuggagugcag

SEQ ID NO: 26240 - RNA, 23 nt, Artificial Sequence
  Synthetic
ucacccccaggcuggagugcagu

SEQ ID NO: 26241 - RNA, 23 nt, Artificial Sequence
  Synthetic
cacccccaggcuggagugcagug

SEQ ID NO: 26242 - RNA, 23 nt, Artificial Sequence
  Synthetic
acccccaggcuggagugcagugg

SEQ ID NO: 26243 - RNA, 23 nt, Artificial Sequence
  Synthetic
cccccaggcuggagugcaguggc

SEQ ID NO: 26244 - RNA, 23 nt, Artificial Sequence
  Synthetic
ccccaggcuggagugcaguggca

SEQ ID NO: 26245 - RNA, 23 nt, Artificial Sequence
  Synthetic
cccaggcuggagugcaguggcau

SEQ ID NO: 26246 - RNA, 23 nt, Artificial Sequence
  Synthetic
ccaggcuggagugcaguggcaug

SEQ ID NO: 26247 - RNA, 23 nt, Artificial Sequence
  Synthetic
caggcuggagugcaguggcauga

SEQ ID NO: 26248 - RNA, 23 nt, Artificial Sequence
  Synthetic
aggcuggagugcaguggcaugau

SEQ ID NO: 26249 - RNA, 23 nt, Artificial Sequence
  Synthetic
ggcuggagugcaguggcaugauc

SEQ ID NO: 26250 - RNA, 23 nt, Artificial Sequence
  Synthetic
gcuggagugcaguggcaugaucu

SEQ ID NO: 26251 - RNA, 23 nt, Artificial Sequence
  Synthetic
cuggagugcaguggcaugaucuu

SEQ ID NO: 26252 - RNA, 23 nt, Artificial Sequence
  Synthetic
uggagugcaguggcaugaucuug

SEQ ID NO: 26253 - RNA, 23 nt, Artificial Sequence
  Synthetic
ggagugcaguggcaugaucuugg

SEQ ID NO: 26254 - RNA, 23 nt, Artificial Sequence
  Synthetic
gagugcaguggcaugaucuuggc

SEQ ID NO: 26255 - RNA, 23 nt, Artificial Sequence
  Synthetic
agugcaguggcaugaucuuggcu

SEQ ID NO: 26256 - RNA, 23 nt, Artificial Sequence
  Synthetic
gugcaguggcaugaucuuggcuc

SEQ ID NO: 26257 - RNA, 23 nt, Artificial Sequence
  Synthetic
ugcaguggcaugaucuuggcuca

SEQ ID NO: 26258 - RNA, 23 nt, Artificial Sequence
  Synthetic
gcaguggcaugaucuuggcucac

SEQ ID NO: 26259 - RNA, 23 nt, Artificial Sequence
  Synthetic
caguggcaugaucuuggcucacu

SEQ ID NO: 26260 - RNA, 23 nt, Artificial Sequence
  Synthetic
aguggcaugaucuuggcucacug

SEQ ID NO: 26261 - RNA, 23 nt, Artificial Sequence
  Synthetic
guggcaugaucuuggcucacugc

SEQ ID NO: 26262 - RNA, 23 nt, Artificial Sequence
  Synthetic
uggcaugaucuuggcucacugca

SEQ ID NO: 26263 - RNA, 23 nt, Artificial Sequence
  Synthetic
ggcaugaucuuggcucacugcaa

SEQ ID NO: 26264 - RNA, 23 nt, Artificial Sequence
  Synthetic
gcaugaucuuggcucacugcaac

SEQ ID NO: 26265 - RNA, 23 nt, Artificial Sequence
  Synthetic
caugaucuuggcucacugcaacc

SEQ ID NO: 26266 - RNA, 23 nt, Artificial Sequence
  Synthetic
augaucuuggcucacugcaaccu

SEQ ID NO: 26267 - RNA, 23 nt, Artificial Sequence
  Synthetic
ugaucuuggcucacugcaaccuc

SEQ ID NO: 26268 - RNA, 23 nt, Artificial Sequence
  Synthetic
gaucuuggcucacugcaaccucc

SEQ ID NO: 26269 - RNA, 23 nt, Artificial Sequence
  Synthetic
aucuuggcucacugcaaccucca

SEQ ID NO: 26270 - RNA, 23 nt, Artificial Sequence
  Synthetic
ucuuggcucacugcaaccuccac

SEQ ID NO: 26271 - RNA, 23 nt, Artificial Sequence
  Synthetic
cuuggcucacugcaaccuccacc

SEQ ID NO: 26272 - RNA, 23 nt, Artificial Sequence
  Synthetic
uuggcucacugcaaccuccaccu

SEQ ID NO: 26273 - RNA, 23 nt, Artificial Sequence
  Synthetic
uggcucacugcaaccuccaccuc

SEQ ID NO: 26274 - RNA, 23 nt, Artificial Sequence
  Synthetic
ggcucacugcaaccuccaccucc

SEQ ID NO: 26275 - RNA, 23 nt, Artificial Sequence
  Synthetic
gcucacugcaaccuccaccuccu

SEQ ID NO: 26276 - RNA, 23 nt, Artificial Sequence
  Synthetic
cucacugcaaccuccaccuccua

SEQ ID NO: 26277 - RNA, 23 nt, Artificial Sequence
  Synthetic
ucacugcaaccuccaccuccuag

SEQ ID NO: 26278 - RNA, 23 nt, Artificial Sequence
  Synthetic
cacugcaaccuccaccuccuagg

SEQ ID NO: 26279 - RNA, 23 nt, Artificial Sequence
  Synthetic
acugcaaccuccaccuccuaggu

SEQ ID NO: 26280 - RNA, 23 nt, Artificial Sequence
  Synthetic
cugcaaccuccaccuccuagguu

SEQ ID NO: 26281 - RNA, 23 nt, Artificial Sequence
  Synthetic
ugcaaccuccaccuccuagguuc

SEQ ID NO: 26282 - RNA, 23 nt, Artificial Sequence
  Synthetic
gcaaccuccaccuccuagguuca

SEQ ID NO: 26283 - RNA, 23 nt, Artificial Sequence
  Synthetic
caaccuccaccuccuagguucaa

SEQ ID NO: 26284 - RNA, 23 nt, Artificial Sequence
  Synthetic
aaccuccaccuccuagguucaag

SEQ ID NO: 26285 - RNA, 23 nt, Artificial Sequence
  Synthetic
accuccaccuccuagguucaagu

SEQ ID NO: 26286 - RNA, 23 nt, Artificial Sequence
  Synthetic
ccuccaccuccuagguucaagug

SEQ ID NO: 26287 - RNA, 23 nt, Artificial Sequence
  Synthetic
cuccaccuccuagguucaaguga

SEQ ID NO: 26288 - RNA, 23 nt, Artificial Sequence
  Synthetic
uccaccuccuagguucaagugau

SEQ ID NO: 26289 - RNA, 23 nt, Artificial Sequence
  Synthetic
ccaccuccuagguucaagugauu

SEQ ID NO: 26290 - RNA, 23 nt, Artificial Sequence
  Synthetic
caccuccuagguucaagugauuc

SEQ ID NO: 26291 - RNA, 23 nt, Artificial Sequence
  Synthetic
accuccuagguucaagugauucu

SEQ ID NO: 26292 - RNA, 23 nt, Artificial Sequence
  Synthetic
ccuccuagguucaagugauucuu

SEQ ID NO: 26293 - RNA, 23 nt, Artificial Sequence
  Synthetic
cuccuagguucaagugauucuuc

SEQ ID NO: 26294 - RNA, 23 nt, Artificial Sequence
  Synthetic
uccuagguucaagugauucuucu

SEQ ID NO: 26295 - RNA, 23 nt, Artificial Sequence
  Synthetic
ccuagguucaagugauucuucuc

SEQ ID NO: 26296 - RNA, 23 nt, Artificial Sequence
  Synthetic
cuagguucaagugauucuucucu

SEQ ID NO: 26297 - RNA, 23 nt, Artificial Sequence
  Synthetic
uagguucaagugauucuucucug

SEQ ID NO: 26298 - RNA, 23 nt, Artificial Sequence
  Synthetic
agguucaagugauucuucucugc

SEQ ID NO: 26299 - RNA, 23 nt, Artificial Sequence
  Synthetic
gguucaagugauucuucucugcc

SEQ ID NO: 26300 - RNA, 23 nt, Artificial Sequence
  Synthetic
guucaagugauucuucucugccu

SEQ ID NO: 26301 - RNA, 23 nt, Artificial Sequence
  Synthetic
uucaagugauucuucucugccuc

SEQ ID NO: 26302 - RNA, 23 nt, Artificial Sequence
  Synthetic
ucaagugauucuucucugccuca

SEQ ID NO: 26303 - RNA, 23 nt, Artificial Sequence
  Synthetic
caagugauucuucucugccucag

SEQ ID NO: 26304 - RNA, 23 nt, Artificial Sequence
  Synthetic
aagugauucuucucugccucagu

SEQ ID NO: 26305 - RNA, 23 nt, Artificial Sequence
  Synthetic
agugauucuucucugccucaguu

SEQ ID NO: 26306 - RNA, 23 nt, Artificial Sequence
  Synthetic
gugauucuucucugccucaguuu

SEQ ID NO: 26307 - RNA, 23 nt, Artificial Sequence
  Synthetic
ugauucuucucugccucaguuuc

SEQ ID NO: 26308 - RNA, 23 nt, Artificial Sequence
  Synthetic
gauucuucucugccucaguuucc

SEQ ID NO: 26309 - RNA, 23 nt, Artificial Sequence
  Synthetic
auucuucucugccucaguuuccc

SEQ ID NO: 26310 - RNA, 23 nt, Artificial Sequence
  Synthetic
uucuucucugccucaguuuccca

SEQ ID NO: 26311 - RNA, 23 nt, Artificial Sequence
  Synthetic
ucuucucugccucaguuucccaa

SEQ ID NO: 26312 - RNA, 23 nt, Artificial Sequence
  Synthetic
cuucucugccucaguuucccaag

SEQ ID NO: 26313 - RNA, 23 nt, Artificial Sequence
  Synthetic
uucucugccucaguuucccaagu

SEQ ID NO: 26314 - RNA, 23 nt, Artificial Sequence
  Synthetic
ucucugccucaguuucccaagua

SEQ ID NO: 26315 - RNA, 23 nt, Artificial Sequence
  Synthetic
cucugccucaguuucccaaguag

SEQ ID NO: 26316 - RNA, 23 nt, Artificial Sequence
  Synthetic
ucugccucaguuucccaaguagc

SEQ ID NO: 26317 - RNA, 23 nt, Artificial Sequence
  Synthetic
cugccucaguuucccaaguagcu

SEQ ID NO: 26318 - RNA, 23 nt, Artificial Sequence
  Synthetic
ugccucaguuucccaaguagcug

SEQ ID NO: 26319 - RNA, 23 nt, Artificial Sequence
  Synthetic
gccucaguuucccaaguagcugg

SEQ ID NO: 26320 - RNA, 23 nt, Artificial Sequence
  Synthetic
ccucaguuucccaaguagcuggg

SEQ ID NO: 26321 - RNA, 23 nt, Artificial Sequence
  Synthetic
cucaguuucccaaguagcuggga

SEQ ID NO: 26322 - RNA, 23 nt, Artificial Sequence
  Synthetic
ucaguuucccaaguagcugggac

SEQ ID NO: 26323 - RNA, 23 nt, Artificial Sequence
  Synthetic
caguuucccaaguagcugggacu

SEQ ID NO: 26324 - RNA, 23 nt, Artificial Sequence
  Synthetic
aguuucccaaguagcugggacua

SEQ ID NO: 26325 - RNA, 23 nt, Artificial Sequence
  Synthetic
guuucccaaguagcugggacuac

SEQ ID NO: 26326 - RNA, 23 nt, Artificial Sequence
  Synthetic
uuucccaaguagcugggacuaca

SEQ ID NO: 26327 - RNA, 23 nt, Artificial Sequence
  Synthetic
uucccaaguagcugggacuacag

SEQ ID NO: 26328 - RNA, 23 nt, Artificial Sequence
  Synthetic
ucccaaguagcugggacuacagg

SEQ ID NO: 26329 - RNA, 23 nt, Artificial Sequence
  Synthetic
cccaaguagcugggacuacaggc

SEQ ID NO: 26330 - RNA, 23 nt, Artificial Sequence
  Synthetic
ccaaguagcugggacuacaggca

SEQ ID NO: 26331 - RNA, 23 nt, Artificial Sequence
  Synthetic
caaguagcugggacuacaggcac

SEQ ID NO: 26332 - RNA, 23 nt, Artificial Sequence
  Synthetic
aaguagcugggacuacaggcacg

SEQ ID NO: 26333 - RNA, 23 nt, Artificial Sequence
  Synthetic
aguagcugggacuacaggcacgc

SEQ ID NO: 26334 - RNA, 23 nt, Artificial Sequence
  Synthetic
guagcugggacuacaggcacgca

SEQ ID NO: 26335 - RNA, 23 nt, Artificial Sequence
  Synthetic
uagcugggacuacaggcacgcac

SEQ ID NO: 26336 - RNA, 23 nt, Artificial Sequence
  Synthetic
agcugggacuacaggcacgcacc

SEQ ID NO: 26337 - RNA, 23 nt, Artificial Sequence
  Synthetic
gcugggacuacaggcacgcacca

SEQ ID NO: 26338 - RNA, 23 nt, Artificial Sequence
  Synthetic
cugggacuacaggcacgcaccac

SEQ ID NO: 26339 - RNA, 23 nt, Artificial Sequence
  Synthetic
ugggacuacaggcacgcaccacc

SEQ ID NO: 26340 - RNA, 23 nt, Artificial Sequence
  Synthetic
gggacuacaggcacgcaccacca

SEQ ID NO: 26341 - RNA, 23 nt, Artificial Sequence
  Synthetic
ggacuacaggcacgcaccaccac

SEQ ID NO: 26342 - RNA, 23 nt, Artificial Sequence
  Synthetic
gacuacaggcacgcaccaccacg

SEQ ID NO: 26343 - RNA, 23 nt, Artificial Sequence
  Synthetic
acuacaggcacgcaccaccacgc

SEQ ID NO: 26344 - RNA, 23 nt, Artificial Sequence
  Synthetic
cuacaggcacgcaccaccacgcc

SEQ ID NO: 26345 - RNA, 23 nt, Artificial Sequence
  Synthetic
uacaggcacgcaccaccacgccu

SEQ ID NO: 26346 - RNA, 23 nt, Artificial Sequence
  Synthetic
acaggcacgcaccaccacgccug

SEQ ID NO: 26347 - RNA, 23 nt, Artificial Sequence
  Synthetic
caggcacgcaccaccacgccugg

SEQ ID NO: 26348 - RNA, 23 nt, Artificial Sequence
  Synthetic
aggcacgcaccaccacgccuggc

SEQ ID NO: 26349 - RNA, 23 nt, Artificial Sequence
  Synthetic
ggcacgcaccaccacgccuggcu

SEQ ID NO: 26350 - RNA, 23 nt, Artificial Sequence
  Synthetic
gcacgcaccaccacgccuggcua

SEQ ID NO: 26351 - RNA, 23 nt, Artificial Sequence
  Synthetic
cacgcaccaccacgccuggcuau

SEQ ID NO: 26352 - RNA, 23 nt, Artificial Sequence
  Synthetic
acgcaccaccacgccuggcuauu

SEQ ID NO: 26353 - RNA, 23 nt, Artificial Sequence
  Synthetic
cgcaccaccacgccuggcuauuu

SEQ ID NO: 26354 - RNA, 23 nt, Artificial Sequence
  Synthetic
gcaccaccacgccuggcuauuuu

SEQ ID NO: 26355 - RNA, 23 nt, Artificial Sequence
  Synthetic
caccaccacgccuggcuauuuuu

SEQ ID NO: 26356 - RNA, 23 nt, Artificial Sequence
  Synthetic
accaccacgccuggcuauuuuuu

SEQ ID NO: 26357 - RNA, 23 nt, Artificial Sequence
  Synthetic
ccaccacgccuggcuauuuuuuu

SEQ ID NO: 26358 - RNA, 23 nt, Artificial Sequence
  Synthetic
caccacgccuggcuauuuuuuua

SEQ ID NO: 26359 - RNA, 23 nt, Artificial Sequence
  Synthetic
accacgccuggcuauuuuuuuau

SEQ ID NO: 26360 - RNA, 23 nt, Artificial Sequence
  Synthetic
ccacgccuggcuauuuuuuuauu

SEQ ID NO: 26361 - RNA, 23 nt, Artificial Sequence
  Synthetic
cacgccuggcuauuuuuuuauuu

SEQ ID NO: 26362 - RNA, 23 nt, Artificial Sequence
  Synthetic
acgccuggcuauuuuuuuauuuu

SEQ ID NO: 26363 - RNA, 23 nt, Artificial Sequence
  Synthetic
cgccuggcuauuuuuuuauuuuu

SEQ ID NO: 26364 - RNA, 23 nt, Artificial Sequence
  Synthetic
gccuggcuauuuuuuuauuuuua

SEQ ID NO: 26365 - RNA, 23 nt, Artificial Sequence
  Synthetic
ccuggcuauuuuuuuauuuuuau

SEQ ID NO: 26366 - RNA, 23 nt, Artificial Sequence
  Synthetic
cuggcuauuuuuuuauuuuuauu

SEQ ID NO: 26367 - RNA, 23 nt, Artificial Sequence
  Synthetic
uggcuauuuuuuuauuuuuauuu

SEQ ID NO: 26368 - RNA, 23 nt, Artificial Sequence
  Synthetic
ggcuauuuuuuuauuuuuauuuu

SEQ ID NO: 26369 - RNA, 23 nt, Artificial Sequence
  Synthetic
gcuauuuuuuuauuuuuauuuuu

SEQ ID NO: 26370 - RNA, 23 nt, Artificial Sequence
  Synthetic
cuauuuuuuuauuuuuauuuuua

SEQ ID NO: 26371 - RNA, 23 nt, Artificial Sequence
  Synthetic
uauuuuuuuauuuuuauuuuuag

SEQ ID NO: 26372 - RNA, 23 nt, Artificial Sequence
  Synthetic
auuuuuuuauuuuuauuuuuagu

SEQ ID NO: 26373 - RNA, 23 nt, Artificial Sequence
  Synthetic
uuuuuuuauuuuuauuuuuagua

SEQ ID NO: 26374 - RNA, 23 nt, Artificial Sequence
  Synthetic
uuuuuuauuuuuauuuuuaguag

SEQ ID NO: 26375 - RNA, 23 nt, Artificial Sequence
  Synthetic
uuuuuauuuuuauuuuuaguaga

SEQ ID NO: 26376 - RNA, 23 nt, Artificial Sequence
  Synthetic
uuuuauuuuuauuuuuaguagag

SEQ ID NO: 26377 - RNA, 23 nt, Artificial Sequence
  Synthetic
uuuauuuuuauuuuuaguagaga

SEQ ID NO: 26378 - RNA, 23 nt, Artificial Sequence
  Synthetic
uuauuuuuauuuuuaguagagac

SEQ ID NO: 26379 - RNA, 23 nt, Artificial Sequence
  Synthetic
uauuuuuauuuuuaguagagaca

SEQ ID NO: 26380 - RNA, 23 nt, Artificial Sequence
  Synthetic
auuuuuauuuuuaguagagacag

SEQ ID NO: 26381 - RNA, 23 nt, Artificial Sequence
  Synthetic
uuuuuauuuuuaguagagacagg

SEQ ID NO: 26382 - RNA, 23 nt, Artificial Sequence
  Synthetic
uuuuauuuuuaguagagacaggg

SEQ ID NO: 26383 - RNA, 23 nt, Artificial Sequence
  Synthetic
uuuauuuuuaguagagacagggu

SEQ ID NO: 26384 - RNA, 23 nt, Artificial Sequence
  Synthetic
uuauuuuuaguagagacaggguu

SEQ ID NO: 26385 - RNA, 23 nt, Artificial Sequence
  Synthetic
uauuuuuaguagagacaggguuu

SEQ ID NO: 26386 - RNA, 23 nt, Artificial Sequence
  Synthetic
auuuuuaguagagacaggguuuc

SEQ ID NO: 26387 - RNA, 23 nt, Artificial Sequence
  Synthetic
uuuuuaguagagacaggguuuca

SEQ ID NO: 26388 - RNA, 23 nt, Artificial Sequence
  Synthetic
uuuuaguagagacaggguuucac

SEQ ID NO: 26389 - RNA, 23 nt, Artificial Sequence
  Synthetic
uuuaguagagacaggguuucacc

SEQ ID NO: 26390 - RNA, 23 nt, Artificial Sequence
  Synthetic
uuaguagagacaggguuucacca

SEQ ID NO: 26391 - RNA, 23 nt, Artificial Sequence
  Synthetic
uaguagagacaggguuucaccau

SEQ ID NO: 26392 - RNA, 23 nt, Artificial Sequence
  Synthetic
aguagagacaggguuucaccaug

SEQ ID NO: 26393 - RNA, 23 nt, Artificial Sequence
  Synthetic
guagagacaggguuucaccaugu

SEQ ID NO: 26394 - RNA, 23 nt, Artificial Sequence
  Synthetic
uagagacaggguuucaccauguu

SEQ ID NO: 26395 - RNA, 23 nt, Artificial Sequence
  Synthetic
agagacaggguuucaccauguug

SEQ ID NO: 26396 - RNA, 23 nt, Artificial Sequence
  Synthetic
gagacaggguuucaccauguugg

SEQ ID NO: 26397 - RNA, 23 nt, Artificial Sequence
  Synthetic
agacaggguuucaccauguuggc

SEQ ID NO: 26398 - RNA, 23 nt, Artificial Sequence
  Synthetic
gacaggguuucaccauguuggcc

SEQ ID NO: 26399 - RNA, 23 nt, Artificial Sequence
  Synthetic
acaggguuucaccauguuggccg

SEQ ID NO: 26400 - RNA, 23 nt, Artificial Sequence
  Synthetic
caggguuucaccauguuggccgg

SEQ ID NO: 26401 - RNA, 23 nt, Artificial Sequence
  Synthetic
aggguuucaccauguuggccggg

SEQ ID NO: 26402 - RNA, 23 nt, Artificial Sequence
  Synthetic
ggguuucaccauguuggccgggc

SEQ ID NO: 26403 - RNA, 23 nt, Artificial Sequence
  Synthetic
gguuucaccauguuggccgggcu

SEQ ID NO: 26404 - RNA, 23 nt, Artificial Sequence
  Synthetic
guuucaccauguuggccgggcug

SEQ ID NO: 26405 - RNA, 23 nt, Artificial Sequence
  Synthetic
uuucaccauguuggccgggcugg

SEQ ID NO: 26406 - RNA, 23 nt, Artificial Sequence
  Synthetic
uucaccauguuggccgggcuggu

SEQ ID NO: 26407 - RNA, 23 nt, Artificial Sequence
  Synthetic
ucaccauguuggccgggcugguc

SEQ ID NO: 26408 - RNA, 23 nt, Artificial Sequence
  Synthetic
caccauguuggccgggcuggucu

SEQ ID NO: 26409 - RNA, 23 nt, Artificial Sequence
  Synthetic
accauguuggccgggcuggucuu

SEQ ID NO: 26410 - RNA, 23 nt, Artificial Sequence
  Synthetic
ccauguuggccgggcuggucuug

SEQ ID NO: 26411 - RNA, 23 nt, Artificial Sequence
  Synthetic
cauguuggccgggcuggucuuga

SEQ ID NO: 26412 - RNA, 23 nt, Artificial Sequence
  Synthetic
auguuggccgggcuggucuugaa

SEQ ID NO: 26413 - RNA, 23 nt, Artificial Sequence
  Synthetic
uguuggccgggcuggucuugaac

SEQ ID NO: 26414 - RNA, 23 nt, Artificial Sequence
  Synthetic
guuggccgggcuggucuugaacu

SEQ ID NO: 26415 - RNA, 23 nt, Artificial Sequence
  Synthetic
uuggccgggcuggucuugaacuc

SEQ ID NO: 26416 - RNA, 23 nt, Artificial Sequence
  Synthetic
uggccgggcuggucuugaacucc

SEQ ID NO: 26417 - RNA, 23 nt, Artificial Sequence
  Synthetic
ggccgggcuggucuugaacuccu

SEQ ID NO: 26418 - RNA, 23 nt, Artificial Sequence
  Synthetic
gccgggcuggucuugaacuccug

SEQ ID NO: 26419 - RNA, 23 nt, Artificial Sequence
  Synthetic
ccgggcuggucuugaacuccuga

SEQ ID NO: 26420 - RNA, 23 nt, Artificial Sequence
  Synthetic
cgggcuggucuugaacuccugac

SEQ ID NO: 26421 - RNA, 23 nt, Artificial Sequence
  Synthetic
gggcuggucuugaacuccugacc

SEQ ID NO: 26422 - RNA, 23 nt, Artificial Sequence
  Synthetic
ggcuggucuugaacuccugaccu

SEQ ID NO: 26423 - RNA, 23 nt, Artificial Sequence
  Synthetic
gcuggucuugaacuccugaccuc

SEQ ID NO: 26424 - RNA, 23 nt, Artificial Sequence
  Synthetic
cuggucuugaacuccugaccuca

SEQ ID NO: 26425 - RNA, 23 nt, Artificial Sequence
  Synthetic
uggucuugaacuccugaccucaa

SEQ ID NO: 26426 - RNA, 23 nt, Artificial Sequence
  Synthetic
ggucuugaacuccugaccucaag

SEQ ID NO: 26427 - RNA, 23 nt, Artificial Sequence
  Synthetic
gucuugaacuccugaccucaagu

SEQ ID NO: 26428 - RNA, 23 nt, Artificial Sequence
  Synthetic
ucuugaacuccugaccucaagug

SEQ ID NO: 26429 - RNA, 23 nt, Artificial Sequence
  Synthetic
cuugaacuccugaccucaaguga

SEQ ID NO: 26430 - RNA, 23 nt, Artificial Sequence
  Synthetic
uugaacuccugaccucaagugau

SEQ ID NO: 26431 - RNA, 23 nt, Artificial Sequence
  Synthetic
ugaacuccugaccucaagugauc

SEQ ID NO: 26432 - RNA, 23 nt, Artificial Sequence
  Synthetic
gaacuccugaccucaagugaucu

SEQ ID NO: 26433 - RNA, 23 nt, Artificial Sequence
  Synthetic
aacuccugaccucaagugaucug

SEQ ID NO: 26434 - RNA, 23 nt, Artificial Sequence
  Synthetic
acuccugaccucaagugaucugc

SEQ ID NO: 26435 - RNA, 23 nt, Artificial Sequence
  Synthetic
cuccugaccucaagugaucugcc

SEQ ID NO: 26436 - RNA, 23 nt, Artificial Sequence
  Synthetic
uccugaccucaagugaucugccc

SEQ ID NO: 26437 - RNA, 23 nt, Artificial Sequence
  Synthetic
ccugaccucaagugaucugccca

SEQ ID NO: 26438 - RNA, 23 nt, Artificial Sequence
  Synthetic
cugaccucaagugaucugcccac

SEQ ID NO: 26439 - RNA, 23 nt, Artificial Sequence
  Synthetic
ugaccucaagugaucugcccacc

SEQ ID NO: 26440 - RNA, 23 nt, Artificial Sequence
  Synthetic
gaccucaagugaucugcccaccu

SEQ ID NO: 26441 - RNA, 23 nt, Artificial Sequence
  Synthetic
accucaagugaucugcccaccuc

SEQ ID NO: 26442 - RNA, 23 nt, Artificial Sequence
  Synthetic
ccucaagugaucugcccaccuca

SEQ ID NO: 26443 - RNA, 23 nt, Artificial Sequence
  Synthetic
cucaagugaucugcccaccucag

SEQ ID NO: 26444 - RNA, 23 nt, Artificial Sequence
  Synthetic
ucaagugaucugcccaccucagc

SEQ ID NO: 26445 - RNA, 23 nt, Artificial Sequence
  Synthetic
caagugaucugcccaccucagcc

SEQ ID NO: 26446 - RNA, 23 nt, Artificial Sequence
  Synthetic
aagugaucugcccaccucagccu

SEQ ID NO: 26447 - RNA, 23 nt, Artificial Sequence
  Synthetic
agugaucugcccaccucagccuc

SEQ ID NO: 26448 - RNA, 23 nt, Artificial Sequence
  Synthetic
gugaucugcccaccucagccucc

SEQ ID NO: 26449 - RNA, 23 nt, Artificial Sequence
  Synthetic
ugaucugcccaccucagccuccc

SEQ ID NO: 26450 - RNA, 23 nt, Artificial Sequence
  Synthetic
gaucugcccaccucagccuccca

SEQ ID NO: 26451 - RNA, 23 nt, Artificial Sequence
  Synthetic
aucugcccaccucagccucccaa

SEQ ID NO: 26452 - RNA, 23 nt, Artificial Sequence
  Synthetic
ucugcccaccucagccucccaaa

SEQ ID NO: 26453 - RNA, 23 nt, Artificial Sequence
  Synthetic
cugcccaccucagccucccaaag

SEQ ID NO: 26454 - RNA, 23 nt, Artificial Sequence
  Synthetic
ugcccaccucagccucccaaagu

SEQ ID NO: 26455 - RNA, 23 nt, Artificial Sequence
  Synthetic
gcccaccucagccucccaaagug

SEQ ID NO: 26456 - RNA, 23 nt, Artificial Sequence
  Synthetic
cccaccucagccucccaaagugc

SEQ ID NO: 26457 - RNA, 23 nt, Artificial Sequence
  Synthetic
ccaccucagccucccaaagugcu

SEQ ID NO: 26458 - RNA, 23 nt, Artificial Sequence
  Synthetic
caccucagccucccaaagugcug

SEQ ID NO: 26459 - RNA, 23 nt, Artificial Sequence
  Synthetic
accucagccucccaaagugcugg

SEQ ID NO: 26460 - RNA, 23 nt, Artificial Sequence
  Synthetic
ccucagccucccaaagugcuggg

SEQ ID NO: 26461 - RNA, 23 nt, Artificial Sequence
  Synthetic
cucagccucccaaagugcuggga

SEQ ID NO: 26462 - RNA, 23 nt, Artificial Sequence
  Synthetic
ucagccucccaaagugcugggau

SEQ ID NO: 26463 - RNA, 23 nt, Artificial Sequence
  Synthetic
cagccucccaaagugcugggauu

SEQ ID NO: 26464 - RNA, 23 nt, Artificial Sequence
  Synthetic
agccucccaaagugcugggauua

SEQ ID NO: 26465 - RNA, 23 nt, Artificial Sequence
  Synthetic
gccucccaaagugcugggauuac

SEQ ID NO: 26466 - RNA, 23 nt, Artificial Sequence
  Synthetic
ccucccaaagugcugggauuaca

SEQ ID NO: 26467 - RNA, 23 nt, Artificial Sequence
  Synthetic
cucccaaagugcugggauuacag

SEQ ID NO: 26468 - RNA, 23 nt, Artificial Sequence
  Synthetic
ucccaaagugcugggauuacagg

SEQ ID NO: 26469 - RNA, 23 nt, Artificial Sequence
  Synthetic
cccaaagugcugggauuacaggc

SEQ ID NO: 26470 - RNA, 23 nt, Artificial Sequence
  Synthetic
ccaaagugcugggauuacaggcg

SEQ ID NO: 26471 - RNA, 23 nt, Artificial Sequence
  Synthetic
caaagugcugggauuacaggcgu

SEQ ID NO: 26472 - RNA, 23 nt, Artificial Sequence
  Synthetic
aaagugcugggauuacaggcgug

SEQ ID NO: 26473 - RNA, 23 nt, Artificial Sequence
  Synthetic
aagugcugggauuacaggcguga

SEQ ID NO: 26474 - RNA, 23 nt, Artificial Sequence
  Synthetic
agugcugggauuacaggcgugag

SEQ ID NO: 26475 - RNA, 23 nt, Artificial Sequence
  Synthetic
gugcugggauuacaggcgugagc

SEQ ID NO: 26476 - RNA, 23 nt, Artificial Sequence
  Synthetic
ugcugggauuacaggcgugagcc

SEQ ID NO: 26477 - RNA, 23 nt, Artificial Sequence
  Synthetic
gcugggauuacaggcgugagcca

SEQ ID NO: 26478 - RNA, 23 nt, Artificial Sequence
  Synthetic
cugggauuacaggcgugagccac

SEQ ID NO: 26479 - RNA, 23 nt, Artificial Sequence
  Synthetic
ugggauuacaggcgugagccacu

SEQ ID NO: 26480 - RNA, 23 nt, Artificial Sequence
  Synthetic
gggauuacaggcgugagccacug

SEQ ID NO: 26481 - RNA, 23 nt, Artificial Sequence
  Synthetic
ggauuacaggcgugagccacugc

SEQ ID NO: 26482 - RNA, 23 nt, Artificial Sequence
  Synthetic
gauuacaggcgugagccacugcg

SEQ ID NO: 26483 - RNA, 23 nt, Artificial Sequence
  Synthetic
auuacaggcgugagccacugcgc

SEQ ID NO: 26484 - RNA, 23 nt, Artificial Sequence
  Synthetic
uuacaggcgugagccacugcgcc

SEQ ID NO: 26485 - RNA, 23 nt, Artificial Sequence
  Synthetic
uacaggcgugagccacugcgccc

SEQ ID NO: 26486 - RNA, 23 nt, Artificial Sequence
  Synthetic
acaggcgugagccacugcgcccc

SEQ ID NO: 26487 - RNA, 23 nt, Artificial Sequence
  Synthetic
caggcgugagccacugcgccccg

SEQ ID NO: 26488 - RNA, 23 nt, Artificial Sequence
  Synthetic
aggcgugagccacugcgccccgc

SEQ ID NO: 26489 - RNA, 23 nt, Artificial Sequence
  Synthetic
ggcgugagccacugcgccccgcc

SEQ ID NO: 26490 - RNA, 23 nt, Artificial Sequence
  Synthetic
gcgugagccacugcgccccgccc

SEQ ID NO: 26491 - RNA, 23 nt, Artificial Sequence
  Synthetic
cgugagccacugcgccccgccca

SEQ ID NO: 26492 - RNA, 23 nt, Artificial Sequence
  Synthetic
gugagccacugcgccccgcccac

SEQ ID NO: 26493 - RNA, 23 nt, Artificial Sequence
  Synthetic
ugagccacugcgccccgcccacu

SEQ ID NO: 26494 - RNA, 23 nt, Artificial Sequence
  Synthetic
gagccacugcgccccgcccacug

SEQ ID NO: 26495 - RNA, 23 nt, Artificial Sequence
  Synthetic
agccacugcgccccgcccacugu

SEQ ID NO: 26496 - RNA, 23 nt, Artificial Sequence
  Synthetic
gccacugcgccccgcccacuguc

SEQ ID NO: 26497 - RNA, 23 nt, Artificial Sequence
  Synthetic
ccacugcgccccgcccacugucu

SEQ ID NO: 26498 - RNA, 23 nt, Artificial Sequence
  Synthetic
cacugcgccccgcccacugucuu

SEQ ID NO: 26499 - RNA, 23 nt, Artificial Sequence
  Synthetic
acugcgccccgcccacugucuuu

SEQ ID NO: 26500 - RNA, 23 nt, Artificial Sequence
  Synthetic
cugcgccccgcccacugucuuuu

SEQ ID NO: 26501 - RNA, 23 nt, Artificial Sequence
  Synthetic
ugcgccccgcccacugucuuuuu

SEQ ID NO: 26502 - RNA, 23 nt, Artificial Sequence
  Synthetic
gcgccccgcccacugucuuuuuu

SEQ ID NO: 26503 - RNA, 23 nt, Artificial Sequence
  Synthetic
cgccccgcccacugucuuuuuuu

SEQ ID NO: 26504 - RNA, 23 nt, Artificial Sequence
  Synthetic
gccccgcccacugucuuuuuuuu

SEQ ID NO: 26505 - RNA, 23 nt, Artificial Sequence
  Synthetic
ccccgcccacugucuuuuuuuuu

SEQ ID NO: 26506 - RNA, 23 nt, Artificial Sequence
  Synthetic
cccgcccacugucuuuuuuuuuu

SEQ ID NO: 26507 - RNA, 23 nt, Artificial Sequence
  Synthetic
ccgcccacugucuuuuuuuuuuu

SEQ ID NO: 26508 - RNA, 23 nt, Artificial Sequence
  Synthetic
cgcccacugucuuuuuuuuuuuu

SEQ ID NO: 26509 - RNA, 23 nt, Artificial Sequence
  Synthetic
gcccacugucuuuuuuuuuuuuu

SEQ ID NO: 26510 - RNA, 23 nt, Artificial Sequence
  Synthetic
cccacugucuuuuuuuuuuuuuu

SEQ ID NO: 26511 - RNA, 23 nt, Artificial Sequence
  Synthetic
ccacugucuuuuuuuuuuuuuua

SEQ ID NO: 26512 - RNA, 23 nt, Artificial Sequence
  Synthetic
cacugucuuuuuuuuuuuuuuaa

SEQ ID NO: 26513 - RNA, 23 nt, Artificial Sequence
  Synthetic
acugucuuuuuuuuuuuuuuaaa

SEQ ID NO: 26514 - RNA, 23 nt, Artificial Sequence
  Synthetic
cugucuuuuuuuuuuuuuuaaag

SEQ ID NO: 26515 - RNA, 23 nt, Artificial Sequence
  Synthetic
ugucuuuuuuuuuuuuuuaaagg

SEQ ID NO: 26516 - RNA, 23 nt, Artificial Sequence
  Synthetic
gucuuuuuuuuuuuuuuaaagga

SEQ ID NO: 26517 - RNA, 23 nt, Artificial Sequence
  Synthetic
ucuuuuuuuuuuuuuuaaaggac

SEQ ID NO: 26518 - RNA, 23 nt, Artificial Sequence
  Synthetic
cuuuuuuuuuuuuuuaaaggacc

SEQ ID NO: 26519 - RNA, 23 nt, Artificial Sequence
  Synthetic
uuuuuuuuuuuuuuaaaggaccu

SEQ ID NO: 26520 - RNA, 23 nt, Artificial Sequence
  Synthetic
uuuuuuuuuuuuuaaaggaccuc

SEQ ID NO: 26521 - RNA, 23 nt, Artificial Sequence
  Synthetic
uuuuuuuuuuuuaaaggaccuca

SEQ ID NO: 26522 - RNA, 23 nt, Artificial Sequence
  Synthetic
uuuuuuuuuuuaaaggaccucag

SEQ ID NO: 26523 - RNA, 23 nt, Artificial Sequence
  Synthetic
uuuuuuuuuuaaaggaccucagg

SEQ ID NO: 26524 - RNA, 23 nt, Artificial Sequence
  Synthetic
uuuuuuuuuaaaggaccucaggu

SEQ ID NO: 26525 - RNA, 23 nt, Artificial Sequence
  Synthetic
uuuuuuuuaaaggaccucaggug

SEQ ID NO: 26526 - RNA, 23 nt, Artificial Sequence
  Synthetic
uuuuuuuaaaggaccucagguga

SEQ ID NO: 26527 - RNA, 23 nt, Artificial Sequence
  Synthetic
uuuuuuaaaggaccucaggugau

SEQ ID NO: 26528 - RNA, 23 nt, Artificial Sequence
  Synthetic
uuuuuaaaggaccucaggugauu

SEQ ID NO: 26529 - RNA, 23 nt, Artificial Sequence
  Synthetic
uuuuaaaggaccucaggugauuc

SEQ ID NO: 26530 - RNA, 23 nt, Artificial Sequence
  Synthetic
uuuaaaggaccucaggugauucu

SEQ ID NO: 26531 - RNA, 23 nt, Artificial Sequence
  Synthetic
uuaaaggaccucaggugauucug

SEQ ID NO: 26532 - RNA, 23 nt, Artificial Sequence
  Synthetic
uaaaggaccucaggugauucuga

SEQ ID NO: 26533 - RNA, 23 nt, Artificial Sequence
  Synthetic
aaaggaccucaggugauucugau

SEQ ID NO: 26534 - RNA, 23 nt, Artificial Sequence
  Synthetic
aaggaccucaggugauucugaug

SEQ ID NO: 26535 - RNA, 23 nt, Artificial Sequence
  Synthetic
aggaccucaggugauucugaugc

SEQ ID NO: 26536 - RNA, 23 nt, Artificial Sequence
  Synthetic
ggaccucaggugauucugaugca

SEQ ID NO: 26537 - RNA, 23 nt, Artificial Sequence
  Synthetic
gaccucaggugauucugaugcac

SEQ ID NO: 26538 - RNA, 23 nt, Artificial Sequence
  Synthetic
accucaggugauucugaugcaca

SEQ ID NO: 26539 - RNA, 23 nt, Artificial Sequence
  Synthetic
ccucaggugauucugaugcacag

SEQ ID NO: 26540 - RNA, 23 nt, Artificial Sequence
  Synthetic
cucaggugauucugaugcacagc

SEQ ID NO: 26541 - RNA, 23 nt, Artificial Sequence
  Synthetic
ucaggugauucugaugcacagcu

SEQ ID NO: 26542 - RNA, 23 nt, Artificial Sequence
  Synthetic
caggugauucugaugcacagcuc

SEQ ID NO: 26543 - RNA, 23 nt, Artificial Sequence
  Synthetic
aggugauucugaugcacagcuca

SEQ ID NO: 26544 - RNA, 23 nt, Artificial Sequence
  Synthetic
ggugauucugaugcacagcucag

SEQ ID NO: 26545 - RNA, 23 nt, Artificial Sequence
  Synthetic
gugauucugaugcacagcucagg

SEQ ID NO: 26546 - RNA, 23 nt, Artificial Sequence
  Synthetic
ugauucugaugcacagcucaggu

SEQ ID NO: 26547 - RNA, 23 nt, Artificial Sequence
  Synthetic
gauucugaugcacagcucagguu

SEQ ID NO: 26548 - RNA, 23 nt, Artificial Sequence
  Synthetic
auucugaugcacagcucagguug

SEQ ID NO: 26549 - RNA, 23 nt, Artificial Sequence
  Synthetic
uucugaugcacagcucagguuga

SEQ ID NO: 26550 - RNA, 23 nt, Artificial Sequence
  Synthetic
ucugaugcacagcucagguugaa

SEQ ID NO: 26551 - RNA, 23 nt, Artificial Sequence
  Synthetic
cugaugcacagcucagguugaaa

SEQ ID NO: 26552 - RNA, 23 nt, Artificial Sequence
  Synthetic
ugaugcacagcucagguugaaag

SEQ ID NO: 26553 - RNA, 23 nt, Artificial Sequence
  Synthetic
gaugcacagcucagguugaaagc

SEQ ID NO: 26554 - RNA, 23 nt, Artificial Sequence
  Synthetic
augcacagcucagguugaaagca

SEQ ID NO: 26555 - RNA, 23 nt, Artificial Sequence
  Synthetic
ugcacagcucagguugaaagcac

SEQ ID NO: 26556 - RNA, 23 nt, Artificial Sequence
  Synthetic
gcacagcucagguugaaagcacu

SEQ ID NO: 26557 - RNA, 23 nt, Artificial Sequence
  Synthetic
cacagcucagguugaaagcacug

SEQ ID NO: 26558 - RNA, 23 nt, Artificial Sequence
  Synthetic
acagcucagguugaaagcacuga

SEQ ID NO: 26559 - RNA, 23 nt, Artificial Sequence
  Synthetic
cagcucagguugaaagcacugaa

SEQ ID NO: 26560 - RNA, 23 nt, Artificial Sequence
  Synthetic
agcucagguugaaagcacugaac

SEQ ID NO: 26561 - RNA, 23 nt, Artificial Sequence
  Synthetic
gcucagguugaaagcacugaacu

SEQ ID NO: 26562 - RNA, 23 nt, Artificial Sequence
  Synthetic
cucagguugaaagcacugaacua

SEQ ID NO: 26563 - RNA, 23 nt, Artificial Sequence
  Synthetic
ucagguugaaagcacugaacuaa

SEQ ID NO: 26564 - RNA, 23 nt, Artificial Sequence
  Synthetic
cagguugaaagcacugaacuaaa

SEQ ID NO: 26565 - RNA, 23 nt, Artificial Sequence
  Synthetic
agguugaaagcacugaacuaaag

SEQ ID NO: 26566 - RNA, 23 nt, Artificial Sequence
  Synthetic
gguugaaagcacugaacuaaagg

SEQ ID NO: 26567 - RNA, 23 nt, Artificial Sequence
  Synthetic
guugaaagcacugaacuaaagga

SEQ ID NO: 26568 - RNA, 23 nt, Artificial Sequence
  Synthetic
uugaaagcacugaacuaaaggaa

SEQ ID NO: 26569 - RNA, 23 nt, Artificial Sequence
  Synthetic
ugaaagcacugaacuaaaggaag

SEQ ID NO: 26570 - RNA, 23 nt, Artificial Sequence
  Synthetic
gaaagcacugaacuaaaggaagg

SEQ ID NO: 26571 - RNA, 23 nt, Artificial Sequence
  Synthetic
aaagcacugaacuaaaggaagga

SEQ ID NO: 26572 - RNA, 23 nt, Artificial Sequence
  Synthetic
aagcacugaacuaaaggaaggag

SEQ ID NO: 26573 - RNA, 23 nt, Artificial Sequence
  Synthetic
agcacugaacuaaaggaaggagc

SEQ ID NO: 26574 - RNA, 23 nt, Artificial Sequence
  Synthetic
gcacugaacuaaaggaaggagcc

SEQ ID NO: 26575 - RNA, 23 nt, Artificial Sequence
  Synthetic
cacugaacuaaaggaaggagccu

SEQ ID NO: 26576 - RNA, 23 nt, Artificial Sequence
  Synthetic
acugaacuaaaggaaggagccuu

SEQ ID NO: 26577 - RNA, 23 nt, Artificial Sequence
  Synthetic
cugaacuaaaggaaggagccuuu

SEQ ID NO: 26578 - RNA, 23 nt, Artificial Sequence
  Synthetic
ugaacuaaaggaaggagccuuuu

SEQ ID NO: 26579 - RNA, 23 nt, Artificial Sequence
  Synthetic
gaacuaaaggaaggagccuuuug

SEQ ID NO: 26580 - RNA, 23 nt, Artificial Sequence
  Synthetic
aacuaaaggaaggagccuuuuga

SEQ ID NO: 26581 - RNA, 23 nt, Artificial Sequence
  Synthetic
acuaaaggaaggagccuuuugau

SEQ ID NO: 26582 - RNA, 23 nt, Artificial Sequence
  Synthetic
cuaaaggaaggagccuuuugaua

SEQ ID NO: 26583 - RNA, 23 nt, Artificial Sequence
  Synthetic
uaaaggaaggagccuuuugauau

SEQ ID NO: 26584 - RNA, 23 nt, Artificial Sequence
  Synthetic
aaaggaaggagccuuuugauaug

SEQ ID NO: 26585 - RNA, 23 nt, Artificial Sequence
  Synthetic
aaggaaggagccuuuugauaugc

SEQ ID NO: 26586 - RNA, 23 nt, Artificial Sequence
  Synthetic
aggaaggagccuuuugauaugca

SEQ ID NO: 26587 - RNA, 23 nt, Artificial Sequence
  Synthetic
ggaaggagccuuuugauaugcau

SEQ ID NO: 26588 - RNA, 23 nt, Artificial Sequence
  Synthetic
gaaggagccuuuugauaugcauu

SEQ ID NO: 26589 - RNA, 23 nt, Artificial Sequence
  Synthetic
aaggagccuuuugauaugcauuc

SEQ ID NO: 26590 - RNA, 23 nt, Artificial Sequence
  Synthetic
aggagccuuuugauaugcauuca

SEQ ID NO: 26591 - RNA, 23 nt, Artificial Sequence
  Synthetic
ggagccuuuugauaugcauucag

SEQ ID NO: 26592 - RNA, 23 nt, Artificial Sequence
  Synthetic
gagccuuuugauaugcauucagg

SEQ ID NO: 26593 - RNA, 23 nt, Artificial Sequence
  Synthetic
agccuuuugauaugcauucagga

SEQ ID NO: 26594 - RNA, 23 nt, Artificial Sequence
  Synthetic
gccuuuugauaugcauucaggaa

SEQ ID NO: 26595 - RNA, 23 nt, Artificial Sequence
  Synthetic
ccuuuugauaugcauucaggaag

SEQ ID NO: 26596 - RNA, 23 nt, Artificial Sequence
  Synthetic
cuuuugauaugcauucaggaagc

SEQ ID NO: 26597 - RNA, 23 nt, Artificial Sequence
  Synthetic
uuuugauaugcauucaggaagca

SEQ ID NO: 26598 - RNA, 23 nt, Artificial Sequence
  Synthetic
uuugauaugcauucaggaagcag

SEQ ID NO: 26599 - RNA, 23 nt, Artificial Sequence
  Synthetic
uugauaugcauucaggaagcagc

SEQ ID NO: 26600 - RNA, 23 nt, Artificial Sequence
  Synthetic
ugauaugcauucaggaagcagcc

SEQ ID NO: 26601 - RNA, 23 nt, Artificial Sequence
  Synthetic
gauaugcauucaggaagcagcca

SEQ ID NO: 26602 - RNA, 23 nt, Artificial Sequence
  Synthetic
auaugcauucaggaagcagccaa

SEQ ID NO: 26603 - RNA, 23 nt, Artificial Sequence
  Synthetic
uaugcauucaggaagcagccaac

SEQ ID NO: 26604 - RNA, 23 nt, Artificial Sequence
  Synthetic
augcauucaggaagcagccaacc

SEQ ID NO: 26605 - RNA, 23 nt, Artificial Sequence
  Synthetic
ugcauucaggaagcagccaaccu

SEQ ID NO: 26606 - RNA, 23 nt, Artificial Sequence
  Synthetic
gcauucaggaagcagccaaccua

SEQ ID NO: 26607 - RNA, 23 nt, Artificial Sequence
  Synthetic
cauucaggaagcagccaaccuaa

SEQ ID NO: 26608 - RNA, 23 nt, Artificial Sequence
  Synthetic
auucaggaagcagccaaccuaau

SEQ ID NO: 26609 - RNA, 23 nt, Artificial Sequence
  Synthetic
uucaggaagcagccaaccuaaug

SEQ ID NO: 26610 - RNA, 23 nt, Artificial Sequence
  Synthetic
ucaggaagcagccaaccuaaugc

SEQ ID NO: 26611 - RNA, 23 nt, Artificial Sequence
  Synthetic
caggaagcagccaaccuaaugca

SEQ ID NO: 26612 - RNA, 23 nt, Artificial Sequence
  Synthetic
aggaagcagccaaccuaaugcaa

SEQ ID NO: 26613 - RNA, 23 nt, Artificial Sequence
  Synthetic
ggaagcagccaaccuaaugcaau

SEQ ID NO: 26614 - RNA, 23 nt, Artificial Sequence
  Synthetic
gaagcagccaaccuaaugcaauc

SEQ ID NO: 26615 - RNA, 23 nt, Artificial Sequence
  Synthetic
aagcagccaaccuaaugcaauca

SEQ ID NO: 26616 - RNA, 23 nt, Artificial Sequence
  Synthetic
agcagccaaccuaaugcaaucaa

SEQ ID NO: 26617 - RNA, 23 nt, Artificial Sequence
  Synthetic
gcagccaaccuaaugcaaucaag

SEQ ID NO: 26618 - RNA, 23 nt, Artificial Sequence
  Synthetic
cagccaaccuaaugcaaucaaga

SEQ ID NO: 26619 - RNA, 23 nt, Artificial Sequence
  Synthetic
agccaaccuaaugcaaucaagaa

SEQ ID NO: 26620 - RNA, 23 nt, Artificial Sequence
  Synthetic
gccaaccuaaugcaaucaagaag

SEQ ID NO: 26621 - RNA, 23 nt, Artificial Sequence
  Synthetic
ccaaccuaaugcaaucaagaaga

SEQ ID NO: 26622 - RNA, 23 nt, Artificial Sequence
  Synthetic
caaccuaaugcaaucaagaagag

SEQ ID NO: 26623 - RNA, 23 nt, Artificial Sequence
  Synthetic
aaccuaaugcaaucaagaagaga

SEQ ID NO: 26624 - RNA, 23 nt, Artificial Sequence
  Synthetic
accuaaugcaaucaagaagagau

SEQ ID NO: 26625 - RNA, 23 nt, Artificial Sequence
  Synthetic
ccuaaugcaaucaagaagagaua

SEQ ID NO: 26626 - RNA, 23 nt, Artificial Sequence
  Synthetic
cuaaugcaaucaagaagagauag

SEQ ID NO: 26627 - RNA, 23 nt, Artificial Sequence
  Synthetic
uaaugcaaucaagaagagauagu

SEQ ID NO: 26628 - RNA, 23 nt, Artificial Sequence
  Synthetic
aaugcaaucaagaagagauaguu

SEQ ID NO: 26629 - RNA, 23 nt, Artificial Sequence
  Synthetic
augcaaucaagaagagauaguuc

SEQ ID NO: 26630 - RNA, 23 nt, Artificial Sequence
  Synthetic
ugcaaucaagaagagauaguucc

SEQ ID NO: 26631 - RNA, 23 nt, Artificial Sequence
  Synthetic
gcaaucaagaagagauaguuccu

SEQ ID NO: 26632 - RNA, 23 nt, Artificial Sequence
  Synthetic
caaucaagaagagauaguuccua

SEQ ID NO: 26633 - RNA, 23 nt, Artificial Sequence
  Synthetic
aaucaagaagagauaguuccuaa

SEQ ID NO: 26634 - RNA, 23 nt, Artificial Sequence
  Synthetic
aucaagaagagauaguuccuaac

SEQ ID NO: 26635 - RNA, 23 nt, Artificial Sequence
  Synthetic
ucaagaagagauaguuccuaacu

SEQ ID NO: 26636 - RNA, 23 nt, Artificial Sequence
  Synthetic
caagaagagauaguuccuaacug

SEQ ID NO: 26637 - RNA, 23 nt, Artificial Sequence
  Synthetic
aagaagagauaguuccuaacugu

SEQ ID NO: 26638 - RNA, 23 nt, Artificial Sequence
  Synthetic
agaagagauaguuccuaacuguc

SEQ ID NO: 26639 - RNA, 23 nt, Artificial Sequence
  Synthetic
gaagagauaguuccuaacuguca

SEQ ID NO: 26640 - RNA, 23 nt, Artificial Sequence
  Synthetic
aagagauaguuccuaacugucag

SEQ ID NO: 26641 - RNA, 23 nt, Artificial Sequence
  Synthetic
agagauaguuccuaacugucagc

SEQ ID NO: 26642 - RNA, 23 nt, Artificial Sequence
  Synthetic
gagauaguuccuaacugucagcc

SEQ ID NO: 26643 - RNA, 23 nt, Artificial Sequence
  Synthetic
agauaguuccuaacugucagccu

SEQ ID NO: 26644 - RNA, 23 nt, Artificial Sequence
  Synthetic
gauaguuccuaacugucagccuu

SEQ ID NO: 26645 - RNA, 23 nt, Artificial Sequence
  Synthetic
auaguuccuaacugucagccuug

SEQ ID NO: 26646 - RNA, 23 nt, Artificial Sequence
  Synthetic
uaguuccuaacugucagccuugu

SEQ ID NO: 26647 - RNA, 23 nt, Artificial Sequence
  Synthetic
aguuccuaacugucagccuugug

SEQ ID NO: 26648 - RNA, 23 nt, Artificial Sequence
  Synthetic
guuccuaacugucagccuugugg

SEQ ID NO: 26649 - RNA, 23 nt, Artificial Sequence
  Synthetic
uuccuaacugucagccuuguggc

SEQ ID NO: 26650 - RNA, 23 nt, Artificial Sequence
  Synthetic
uccuaacugucagccuuguggcu

SEQ ID NO: 26651 - RNA, 23 nt, Artificial Sequence
  Synthetic
ccuaacugucagccuuguggcua

SEQ ID NO: 26652 - RNA, 23 nt, Artificial Sequence
  Synthetic
cuaacugucagccuuguggcuaa

SEQ ID NO: 26653 - RNA, 23 nt, Artificial Sequence
  Synthetic
uaacugucagccuuguggcuaag

SEQ ID NO: 26654 - RNA, 23 nt, Artificial Sequence
  Synthetic
aacugucagccuuguggcuaagu

SEQ ID NO: 26655 - RNA, 23 nt, Artificial Sequence
  Synthetic
acugucagccuuguggcuaagug

SEQ ID NO: 26656 - RNA, 23 nt, Artificial Sequence
  Synthetic
cugucagccuuguggcuaaguga

SEQ ID NO: 26657 - RNA, 23 nt, Artificial Sequence
  Synthetic
ugucagccuuguggcuaagugag

SEQ ID NO: 26658 - RNA, 23 nt, Artificial Sequence
  Synthetic
gucagccuuguggcuaagugagg

SEQ ID NO: 26659 - RNA, 23 nt, Artificial Sequence
  Synthetic
ucagccuuguggcuaagugagga

SEQ ID NO: 26660 - RNA, 23 nt, Artificial Sequence
  Synthetic
cagccuuguggcuaagugaggaa

SEQ ID NO: 26661 - RNA, 23 nt, Artificial Sequence
  Synthetic
agccuuguggcuaagugaggaag

SEQ ID NO: 26662 - RNA, 23 nt, Artificial Sequence
  Synthetic
gccuuguggcuaagugaggaaga

SEQ ID NO: 26663 - RNA, 23 nt, Artificial Sequence
  Synthetic
ccuuguggcuaagugaggaagag

SEQ ID NO: 26664 - RNA, 23 nt, Artificial Sequence
  Synthetic
cuuguggcuaagugaggaagaga

SEQ ID NO: 26665 - RNA, 23 nt, Artificial Sequence
  Synthetic
uuguggcuaagugaggaagagau

SEQ ID NO: 26666 - RNA, 23 nt, Artificial Sequence
  Synthetic
uguggcuaagugaggaagagaua

SEQ ID NO: 26667 - RNA, 23 nt, Artificial Sequence
  Synthetic
guggcuaagugaggaagagauaa

SEQ ID NO: 26668 - RNA, 23 nt, Artificial Sequence
  Synthetic
uggcuaagugaggaagagauaau

SEQ ID NO: 26669 - RNA, 23 nt, Artificial Sequence
  Synthetic
ggcuaagugaggaagagauaauu

SEQ ID NO: 26670 - RNA, 23 nt, Artificial Sequence
  Synthetic
gcuaagugaggaagagauaauuu

SEQ ID NO: 26671 - RNA, 23 nt, Artificial Sequence
  Synthetic
cuaagugaggaagagauaauuug

SEQ ID NO: 26672 - RNA, 23 nt, Artificial Sequence
  Synthetic
uaagugaggaagagauaauuugg

SEQ ID NO: 26673 - RNA, 23 nt, Artificial Sequence
  Synthetic
aagugaggaagagauaauuuggc

SEQ ID NO: 26674 - RNA, 23 nt, Artificial Sequence
  Synthetic
agugaggaagagauaauuuggca

SEQ ID NO: 26675 - RNA, 23 nt, Artificial Sequence
  Synthetic
gugaggaagagauaauuuggcaa

SEQ ID NO: 26676 - RNA, 23 nt, Artificial Sequence
  Synthetic
ugaggaagagauaauuuggcaaa

SEQ ID NO: 26677 - RNA, 23 nt, Artificial Sequence
  Synthetic
gaggaagagauaauuuggcaaac

SEQ ID NO: 26678 - RNA, 23 nt, Artificial Sequence
  Synthetic
aggaagagauaauuuggcaaacc

SEQ ID NO: 26679 - RNA, 23 nt, Artificial Sequence
  Synthetic
ggaagagauaauuuggcaaacca

SEQ ID NO: 26680 - RNA, 23 nt, Artificial Sequence
  Synthetic
gaagagauaauuuggcaaaccau

SEQ ID NO: 26681 - RNA, 23 nt, Artificial Sequence
  Synthetic
aagagauaauuuggcaaaccaug

SEQ ID NO: 26682 - RNA, 23 nt, Artificial Sequence
  Synthetic
agagauaauuuggcaaaccaugg

SEQ ID NO: 26683 - RNA, 23 nt, Artificial Sequence
  Synthetic
gagauaauuuggcaaaccaugga

SEQ ID NO: 26684 - RNA, 23 nt, Artificial Sequence
  Synthetic
agauaauuuggcaaaccauggag

SEQ ID NO: 26685 - RNA, 23 nt, Artificial Sequence
  Synthetic
gauaauuuggcaaaccauggaga

SEQ ID NO: 26686 - RNA, 23 nt, Artificial Sequence
  Synthetic
auaauuuggcaaaccauggagac

SEQ ID NO: 26687 - RNA, 23 nt, Artificial Sequence
  Synthetic
uaauuuggcaaaccauggagacc

SEQ ID NO: 26688 - RNA, 23 nt, Artificial Sequence
  Synthetic
aauuuggcaaaccauggagaccc

SEQ ID NO: 26689 - RNA, 23 nt, Artificial Sequence
  Synthetic
auuuggcaaaccauggagacccc

SEQ ID NO: 26690 - RNA, 23 nt, Artificial Sequence
  Synthetic
uuuggcaaaccauggagacccca

SEQ ID NO: 26691 - RNA, 23 nt, Artificial Sequence
  Synthetic
uuggcaaaccauggagaccccac

SEQ ID NO: 26692 - RNA, 23 nt, Artificial Sequence
  Synthetic
uggcaaaccauggagaccccaca

SEQ ID NO: 26693 - RNA, 23 nt, Artificial Sequence
  Synthetic
ggcaaaccauggagaccccacac

SEQ ID NO: 26694 - RNA, 23 nt, Artificial Sequence
  Synthetic
gcaaaccauggagaccccacaca

SEQ ID NO: 26695 - RNA, 23 nt, Artificial Sequence
  Synthetic
caaaccauggagaccccacacaa

SEQ ID NO: 26696 - RNA, 23 nt, Artificial Sequence
  Synthetic
aaaccauggagaccccacacaac

SEQ ID NO: 26697 - RNA, 23 nt, Artificial Sequence
  Synthetic
aaccauggagaccccacacaaca

SEQ ID NO: 26698 - RNA, 23 nt, Artificial Sequence
  Synthetic
accauggagaccccacacaacac

SEQ ID NO: 26699 - RNA, 23 nt, Artificial Sequence
  Synthetic
ccauggagaccccacacaacaca

SEQ ID NO: 26700 - RNA, 23 nt, Artificial Sequence
  Synthetic
cauggagaccccacacaacacac

SEQ ID NO: 26701 - RNA, 23 nt, Artificial Sequence
  Synthetic
auggagaccccacacaacacaca

SEQ ID NO: 26702 - RNA, 23 nt, Artificial Sequence
  Synthetic
uggagaccccacacaacacacag

SEQ ID NO: 26703 - RNA, 23 nt, Artificial Sequence
  Synthetic
ggagaccccacacaacacacaga

SEQ ID NO: 26704 - RNA, 23 nt, Artificial Sequence
  Synthetic
gagaccccacacaacacacagag

SEQ ID NO: 26705 - RNA, 23 nt, Artificial Sequence
  Synthetic
agaccccacacaacacacagagc

SEQ ID NO: 26706 - RNA, 23 nt, Artificial Sequence
  Synthetic
gaccccacacaacacacagagcu

SEQ ID NO: 26707 - RNA, 23 nt, Artificial Sequence
  Synthetic
accccacacaacacacagagcug

SEQ ID NO: 26708 - RNA, 23 nt, Artificial Sequence
  Synthetic
ccccacacaacacacagagcugu

SEQ ID NO: 26709 - RNA, 23 nt, Artificial Sequence
  Synthetic
cccacacaacacacagagcugua

SEQ ID NO: 26710 - RNA, 23 nt, Artificial Sequence
  Synthetic
ccacacaacacacagagcuguaa

SEQ ID NO: 26711 - RNA, 23 nt, Artificial Sequence
  Synthetic
cacacaacacacagagcuguaau

SEQ ID NO: 26712 - RNA, 23 nt, Artificial Sequence
  Synthetic
acacaacacacagagcuguaauc

SEQ ID NO: 26713 - RNA, 23 nt, Artificial Sequence
  Synthetic
cacaacacacagagcuguaaucu

SEQ ID NO: 26714 - RNA, 23 nt, Artificial Sequence
  Synthetic
acaacacacagagcuguaaucua

SEQ ID NO: 26715 - RNA, 23 nt, Artificial Sequence
  Synthetic
caacacacagagcuguaaucuag

SEQ ID NO: 26716 - RNA, 23 nt, Artificial Sequence
  Synthetic
aacacacagagcuguaaucuaga

SEQ ID NO: 26717 - RNA, 23 nt, Artificial Sequence
  Synthetic
acacacagagcuguaaucuagag

SEQ ID NO: 26718 - RNA, 23 nt, Artificial Sequence
  Synthetic
cacacagagcuguaaucuagagc

SEQ ID NO: 26719 - RNA, 23 nt, Artificial Sequence
  Synthetic
acacagagcuguaaucuagagca

SEQ ID NO: 26720 - RNA, 23 nt, Artificial Sequence
  Synthetic
cacagagcuguaaucuagagcaa

SEQ ID NO: 26721 - RNA, 23 nt, Artificial Sequence
  Synthetic
acagagcuguaaucuagagcaag

SEQ ID NO: 26722 - RNA, 23 nt, Artificial Sequence
  Synthetic
cagagcuguaaucuagagcaagg

SEQ ID NO: 26723 - RNA, 23 nt, Artificial Sequence
  Synthetic
agagcuguaaucuagagcaagga

SEQ ID NO: 26724 - RNA, 23 nt, Artificial Sequence
  Synthetic
gagcuguaaucuagagcaaggag

SEQ ID NO: 26725 - RNA, 23 nt, Artificial Sequence
  Synthetic
agcuguaaucuagagcaaggaga

SEQ ID NO: 26726 - RNA, 23 nt, Artificial Sequence
  Synthetic
gcuguaaucuagagcaaggagac

SEQ ID NO: 26727 - RNA, 23 nt, Artificial Sequence
  Synthetic
cuguaaucuagagcaaggagaca

SEQ ID NO: 26728 - RNA, 23 nt, Artificial Sequence
  Synthetic
uguaaucuagagcaaggagacag

SEQ ID NO: 26729 - RNA, 23 nt, Artificial Sequence
  Synthetic
guaaucuagagcaaggagacaga

SEQ ID NO: 26730 - RNA, 23 nt, Artificial Sequence
  Synthetic
uaaucuagagcaaggagacagac

SEQ ID NO: 26731 - RNA, 23 nt, Artificial Sequence
  Synthetic
aaucuagagcaaggagacagaca

SEQ ID NO: 26732 - RNA, 23 nt, Artificial Sequence
  Synthetic
aucuagagcaaggagacagacaa

SEQ ID NO: 26733 - RNA, 23 nt, Artificial Sequence
  Synthetic
ucuagagcaaggagacagacaac

SEQ ID NO: 26734 - RNA, 23 nt, Artificial Sequence
  Synthetic
cuagagcaaggagacagacaacu

SEQ ID NO: 26735 - RNA, 23 nt, Artificial Sequence
  Synthetic
uagagcaaggagacagacaacuc

SEQ ID NO: 26736 - RNA, 23 nt, Artificial Sequence
  Synthetic
agagcaaggagacagacaacucc

SEQ ID NO: 26737 - RNA, 23 nt, Artificial Sequence
  Synthetic
gagcaaggagacagacaacuccc

SEQ ID NO: 26738 - RNA, 23 nt, Artificial Sequence
  Synthetic
agcaaggagacagacaacuccca

SEQ ID NO: 26739 - RNA, 23 nt, Artificial Sequence
  Synthetic
gcaaggagacagacaacucccaa

SEQ ID NO: 26740 - RNA, 23 nt, Artificial Sequence
  Synthetic
caaggagacagacaacucccaaa

SEQ ID NO: 26741 - RNA, 23 nt, Artificial Sequence
  Synthetic
aaggagacagacaacucccaaac

SEQ ID NO: 26742 - RNA, 23 nt, Artificial Sequence
  Synthetic
aggagacagacaacucccaaacc

SEQ ID NO: 26743 - RNA, 23 nt, Artificial Sequence
  Synthetic
ggagacagacaacucccaaaccu

SEQ ID NO: 26744 - RNA, 23 nt, Artificial Sequence
  Synthetic
gagacagacaacucccaaaccua

SEQ ID NO: 26745 - RNA, 23 nt, Artificial Sequence
  Synthetic
agacagacaacucccaaaccuac

SEQ ID NO: 26746 - RNA, 23 nt, Artificial Sequence
  Synthetic
gacagacaacucccaaaccuaca

SEQ ID NO: 26747 - RNA, 23 nt, Artificial Sequence
  Synthetic
acagacaacucccaaaccuacag

SEQ ID NO: 26748 - RNA, 23 nt, Artificial Sequence
  Synthetic
cagacaacucccaaaccuacagu

SEQ ID NO: 26749 - RNA, 23 nt, Artificial Sequence
  Synthetic
agacaacucccaaaccuacaguc

SEQ ID NO: 26750 - RNA, 23 nt, Artificial Sequence
  Synthetic
gacaacucccaaaccuacaguca

SEQ ID NO: 26751 - RNA, 23 nt, Artificial Sequence
  Synthetic
acaacucccaaaccuacagucag

SEQ ID NO: 26752 - RNA, 23 nt, Artificial Sequence
  Synthetic
caacucccaaaccuacagucagc

SEQ ID NO: 26753 - RNA, 23 nt, Artificial Sequence
  Synthetic
aacucccaaaccuacagucagcu

SEQ ID NO: 26754 - RNA, 23 nt, Artificial Sequence
  Synthetic
acucccaaaccuacagucagcuc

SEQ ID NO: 26755 - RNA, 23 nt, Artificial Sequence
  Synthetic
cucccaaaccuacagucagcucc

SEQ ID NO: 26756 - RNA, 23 nt, Artificial Sequence
  Synthetic
ucccaaaccuacagucagcucca

SEQ ID NO: 26757 - RNA, 23 nt, Artificial Sequence
  Synthetic
cccaaaccuacagucagcuccaa

SEQ ID NO: 26758 - RNA, 23 nt, Artificial Sequence
  Synthetic
ccaaaccuacagucagcuccaag

SEQ ID NO: 26759 - RNA, 23 nt, Artificial Sequence
  Synthetic
caaaccuacagucagcuccaaga

SEQ ID NO: 26760 - RNA, 23 nt, Artificial Sequence
  Synthetic
aaaccuacagucagcuccaagag

SEQ ID NO: 26761 - RNA, 23 nt, Artificial Sequence
  Synthetic
aaccuacagucagcuccaagagc

SEQ ID NO: 26762 - RNA, 23 nt, Artificial Sequence
  Synthetic
accuacagucagcuccaagagcc

SEQ ID NO: 26763 - RNA, 23 nt, Artificial Sequence
  Synthetic
ccuacagucagcuccaagagccc

SEQ ID NO: 26764 - RNA, 23 nt, Artificial Sequence
  Synthetic
cuacagucagcuccaagagcccu

SEQ ID NO: 26765 - RNA, 23 nt, Artificial Sequence
  Synthetic
uacagucagcuccaagagcccua

SEQ ID NO: 26766 - RNA, 23 nt, Artificial Sequence
  Synthetic
acagucagcuccaagagcccuag

SEQ ID NO: 26767 - RNA, 23 nt, Artificial Sequence
  Synthetic
cagucagcuccaagagcccuagc

SEQ ID NO: 26768 - RNA, 23 nt, Artificial Sequence
  Synthetic
agucagcuccaagagcccuagca

SEQ ID NO: 26769 - RNA, 23 nt, Artificial Sequence
  Synthetic
gucagcuccaagagcccuagcac

SEQ ID NO: 26770 - RNA, 23 nt, Artificial Sequence
  Synthetic
ucagcuccaagagcccuagcacc

SEQ ID NO: 26771 - RNA, 23 nt, Artificial Sequence
  Synthetic
cagcuccaagagcccuagcaccu

SEQ ID NO: 26772 - RNA, 23 nt, Artificial Sequence
  Synthetic
agcuccaagagcccuagcaccuu

SEQ ID NO: 26773 - RNA, 23 nt, Artificial Sequence
  Synthetic
gcuccaagagcccuagcaccuuu

SEQ ID NO: 26774 - RNA, 23 nt, Artificial Sequence
  Synthetic
cuccaagagcccuagcaccuuuc

SEQ ID NO: 26775 - RNA, 23 nt, Artificial Sequence
  Synthetic
uccaagagcccuagcaccuuuca

SEQ ID NO: 26776 - RNA, 23 nt, Artificial Sequence
  Synthetic
ccaagagcccuagcaccuuucau

SEQ ID NO: 26777 - RNA, 23 nt, Artificial Sequence
  Synthetic
caagagcccuagcaccuuucaug

SEQ ID NO: 26778 - RNA, 23 nt, Artificial Sequence
  Synthetic
aagagcccuagcaccuuucaugu

SEQ ID NO: 26779 - RNA, 23 nt, Artificial Sequence
  Synthetic
agagcccuagcaccuuucaugug

SEQ ID NO: 26780 - RNA, 23 nt, Artificial Sequence
  Synthetic
gagcccuagcaccuuucaugugc

SEQ ID NO: 26781 - RNA, 23 nt, Artificial Sequence
  Synthetic
agcccuagcaccuuucaugugcu

SEQ ID NO: 26782 - RNA, 23 nt, Artificial Sequence
  Synthetic
gcccuagcaccuuucaugugcuu

SEQ ID NO: 26783 - RNA, 23 nt, Artificial Sequence
  Synthetic
cccuagcaccuuucaugugcuuu

SEQ ID NO: 26784 - RNA, 23 nt, Artificial Sequence
  Synthetic
ccuagcaccuuucaugugcuuuu

SEQ ID NO: 26785 - RNA, 23 nt, Artificial Sequence
  Synthetic
cuagcaccuuucaugugcuuuuc

SEQ ID NO: 26786 - RNA, 23 nt, Artificial Sequence
  Synthetic
uagcaccuuucaugugcuuuucc

SEQ ID NO: 26787 - RNA, 23 nt, Artificial Sequence
  Synthetic
agcaccuuucaugugcuuuuccu

SEQ ID NO: 26788 - RNA, 23 nt, Artificial Sequence
  Synthetic
gcaccuuucaugugcuuuuccug

SEQ ID NO: 26789 - RNA, 23 nt, Artificial Sequence
  Synthetic
caccuuucaugugcuuuuccuga

SEQ ID NO: 26790 - RNA, 23 nt, Artificial Sequence
  Synthetic
accuuucaugugcuuuuccugaa

SEQ ID NO: 26791 - RNA, 23 nt, Artificial Sequence
  Synthetic
ccuuucaugugcuuuuccugaaa

SEQ ID NO: 26792 - RNA, 23 nt, Artificial Sequence
  Synthetic
cuuucaugugcuuuuccugaaag

SEQ ID NO: 26793 - RNA, 23 nt, Artificial Sequence
  Synthetic
uuucaugugcuuuuccugaaagc

SEQ ID NO: 26794 - RNA, 23 nt, Artificial Sequence
  Synthetic
uucaugugcuuuuccugaaagcu

SEQ ID NO: 26795 - RNA, 23 nt, Artificial Sequence
  Synthetic
ucaugugcuuuuccugaaagcug

SEQ ID NO: 26796 - RNA, 23 nt, Artificial Sequence
  Synthetic
caugugcuuuuccugaaagcuga

SEQ ID NO: 26797 - RNA, 23 nt, Artificial Sequence
  Synthetic
augugcuuuuccugaaagcugau

SEQ ID NO: 26798 - RNA, 23 nt, Artificial Sequence
  Synthetic
ugugcuuuuccugaaagcugaug

SEQ ID NO: 26799 - RNA, 23 nt, Artificial Sequence
  Synthetic
gugcuuuuccugaaagcugaugu

SEQ ID NO: 26800 - RNA, 23 nt, Artificial Sequence
  Synthetic
ugcuuuuccugaaagcugaugug

SEQ ID NO: 26801 - RNA, 23 nt, Artificial Sequence
  Synthetic
gcuuuuccugaaagcugaugugu

SEQ ID NO: 26802 - RNA, 23 nt, Artificial Sequence
  Synthetic
cuuuuccugaaagcugaugugug

SEQ ID NO: 26803 - RNA, 23 nt, Artificial Sequence
  Synthetic
uuuuccugaaagcugaugugugc

SEQ ID NO: 26804 - RNA, 23 nt, Artificial Sequence
  Synthetic
uuuccugaaagcugaugugugcc

SEQ ID NO: 26805 - RNA, 23 nt, Artificial Sequence
  Synthetic
uuccugaaagcugaugugugcca

SEQ ID NO: 26806 - RNA, 23 nt, Artificial Sequence
  Synthetic
uccugaaagcugaugugugccau

SEQ ID NO: 26807 - RNA, 23 nt, Artificial Sequence
  Synthetic
ccugaaagcugaugugugccauc

SEQ ID NO: 26808 - RNA, 23 nt, Artificial Sequence
  Synthetic
cugaaagcugaugugugccaucc

SEQ ID NO: 26809 - RNA, 23 nt, Artificial Sequence
  Synthetic
ugaaagcugaugugugccaucca

SEQ ID NO: 26810 - RNA, 23 nt, Artificial Sequence
  Synthetic
gaaagcugaugugugccauccau

SEQ ID NO: 26811 - RNA, 23 nt, Artificial Sequence
  Synthetic
aaagcugaugugugccauccaua

SEQ ID NO: 26812 - RNA, 23 nt, Artificial Sequence
  Synthetic
aagcugaugugugccauccauaa

SEQ ID NO: 26813 - RNA, 23 nt, Artificial Sequence
  Synthetic
agcugaugugugccauccauaaa

SEQ ID NO: 26814 - RNA, 23 nt, Artificial Sequence
  Synthetic
gcugaugugugccauccauaaag

SEQ ID NO: 26815 - RNA, 23 nt, Artificial Sequence
  Synthetic
cugaugugugccauccauaaaga

SEQ ID NO: 26816 - RNA, 23 nt, Artificial Sequence
  Synthetic
ugaugugugccauccauaaagau

SEQ ID NO: 26817 - RNA, 23 nt, Artificial Sequence
  Synthetic
gaugugugccauccauaaagauc

SEQ ID NO: 26818 - RNA, 23 nt, Artificial Sequence
  Synthetic
augugugccauccauaaagauca

SEQ ID NO: 26819 - RNA, 23 nt, Artificial Sequence
  Synthetic
ugugugccauccauaaagaucac

SEQ ID NO: 26820 - RNA, 23 nt, Artificial Sequence
  Synthetic
gugugccauccauaaagaucaca

SEQ ID NO: 26821 - RNA, 23 nt, Artificial Sequence
  Synthetic
ugugccauccauaaagaucacag

SEQ ID NO: 26822 - RNA, 23 nt, Artificial Sequence
  Synthetic
gugccauccauaaagaucacagc

SEQ ID NO: 26823 - RNA, 23 nt, Artificial Sequence
  Synthetic
ugccauccauaaagaucacagcu

SEQ ID NO: 26824 - RNA, 23 nt, Artificial Sequence
  Synthetic
gccauccauaaagaucacagcug

SEQ ID NO: 26825 - RNA, 23 nt, Artificial Sequence
  Synthetic
ccauccauaaagaucacagcugg

SEQ ID NO: 26826 - RNA, 23 nt, Artificial Sequence
  Synthetic
cauccauaaagaucacagcuggg

SEQ ID NO: 26827 - RNA, 23 nt, Artificial Sequence
  Synthetic
auccauaaagaucacagcugggc

SEQ ID NO: 26828 - RNA, 23 nt, Artificial Sequence
  Synthetic
uccauaaagaucacagcugggcc

SEQ ID NO: 26829 - RNA, 23 nt, Artificial Sequence
  Synthetic
ccauaaagaucacagcugggccc

SEQ ID NO: 26830 - RNA, 23 nt, Artificial Sequence
  Synthetic
cauaaagaucacagcugggccca

SEQ ID NO: 26831 - RNA, 23 nt, Artificial Sequence
  Synthetic
auaaagaucacagcugggcccac

SEQ ID NO: 26832 - RNA, 23 nt, Artificial Sequence
  Synthetic
uaaagaucacagcugggcccacc

SEQ ID NO: 26833 - RNA, 23 nt, Artificial Sequence
  Synthetic
aaagaucacagcugggcccacca

SEQ ID NO: 26834 - RNA, 23 nt, Artificial Sequence
  Synthetic
aagaucacagcugggcccaccaa

SEQ ID NO: 26835 - RNA, 23 nt, Artificial Sequence
  Synthetic
agaucacagcugggcccaccaag

SEQ ID NO: 26836 - RNA, 23 nt, Artificial Sequence
  Synthetic
gaucacagcugggcccaccaaga

SEQ ID NO: 26837 - RNA, 23 nt, Artificial Sequence
  Synthetic
aucacagcugggcccaccaagag

SEQ ID NO: 26838 - RNA, 23 nt, Artificial Sequence
  Synthetic
ucacagcugggcccaccaagagg

SEQ ID NO: 26839 - RNA, 23 nt, Artificial Sequence
  Synthetic
cacagcugggcccaccaagagga

SEQ ID NO: 26840 - RNA, 23 nt, Artificial Sequence
  Synthetic
acagcugggcccaccaagaggaa

SEQ ID NO: 26841 - RNA, 23 nt, Artificial Sequence
  Synthetic
cagcugggcccaccaagaggaag

SEQ ID NO: 26842 - RNA, 23 nt, Artificial Sequence
  Synthetic
agcugggcccaccaagaggaagc

SEQ ID NO: 26843 - RNA, 23 nt, Artificial Sequence
  Synthetic
gcugggcccaccaagaggaagcu

SEQ ID NO: 26844 - RNA, 23 nt, Artificial Sequence
  Synthetic
cugggcccaccaagaggaagcug

SEQ ID NO: 26845 - RNA, 23 nt, Artificial Sequence
  Synthetic
ugggcccaccaagaggaagcugu

SEQ ID NO: 26846 - RNA, 23 nt, Artificial Sequence
  Synthetic
gggcccaccaagaggaagcugug

SEQ ID NO: 26847 - RNA, 23 nt, Artificial Sequence
  Synthetic
ggcccaccaagaggaagcugugc

SEQ ID NO: 26848 - RNA, 23 nt, Artificial Sequence
  Synthetic
gcccaccaagaggaagcugugca

SEQ ID NO: 26849 - RNA, 23 nt, Artificial Sequence
  Synthetic
cccaccaagaggaagcugugcag

SEQ ID NO: 26850 - RNA, 23 nt, Artificial Sequence
  Synthetic
ccaccaagaggaagcugugcaga

SEQ ID NO: 26851 - RNA, 23 nt, Artificial Sequence
  Synthetic
caccaagaggaagcugugcagag

SEQ ID NO: 26852 - RNA, 23 nt, Artificial Sequence
  Synthetic
accaagaggaagcugugcagaga

SEQ ID NO: 26853 - RNA, 23 nt, Artificial Sequence
  Synthetic
ccaagaggaagcugugcagagau

SEQ ID NO: 26854 - RNA, 23 nt, Artificial Sequence
  Synthetic
caagaggaagcugugcagagaua

SEQ ID NO: 26855 - RNA, 23 nt, Artificial Sequence
  Synthetic
aagaggaagcugugcagagauaa

SEQ ID NO: 26856 - RNA, 23 nt, Artificial Sequence
  Synthetic
agaggaagcugugcagagauaau

SEQ ID NO: 26857 - RNA, 23 nt, Artificial Sequence
  Synthetic
gaggaagcugugcagagauaaug

SEQ ID NO: 26858 - RNA, 23 nt, Artificial Sequence
  Synthetic
aggaagcugugcagagauaaugc

SEQ ID NO: 26859 - RNA, 23 nt, Artificial Sequence
  Synthetic
ggaagcugugcagagauaaugca

SEQ ID NO: 26860 - RNA, 23 nt, Artificial Sequence
  Synthetic
gaagcugugcagagauaaugcag

SEQ ID NO: 26861 - RNA, 23 nt, Artificial Sequence
  Synthetic
aagcugugcagagauaaugcagc

SEQ ID NO: 26862 - RNA, 23 nt, Artificial Sequence
  Synthetic
agcugugcagagauaaugcagcc

SEQ ID NO: 26863 - RNA, 23 nt, Artificial Sequence
  Synthetic
gcugugcagagauaaugcagccc

SEQ ID NO: 26864 - RNA, 23 nt, Artificial Sequence
  Synthetic
cugugcagagauaaugcagcccu

SEQ ID NO: 26865 - RNA, 23 nt, Artificial Sequence
  Synthetic
ugugcagagauaaugcagcccuc

SEQ ID NO: 26866 - RNA, 23 nt, Artificial Sequence
  Synthetic
gugcagagauaaugcagcccuca

SEQ ID NO: 26867 - RNA, 23 nt, Artificial Sequence
  Synthetic
ugcagagauaaugcagcccucac

SEQ ID NO: 26868 - RNA, 23 nt, Artificial Sequence
  Synthetic
gcagagauaaugcagcccucaca

SEQ ID NO: 26869 - RNA, 23 nt, Artificial Sequence
  Synthetic
cagagauaaugcagcccucacag

SEQ ID NO: 26870 - RNA, 23 nt, Artificial Sequence
  Synthetic
agagauaaugcagcccucacagc

SEQ ID NO: 26871 - RNA, 23 nt, Artificial Sequence
  Synthetic
gagauaaugcagcccucacagcc

SEQ ID NO: 26872 - RNA, 23 nt, Artificial Sequence
  Synthetic
agauaaugcagcccucacagcca

SEQ ID NO: 26873 - RNA, 23 nt, Artificial Sequence
  Synthetic
gauaaugcagcccucacagccac

SEQ ID NO: 26874 - RNA, 23 nt, Artificial Sequence
  Synthetic
auaaugcagcccucacagccacu

SEQ ID NO: 26875 - RNA, 23 nt, Artificial Sequence
  Synthetic
uaaugcagcccucacagccacuu

SEQ ID NO: 26876 - RNA, 23 nt, Artificial Sequence
  Synthetic
aaugcagcccucacagccacuuc

SEQ ID NO: 26877 - RNA, 23 nt, Artificial Sequence
  Synthetic
augcagcccucacagccacuucc

SEQ ID NO: 26878 - RNA, 23 nt, Artificial Sequence
  Synthetic
ugcagcccucacagccacuuccg

SEQ ID NO: 26879 - RNA, 23 nt, Artificial Sequence
  Synthetic
gcagcccucacagccacuuccgg

SEQ ID NO: 26880 - RNA, 23 nt, Artificial Sequence
  Synthetic
cagcccucacagccacuuccgga

SEQ ID NO: 26881 - RNA, 23 nt, Artificial Sequence
  Synthetic
agcccucacagccacuuccggag

SEQ ID NO: 26882 - RNA, 23 nt, Artificial Sequence
  Synthetic
gcccucacagccacuuccggaga

SEQ ID NO: 26883 - RNA, 23 nt, Artificial Sequence
  Synthetic
cccucacagccacuuccggagac

SEQ ID NO: 26884 - RNA, 23 nt, Artificial Sequence
  Synthetic
ccucacagccacuuccggagacu

SEQ ID NO: 26885 - RNA, 23 nt, Artificial Sequence
  Synthetic
cucacagccacuuccggagacua

SEQ ID NO: 26886 - RNA, 23 nt, Artificial Sequence
  Synthetic
ucacagccacuuccggagacuac

SEQ ID NO: 26887 - RNA, 23 nt, Artificial Sequence
  Synthetic
cacagccacuuccggagacuaca

SEQ ID NO: 26888 - RNA, 23 nt, Artificial Sequence
  Synthetic
acagccacuuccggagacuacac

SEQ ID NO: 26889 - RNA, 23 nt, Artificial Sequence
  Synthetic
cagccacuuccggagacuacaca

SEQ ID NO: 26890 - RNA, 23 nt, Artificial Sequence
  Synthetic
agccacuuccggagacuacacag

SEQ ID NO: 26891 - RNA, 23 nt, Artificial Sequence
  Synthetic
gccacuuccggagacuacacaga

SEQ ID NO: 26892 - RNA, 23 nt, Artificial Sequence
  Synthetic
ccacuuccggagacuacacagag

SEQ ID NO: 26893 - RNA, 23 nt, Artificial Sequence
  Synthetic
cacuuccggagacuacacagaga

SEQ ID NO: 26894 - RNA, 23 nt, Artificial Sequence
  Synthetic
acuuccggagacuacacagagau

SEQ ID NO: 26895 - RNA, 23 nt, Artificial Sequence
  Synthetic
cuuccggagacuacacagagauu

SEQ ID NO: 26896 - RNA, 23 nt, Artificial Sequence
  Synthetic
uuccggagacuacacagagauuc

SEQ ID NO: 26897 - RNA, 23 nt, Artificial Sequence
  Synthetic
uccggagacuacacagagauucu

SEQ ID NO: 26898 - RNA, 23 nt, Artificial Sequence
  Synthetic
ccggagacuacacagagauucua

SEQ ID NO: 26899 - RNA, 23 nt, Artificial Sequence
  Synthetic
cggagacuacacagagauucuag

SEQ ID NO: 26900 - RNA, 23 nt, Artificial Sequence
  Synthetic
ggagacuacacagagauucuagu

SEQ ID NO: 26901 - RNA, 23 nt, Artificial Sequence
  Synthetic
gagacuacacagagauucuagug

SEQ ID NO: 26902 - RNA, 23 nt, Artificial Sequence
  Synthetic
agacuacacagagauucuagugg

SEQ ID NO: 26903 - RNA, 23 nt, Artificial Sequence
  Synthetic
gacuacacagagauucuaguggu

SEQ ID NO: 26904 - RNA, 23 nt, Artificial Sequence
  Synthetic
acuacacagagauucuagugguu

SEQ ID NO: 26905 - RNA, 23 nt, Artificial Sequence
  Synthetic
cuacacagagauucuagugguuu

SEQ ID NO: 26906 - RNA, 23 nt, Artificial Sequence
  Synthetic
uacacagagauucuagugguuuc

SEQ ID NO: 26907 - RNA, 23 nt, Artificial Sequence
  Synthetic
acacagagauucuagugguuucc

SEQ ID NO: 26908 - RNA, 23 nt, Artificial Sequence
  Synthetic
cacagagauucuagugguuucca

SEQ ID NO: 26909 - RNA, 23 nt, Artificial Sequence
  Synthetic
acagagauucuagugguuuccac

SEQ ID NO: 26910 - RNA, 23 nt, Artificial Sequence
  Synthetic
cagagauucuagugguuuccacu

SEQ ID NO: 26911 - RNA, 23 nt, Artificial Sequence
  Synthetic
agagauucuagugguuuccacuu

SEQ ID NO: 26912 - RNA, 23 nt, Artificial Sequence
  Synthetic
gagauucuagugguuuccacuua

SEQ ID NO: 26913 - RNA, 23 nt, Artificial Sequence
  Synthetic
agauucuagugguuuccacuuaa

SEQ ID NO: 26914 - RNA, 23 nt, Artificial Sequence
  Synthetic
gauucuagugguuuccacuuaaa

SEQ ID NO: 26915 - RNA, 23 nt, Artificial Sequence
  Synthetic
auucuagugguuuccacuuaaaa

SEQ ID NO: 26916 - RNA, 23 nt, Artificial Sequence
  Synthetic
uucuagugguuuccacuuaaaac

SEQ ID NO: 26917 - RNA, 23 nt, Artificial Sequence
  Synthetic
ucuagugguuuccacuuaaaacg

SEQ ID NO: 26918 - RNA, 23 nt, Artificial Sequence
  Synthetic
cuagugguuuccacuuaaaacgc

SEQ ID NO: 26919 - RNA, 23 nt, Artificial Sequence
  Synthetic
uagugguuuccacuuaaaacgcu

SEQ ID NO: 26920 - RNA, 23 nt, Artificial Sequence
  Synthetic
agugguuuccacuuaaaacgcuc

SEQ ID NO: 26921 - RNA, 23 nt, Artificial Sequence
  Synthetic
gugguuuccacuuaaaacgcucc

SEQ ID NO: 26922 - RNA, 23 nt, Artificial Sequence
  Synthetic
ugguuuccacuuaaaacgcucca

SEQ ID NO: 26923 - RNA, 23 nt, Artificial Sequence
  Synthetic
gguuuccacuuaaaacgcuccag

SEQ ID NO: 26924 - RNA, 23 nt, Artificial Sequence
  Synthetic
guuuccacuuaaaacgcuccagu

SEQ ID NO: 26925 - RNA, 23 nt, Artificial Sequence
  Synthetic
uuuccacuuaaaacgcuccagug

SEQ ID NO: 26926 - RNA, 23 nt, Artificial Sequence
  Synthetic
uuccacuuaaaacgcuccagugc

SEQ ID NO: 26927 - RNA, 23 nt, Artificial Sequence
  Synthetic
uccacuuaaaacgcuccagugca

SEQ ID NO: 26928 - RNA, 23 nt, Artificial Sequence
  Synthetic
ccacuuaaaacgcuccagugcau

SEQ ID NO: 26929 - RNA, 23 nt, Artificial Sequence
  Synthetic
cacuuaaaacgcuccagugcauu

SEQ ID NO: 26930 - RNA, 23 nt, Artificial Sequence
  Synthetic
acuuaaaacgcuccagugcauug

SEQ ID NO: 26931 - RNA, 23 nt, Artificial Sequence
  Synthetic
cuuaaaacgcuccagugcauugg

SEQ ID NO: 26932 - RNA, 23 nt, Artificial Sequence
  Synthetic
uuaaaacgcuccagugcauugga

SEQ ID NO: 26933 - RNA, 23 nt, Artificial Sequence
  Synthetic
uaaaacgcuccagugcauuggag

SEQ ID NO: 26934 - RNA, 23 nt, Artificial Sequence
  Synthetic
aaaacgcuccagugcauuggaga

SEQ ID NO: 26935 - RNA, 23 nt, Artificial Sequence
  Synthetic
aaacgcuccagugcauuggagag

SEQ ID NO: 26936 - RNA, 23 nt, Artificial Sequence
  Synthetic
aacgcuccagugcauuggagagg

SEQ ID NO: 26937 - RNA, 23 nt, Artificial Sequence
  Synthetic
acgcuccagugcauuggagaggc

SEQ ID NO: 26938 - RNA, 23 nt, Artificial Sequence
  Synthetic
cgcuccagugcauuggagaggca

SEQ ID NO: 26939 - RNA, 23 nt, Artificial Sequence
  Synthetic
gcuccagugcauuggagaggcau

SEQ ID NO: 26940 - RNA, 23 nt, Artificial Sequence
  Synthetic
cuccagugcauuggagaggcauu

SEQ ID NO: 26941 - RNA, 23 nt, Artificial Sequence
  Synthetic
uccagugcauuggagaggcauuu

SEQ ID NO: 26942 - RNA, 23 nt, Artificial Sequence
  Synthetic
ccagugcauuggagaggcauuug

SEQ ID NO: 26943 - RNA, 23 nt, Artificial Sequence
  Synthetic
cagugcauuggagaggcauuugc

SEQ ID NO: 26944 - RNA, 23 nt, Artificial Sequence
  Synthetic
agugcauuggagaggcauuugcc

SEQ ID NO: 26945 - RNA, 23 nt, Artificial Sequence
  Synthetic
gugcauuggagaggcauuugccg

SEQ ID NO: 26946 - RNA, 23 nt, Artificial Sequence
  Synthetic
ugcauuggagaggcauuugccgg

SEQ ID NO: 26947 - RNA, 23 nt, Artificial Sequence
  Synthetic
gcauuggagaggcauuugccggg

SEQ ID NO: 26948 - RNA, 23 nt, Artificial Sequence
  Synthetic
cauuggagaggcauuugccgggc

SEQ ID NO: 26949 - RNA, 23 nt, Artificial Sequence
  Synthetic
auuggagaggcauuugccgggca

SEQ ID NO: 26950 - RNA, 23 nt, Artificial Sequence
  Synthetic
uuggagaggcauuugccgggcau

SEQ ID NO: 26951 - RNA, 23 nt, Artificial Sequence
  Synthetic
uggagaggcauuugccgggcaug

SEQ ID NO: 26952 - RNA, 23 nt, Artificial Sequence
  Synthetic
ggagaggcauuugccgggcaugc

SEQ ID NO: 26953 - RNA, 23 nt, Artificial Sequence
  Synthetic
gagaggcauuugccgggcaugca

SEQ ID NO: 26954 - RNA, 23 nt, Artificial Sequence
  Synthetic
agaggcauuugccgggcaugcac

SEQ ID NO: 26955 - RNA, 23 nt, Artificial Sequence
  Synthetic
gaggcauuugccgggcaugcacg

SEQ ID NO: 26956 - RNA, 23 nt, Artificial Sequence
  Synthetic
aggcauuugccgggcaugcacgc

SEQ ID NO: 26957 - RNA, 23 nt, Artificial Sequence
  Synthetic
ggcauuugccgggcaugcacgcu

SEQ ID NO: 26958 - RNA, 23 nt, Artificial Sequence
  Synthetic
gcauuugccgggcaugcacgcuu

SEQ ID NO: 26959 - RNA, 23 nt, Artificial Sequence
  Synthetic
cauuugccgggcaugcacgcuug

SEQ ID NO: 26960 - RNA, 23 nt, Artificial Sequence
  Synthetic
auuugccgggcaugcacgcuugu

SEQ ID NO: 26961 - RNA, 23 nt, Artificial Sequence
  Synthetic
uuugccgggcaugcacgcuugua

SEQ ID NO: 26962 - RNA, 23 nt, Artificial Sequence
  Synthetic
uugccgggcaugcacgcuuguag

SEQ ID NO: 26963 - RNA, 23 nt, Artificial Sequence
  Synthetic
ugccgggcaugcacgcuuguaga

SEQ ID NO: 26964 - RNA, 23 nt, Artificial Sequence
  Synthetic
gccgggcaugcacgcuuguagau

SEQ ID NO: 26965 - RNA, 23 nt, Artificial Sequence
  Synthetic
ccgggcaugcacgcuuguagauu

SEQ ID NO: 26966 - RNA, 23 nt, Artificial Sequence
  Synthetic
cgggcaugcacgcuuguagauuu

SEQ ID NO: 26967 - RNA, 23 nt, Artificial Sequence
  Synthetic
gggcaugcacgcuuguagauuuc

SEQ ID NO: 26968 - RNA, 23 nt, Artificial Sequence
  Synthetic
ggcaugcacgcuuguagauuuca

SEQ ID NO: 26969 - RNA, 23 nt, Artificial Sequence
  Synthetic
gcaugcacgcuuguagauuucac

SEQ ID NO: 26970 - RNA, 23 nt, Artificial Sequence
  Synthetic
caugcacgcuuguagauuucaca

SEQ ID NO: 26971 - RNA, 23 nt, Artificial Sequence
  Synthetic
augcacgcuuguagauuucacau

SEQ ID NO: 26972 - RNA, 23 nt, Artificial Sequence
  Synthetic
ugcacgcuuguagauuucacauc

SEQ ID NO: 26973 - RNA, 23 nt, Artificial Sequence
  Synthetic
gcacgcuuguagauuucacaucc

SEQ ID NO: 26974 - RNA, 23 nt, Artificial Sequence
  Synthetic
cacgcuuguagauuucacauccc

SEQ ID NO: 26975 - RNA, 23 nt, Artificial Sequence
  Synthetic
acgcuuguagauuucacauccca

SEQ ID NO: 26976 - RNA, 23 nt, Artificial Sequence
  Synthetic
cgcuuguagauuucacaucccau

SEQ ID NO: 26977 - RNA, 23 nt, Artificial Sequence
  Synthetic
gcuuguagauuucacaucccaug

SEQ ID NO: 26978 - RNA, 23 nt, Artificial Sequence
  Synthetic
cuuguagauuucacaucccauga

SEQ ID NO: 26979 - RNA, 23 nt, Artificial Sequence
  Synthetic
uuguagauuucacaucccaugag

SEQ ID NO: 26980 - RNA, 23 nt, Artificial Sequence
  Synthetic
uguagauuucacaucccaugagu

SEQ ID NO: 26981 - RNA, 23 nt, Artificial Sequence
  Synthetic
guagauuucacaucccaugagug

SEQ ID NO: 26982 - RNA, 23 nt, Artificial Sequence
  Synthetic
uagauuucacaucccaugagugu

SEQ ID NO: 26983 - RNA, 23 nt, Artificial Sequence
  Synthetic
agauuucacaucccaugagugug

SEQ ID NO: 26984 - RNA, 23 nt, Artificial Sequence
  Synthetic
gauuucacaucccaugagugugg

SEQ ID NO: 26985 - RNA, 23 nt, Artificial Sequence
  Synthetic
auuucacaucccaugagugugga

SEQ ID NO: 26986 - RNA, 23 nt, Artificial Sequence
  Synthetic
uuucacaucccaugaguguggag

SEQ ID NO: 26987 - RNA, 23 nt, Artificial Sequence
  Synthetic
uucacaucccaugaguguggagc

SEQ ID NO: 26988 - RNA, 23 nt, Artificial Sequence
  Synthetic
ucacaucccaugaguguggagcu

SEQ ID NO: 26989 - RNA, 23 nt, Artificial Sequence
  Synthetic
cacaucccaugaguguggagcua

SEQ ID NO: 26990 - RNA, 23 nt, Artificial Sequence
  Synthetic
acaucccaugaguguggagcuac

SEQ ID NO: 26991 - RNA, 23 nt, Artificial Sequence
  Synthetic
caucccaugaguguggagcuacu

SEQ ID NO: 26992 - RNA, 23 nt, Artificial Sequence
  Synthetic
aucccaugaguguggagcuacuu

SEQ ID NO: 26993 - RNA, 23 nt, Artificial Sequence
  Synthetic
ucccaugaguguggagcuacuuu

SEQ ID NO: 26994 - RNA, 23 nt, Artificial Sequence
  Synthetic
cccaugaguguggagcuacuuuc

SEQ ID NO: 26995 - RNA, 23 nt, Artificial Sequence
  Synthetic
ccaugaguguggagcuacuuucu

SEQ ID NO: 26996 - RNA, 23 nt, Artificial Sequence
  Synthetic
caugaguguggagcuacuuucuu

SEQ ID NO: 26997 - RNA, 23 nt, Artificial Sequence
  Synthetic
augaguguggagcuacuuucuuc

SEQ ID NO: 26998 - RNA, 23 nt, Artificial Sequence
  Synthetic
ugaguguggagcuacuuucuucu

SEQ ID NO: 26999 - RNA, 23 nt, Artificial Sequence
  Synthetic
gaguguggagcuacuuucuucua

SEQ ID NO: 27000 - RNA, 23 nt, Artificial Sequence
  Synthetic
aguguggagcuacuuucuucuac

SEQ ID NO: 27001 - RNA, 23 nt, Artificial Sequence
  Synthetic
guguggagcuacuuucuucuacc

SEQ ID NO: 27002 - RNA, 23 nt, Artificial Sequence
  Synthetic
uguggagcuacuuucuucuaccu

SEQ ID NO: 27003 - RNA, 23 nt, Artificial Sequence
  Synthetic
guggagcuacuuucuucuaccuu

SEQ ID NO: 27004 - RNA, 23 nt, Artificial Sequence
  Synthetic
uggagcuacuuucuucuaccuuc

SEQ ID NO: 27005 - RNA, 23 nt, Artificial Sequence
  Synthetic
ggagcuacuuucuucuaccuucu

SEQ ID NO: 27006 - RNA, 23 nt, Artificial Sequence
  Synthetic
gagcuacuuucuucuaccuucug

SEQ ID NO: 27007 - RNA, 23 nt, Artificial Sequence
  Synthetic
agcuacuuucuucuaccuucugu

SEQ ID NO: 27008 - RNA, 23 nt, Artificial Sequence
  Synthetic
gcuacuuucuucuaccuucuguu

SEQ ID NO: 27009 - RNA, 23 nt, Artificial Sequence
  Synthetic
cuacuuucuucuaccuucuguuu

SEQ ID NO: 27010 - RNA, 23 nt, Artificial Sequence
  Synthetic
uacuuucuucuaccuucuguuug

SEQ ID NO: 27011 - RNA, 23 nt, Artificial Sequence
  Synthetic
acuuucuucuaccuucuguuugu

SEQ ID NO: 27012 - RNA, 23 nt, Artificial Sequence
  Synthetic
cuuucuucuaccuucuguuuguc

SEQ ID NO: 27013 - RNA, 23 nt, Artificial Sequence
  Synthetic
uuucuucuaccuucuguuuguca

SEQ ID NO: 27014 - RNA, 23 nt, Artificial Sequence
  Synthetic
uucuucuaccuucuguuugucag

SEQ ID NO: 27015 - RNA, 23 nt, Artificial Sequence
  Synthetic
ucuucuaccuucuguuugucagu

SEQ ID NO: 27016 - RNA, 23 nt, Artificial Sequence
  Synthetic
cuucuaccuucuguuugucaguu

SEQ ID NO: 27017 - RNA, 23 nt, Artificial Sequence
  Synthetic
uucuaccuucuguuugucaguuu

SEQ ID NO: 27018 - RNA, 23 nt, Artificial Sequence
  Synthetic
ucuaccuucuguuugucaguuuu

SEQ ID NO: 27019 - RNA, 23 nt, Artificial Sequence
  Synthetic
cuaccuucuguuugucaguuuua

SEQ ID NO: 27020 - RNA, 23 nt, Artificial Sequence
  Synthetic
uaccuucuguuugucaguuuuag

SEQ ID NO: 27021 - RNA, 23 nt, Artificial Sequence
  Synthetic
accuucuguuugucaguuuuagc

SEQ ID NO: 27022 - RNA, 23 nt, Artificial Sequence
  Synthetic
ccuucuguuugucaguuuuagcu

SEQ ID NO: 27023 - RNA, 23 nt, Artificial Sequence
  Synthetic
cuucuguuugucaguuuuagcuu

SEQ ID NO: 27024 - RNA, 23 nt, Artificial Sequence
  Synthetic
uucuguuugucaguuuuagcuuu

SEQ ID NO: 27025 - RNA, 23 nt, Artificial Sequence
  Synthetic
ucuguuugucaguuuuagcuuuu

SEQ ID NO: 27026 - RNA, 23 nt, Artificial Sequence
  Synthetic
cuguuugucaguuuuagcuuuuc

SEQ ID NO: 27027 - RNA, 23 nt, Artificial Sequence
  Synthetic
uguuugucaguuuuagcuuuucu

SEQ ID NO: 27028 - RNA, 23 nt, Artificial Sequence
  Synthetic
guuugucaguuuuagcuuuucug

SEQ ID NO: 27029 - RNA, 23 nt, Artificial Sequence
  Synthetic
uuugucaguuuuagcuuuucuga

SEQ ID NO: 27030 - RNA, 23 nt, Artificial Sequence
  Synthetic
uugucaguuuuagcuuuucugac

SEQ ID NO: 27031 - RNA, 23 nt, Artificial Sequence
  Synthetic
ugucaguuuuagcuuuucugacu

SEQ ID NO: 27032 - RNA, 23 nt, Artificial Sequence
  Synthetic
gucaguuuuagcuuuucugacua

SEQ ID NO: 27033 - RNA, 23 nt, Artificial Sequence
  Synthetic
ucaguuuuagcuuuucugacuac

SEQ ID NO: 27034 - RNA, 23 nt, Artificial Sequence
  Synthetic
caguuuuagcuuuucugacuacu

SEQ ID NO: 27035 - RNA, 23 nt, Artificial Sequence
  Synthetic
aguuuuagcuuuucugacuacuu

SEQ ID NO: 27036 - RNA, 23 nt, Artificial Sequence
  Synthetic
guuuuagcuuuucugacuacuuc

SEQ ID NO: 27037 - RNA, 23 nt, Artificial Sequence
  Synthetic
uuuuagcuuuucugacuacuucc

SEQ ID NO: 27038 - RNA, 23 nt, Artificial Sequence
  Synthetic
uuuagcuuuucugacuacuuccu

SEQ ID NO: 27039 - RNA, 23 nt, Artificial Sequence
  Synthetic
uuagcuuuucugacuacuuccuu

SEQ ID NO: 27040 - RNA, 23 nt, Artificial Sequence
  Synthetic
uagcuuuucugacuacuuccuug

SEQ ID NO: 27041 - RNA, 23 nt, Artificial Sequence
  Synthetic
agcuuuucugacuacuuccuuga

SEQ ID NO: 27042 - RNA, 23 nt, Artificial Sequence
  Synthetic
gcuuuucugacuacuuccuugau

SEQ ID NO: 27043 - RNA, 23 nt, Artificial Sequence
  Synthetic
cuuuucugacuacuuccuugaug

SEQ ID NO: 27044 - RNA, 23 nt, Artificial Sequence
  Synthetic
uuuucugacuacuuccuugaugu

SEQ ID NO: 27045 - RNA, 23 nt, Artificial Sequence
  Synthetic
uuucugacuacuuccuugauguu

SEQ ID NO: 27046 - RNA, 23 nt, Artificial Sequence
  Synthetic
uucugacuacuuccuugauguua

SEQ ID NO: 27047 - RNA, 23 nt, Artificial Sequence
  Synthetic
ucugacuacuuccuugauguuaa

SEQ ID NO: 27048 - RNA, 23 nt, Artificial Sequence
  Synthetic
cugacuacuuccuugauguuaag

SEQ ID NO: 27049 - RNA, 23 nt, Artificial Sequence
  Synthetic
ugacuacuuccuugauguuaagu

SEQ ID NO: 27050 - RNA, 23 nt, Artificial Sequence
  Synthetic
gacuacuuccuugauguuaaguu

SEQ ID NO: 27051 - RNA, 23 nt, Artificial Sequence
  Synthetic
acuacuuccuugauguuaaguug

SEQ ID NO: 27052 - RNA, 23 nt, Artificial Sequence
  Synthetic
cuacuuccuugauguuaaguugu

SEQ ID NO: 27053 - RNA, 23 nt, Artificial Sequence
  Synthetic
uacuuccuugauguuaaguuguc

SEQ ID NO: 27054 - RNA, 23 nt, Artificial Sequence
  Synthetic
acuuccuugauguuaaguuguca

SEQ ID NO: 27055 - RNA, 23 nt, Artificial Sequence
  Synthetic
cuuccuugauguuaaguugucac

SEQ ID NO: 27056 - RNA, 23 nt, Artificial Sequence
  Synthetic
uuccuugauguuaaguugucacu

SEQ ID NO: 27057 - RNA, 23 nt, Artificial Sequence
  Synthetic
uccuugauguuaaguugucacuu

SEQ ID NO: 27058 - RNA, 23 nt, Artificial Sequence
  Synthetic
ccuugauguuaaguugucacuug

SEQ ID NO: 27059 - RNA, 23 nt, Artificial Sequence
  Synthetic
cuugauguuaaguugucacuugc

SEQ ID NO: 27060 - RNA, 23 nt, Artificial Sequence
  Synthetic
uugauguuaaguugucacuugcc

SEQ ID NO: 27061 - RNA, 23 nt, Artificial Sequence
  Synthetic
ugauguuaaguugucacuugcca

SEQ ID NO: 27062 - RNA, 23 nt, Artificial Sequence
  Synthetic
gauguuaaguugucacuugccag

SEQ ID NO: 27063 - RNA, 23 nt, Artificial Sequence
  Synthetic
auguuaaguugucacuugccagg

SEQ ID NO: 27064 - RNA, 23 nt, Artificial Sequence
  Synthetic
uguuaaguugucacuugccaggu

SEQ ID NO: 27065 - RNA, 23 nt, Artificial Sequence
  Synthetic
guuaaguugucacuugccagguu

SEQ ID NO: 27066 - RNA, 23 nt, Artificial Sequence
  Synthetic
uuaaguugucacuugccagguuu

SEQ ID NO: 27067 - RNA, 23 nt, Artificial Sequence
  Synthetic
uaaguugucacuugccagguuuu

SEQ ID NO: 27068 - RNA, 23 nt, Artificial Sequence
  Synthetic
aaguugucacuugccagguuuuc

SEQ ID NO: 27069 - RNA, 23 nt, Artificial Sequence
  Synthetic
aguugucacuugccagguuuucc

SEQ ID NO: 27070 - RNA, 23 nt, Artificial Sequence
  Synthetic
guugucacuugccagguuuuccc

SEQ ID NO: 27071 - RNA, 23 nt, Artificial Sequence
  Synthetic
uugucacuugccagguuuuccca

SEQ ID NO: 27072 - RNA, 23 nt, Artificial Sequence
  Synthetic
ugucacuugccagguuuucccaa

SEQ ID NO: 27073 - RNA, 23 nt, Artificial Sequence
  Synthetic
gucacuugccagguuuucccaaa

SEQ ID NO: 27074 - RNA, 23 nt, Artificial Sequence
  Synthetic
ucacuugccagguuuucccaaaa

SEQ ID NO: 27075 - RNA, 23 nt, Artificial Sequence
  Synthetic
cacuugccagguuuucccaaaac

SEQ ID NO: 27076 - RNA, 23 nt, Artificial Sequence
  Synthetic
acuugccagguuuucccaaaacg

SEQ ID NO: 27077 - RNA, 23 nt, Artificial Sequence
  Synthetic
cuugccagguuuucccaaaacgu

SEQ ID NO: 27078 - RNA, 23 nt, Artificial Sequence
  Synthetic
uugccagguuuucccaaaacgug

SEQ ID NO: 27079 - RNA, 23 nt, Artificial Sequence
  Synthetic
ugccagguuuucccaaaacgugg

SEQ ID NO: 27080 - RNA, 23 nt, Artificial Sequence
  Synthetic
gccagguuuucccaaaacguggg

SEQ ID NO: 27081 - RNA, 23 nt, Artificial Sequence
  Synthetic
ccagguuuucccaaaacgugggu

SEQ ID NO: 27082 - RNA, 23 nt, Artificial Sequence
  Synthetic
cagguuuucccaaaacguggguu

SEQ ID NO: 27083 - RNA, 23 nt, Artificial Sequence
  Synthetic
agguuuucccaaaacguggguuu

SEQ ID NO: 27084 - RNA, 23 nt, Artificial Sequence
  Synthetic
gguuuucccaaaacguggguuuc

SEQ ID NO: 27085 - RNA, 23 nt, Artificial Sequence
  Synthetic
guuuucccaaaacguggguuucu

SEQ ID NO: 27086 - RNA, 23 nt, Artificial Sequence
  Synthetic
uuuucccaaaacguggguuucuc

SEQ ID NO: 27087 - RNA, 23 nt, Artificial Sequence
  Synthetic
uuucccaaaacguggguuucuca

SEQ ID NO: 27088 - RNA, 23 nt, Artificial Sequence
  Synthetic
uucccaaaacguggguuucucau

SEQ ID NO: 27089 - RNA, 23 nt, Artificial Sequence
  Synthetic
ucccaaaacguggguuucucauc

SEQ ID NO: 27090 - RNA, 23 nt, Artificial Sequence
  Synthetic
cccaaaacguggguuucucaucu

SEQ ID NO: 27091 - RNA, 23 nt, Artificial Sequence
  Synthetic
ccaaaacguggguuucucaucuc

SEQ ID NO: 27092 - RNA, 23 nt, Artificial Sequence
  Synthetic
caaaacguggguuucucaucucc

SEQ ID NO: 27093 - RNA, 23 nt, Artificial Sequence
  Synthetic
aaaacguggguuucucaucucca

SEQ ID NO: 27094 - RNA, 23 nt, Artificial Sequence
  Synthetic
aaacguggguuucucaucuccaa

SEQ ID NO: 27095 - RNA, 23 nt, Artificial Sequence
  Synthetic
aacguggguuucucaucuccaac

SEQ ID NO: 27096 - RNA, 23 nt, Artificial Sequence
  Synthetic
acguggguuucucaucuccaaca

SEQ ID NO: 27097 - RNA, 23 nt, Artificial Sequence
  Synthetic
cguggguuucucaucuccaacaa

SEQ ID NO: 27098 - RNA, 23 nt, Artificial Sequence
  Synthetic
guggguuucucaucuccaacaac

SEQ ID NO: 27099 - RNA, 23 nt, Artificial Sequence
  Synthetic
uggguuucucaucuccaacaacc

SEQ ID NO: 27100 - RNA, 23 nt, Artificial Sequence
  Synthetic
ggguuucucaucuccaacaaccc

SEQ ID NO: 27101 - RNA, 23 nt, Artificial Sequence
  Synthetic
gguuucucaucuccaacaacccu

SEQ ID NO: 27102 - RNA, 23 nt, Artificial Sequence
  Synthetic
guuucucaucuccaacaacccua

SEQ ID NO: 27103 - RNA, 23 nt, Artificial Sequence
  Synthetic
uuucucaucuccaacaacccuaa

SEQ ID NO: 27104 - RNA, 23 nt, Artificial Sequence
  Synthetic
uucucaucuccaacaacccuaau

SEQ ID NO: 27105 - RNA, 23 nt, Artificial Sequence
  Synthetic
ucucaucuccaacaacccuaauc

SEQ ID NO: 27106 - RNA, 23 nt, Artificial Sequence
  Synthetic
cucaucuccaacaacccuaaucu

SEQ ID NO: 27107 - RNA, 23 nt, Artificial Sequence
  Synthetic
ucaucuccaacaacccuaaucua

SEQ ID NO: 27108 - RNA, 23 nt, Artificial Sequence
  Synthetic
caucuccaacaacccuaaucuac

SEQ ID NO: 27109 - RNA, 23 nt, Artificial Sequence
  Synthetic
aucuccaacaacccuaaucuacu

SEQ ID NO: 27110 - RNA, 23 nt, Artificial Sequence
  Synthetic
ucuccaacaacccuaaucuacuu

SEQ ID NO: 27111 - RNA, 23 nt, Artificial Sequence
  Synthetic
cuccaacaacccuaaucuacuua

SEQ ID NO: 27112 - RNA, 23 nt, Artificial Sequence
  Synthetic
uccaacaacccuaaucuacuuag

SEQ ID NO: 27113 - RNA, 23 nt, Artificial Sequence
  Synthetic
ccaacaacccuaaucuacuuagc

SEQ ID NO: 27114 - RNA, 23 nt, Artificial Sequence
  Synthetic
caacaacccuaaucuacuuagcu

SEQ ID NO: 27115 - RNA, 23 nt, Artificial Sequence
  Synthetic
aacaacccuaaucuacuuagcuc

SEQ ID NO: 27116 - RNA, 23 nt, Artificial Sequence
  Synthetic
acaacccuaaucuacuuagcucu

SEQ ID NO: 27117 - RNA, 23 nt, Artificial Sequence
  Synthetic
caacccuaaucuacuuagcucuc

SEQ ID NO: 27118 - RNA, 23 nt, Artificial Sequence
  Synthetic
aacccuaaucuacuuagcucucu

SEQ ID NO: 27119 - RNA, 23 nt, Artificial Sequence
  Synthetic
acccuaaucuacuuagcucucua

SEQ ID NO: 27120 - RNA, 23 nt, Artificial Sequence
  Synthetic
cccuaaucuacuuagcucucuaa

SEQ ID NO: 27121 - RNA, 23 nt, Artificial Sequence
  Synthetic
ccuaaucuacuuagcucucuaau

SEQ ID NO: 27122 - RNA, 23 nt, Artificial Sequence
  Synthetic
cuaaucuacuuagcucucuaauu

SEQ ID NO: 27123 - RNA, 23 nt, Artificial Sequence
  Synthetic
uaaucuacuuagcucucuaauua

SEQ ID NO: 27124 - RNA, 23 nt, Artificial Sequence
  Synthetic
aaucuacuuagcucucuaauuac

SEQ ID NO: 27125 - RNA, 23 nt, Artificial Sequence
  Synthetic
aucuacuuagcucucuaauuacu

SEQ ID NO: 27126 - RNA, 23 nt, Artificial Sequence
  Synthetic
ucuacuuagcucucuaauuacua

SEQ ID NO: 27127 - RNA, 23 nt, Artificial Sequence
  Synthetic
cuacuuagcucucuaauuacuaa

SEQ ID NO: 27128 - RNA, 23 nt, Artificial Sequence
  Synthetic
uacuuagcucucuaauuacuaac

SEQ ID NO: 27129 - RNA, 23 nt, Artificial Sequence
  Synthetic
acuuagcucucuaauuacuaacu

SEQ ID NO: 27130 - RNA, 23 nt, Artificial Sequence
  Synthetic
cuuagcucucuaauuacuaacuu

SEQ ID NO: 27131 - RNA, 23 nt, Artificial Sequence
  Synthetic
uuagcucucuaauuacuaacuuc

SEQ ID NO: 27132 - RNA, 23 nt, Artificial Sequence
  Synthetic
uagcucucuaauuacuaacuucu

SEQ ID NO: 27133 - RNA, 23 nt, Artificial Sequence
  Synthetic
agcucucuaauuacuaacuucuu

SEQ ID NO: 27134 - RNA, 23 nt, Artificial Sequence
  Synthetic
gcucucuaauuacuaacuucuua

SEQ ID NO: 27135 - RNA, 23 nt, Artificial Sequence
  Synthetic
cucucuaauuacuaacuucuuac

SEQ ID NO: 27136 - RNA, 23 nt, Artificial Sequence
  Synthetic
ucucuaauuacuaacuucuuacu

SEQ ID NO: 27137 - RNA, 23 nt, Artificial Sequence
  Synthetic
cucuaauuacuaacuucuuacua

SEQ ID NO: 27138 - RNA, 23 nt, Artificial Sequence
  Synthetic
ucuaauuacuaacuucuuacuag

SEQ ID NO: 27139 - RNA, 23 nt, Artificial Sequence
  Synthetic
cuaauuacuaacuucuuacuagu

SEQ ID NO: 27140 - RNA, 23 nt, Artificial Sequence
  Synthetic
uaauuacuaacuucuuacuaguc

SEQ ID NO: 27141 - RNA, 23 nt, Artificial Sequence
  Synthetic
aauuacuaacuucuuacuagucu

SEQ ID NO: 27142 - RNA, 23 nt, Artificial Sequence
  Synthetic
auuacuaacuucuuacuagucug

SEQ ID NO: 27143 - RNA, 23 nt, Artificial Sequence
  Synthetic
uuacuaacuucuuacuagucugu

SEQ ID NO: 27144 - RNA, 23 nt, Artificial Sequence
  Synthetic
uacuaacuucuuacuagucugug

SEQ ID NO: 27145 - RNA, 23 nt, Artificial Sequence
  Synthetic
acuaacuucuuacuagucuguga

SEQ ID NO: 27146 - RNA, 23 nt, Artificial Sequence
  Synthetic
cuaacuucuuacuagucugugag

SEQ ID NO: 27147 - RNA, 23 nt, Artificial Sequence
  Synthetic
uaacuucuuacuagucugugagu

SEQ ID NO: 27148 - RNA, 23 nt, Artificial Sequence
  Synthetic
aacuucuuacuagucugugaguc

SEQ ID NO: 27149 - RNA, 23 nt, Artificial Sequence
  Synthetic
acuucuuacuagucugugaguca

SEQ ID NO: 27150 - RNA, 23 nt, Artificial Sequence
  Synthetic
cuucuuacuagucugugagucag

SEQ ID NO: 27151 - RNA, 23 nt, Artificial Sequence
  Synthetic
uucuuacuagucugugagucaga

SEQ ID NO: 27152 - RNA, 23 nt, Artificial Sequence
  Synthetic
ucuuacuagucugugagucagaa

SEQ ID NO: 27153 - RNA, 23 nt, Artificial Sequence
  Synthetic
cuuacuagucugugagucagaaa

SEQ ID NO: 27154 - RNA, 23 nt, Artificial Sequence
  Synthetic
uuacuagucugugagucagaaaa

SEQ ID NO: 27155 - RNA, 23 nt, Artificial Sequence
  Synthetic
uacuagucugugagucagaaaac

SEQ ID NO: 27156 - RNA, 23 nt, Artificial Sequence
  Synthetic
acuagucugugagucagaaaacc

SEQ ID NO: 27157 - RNA, 23 nt, Artificial Sequence
  Synthetic
cuagucugugagucagaaaacca

SEQ ID NO: 27158 - RNA, 23 nt, Artificial Sequence
  Synthetic
uagucugugagucagaaaaccac

SEQ ID NO: 27159 - RNA, 23 nt, Artificial Sequence
  Synthetic
agucugugagucagaaaaccaca

SEQ ID NO: 27160 - RNA, 23 nt, Artificial Sequence
  Synthetic
gucugugagucagaaaaccacau

SEQ ID NO: 27161 - RNA, 23 nt, Artificial Sequence
  Synthetic
ucugugagucagaaaaccacaug

SEQ ID NO: 27162 - RNA, 23 nt, Artificial Sequence
  Synthetic
cugugagucagaaaaccacauga

SEQ ID NO: 27163 - RNA, 23 nt, Artificial Sequence
  Synthetic
ugugagucagaaaaccacaugac

SEQ ID NO: 27164 - RNA, 23 nt, Artificial Sequence
  Synthetic
gugagucagaaaaccacaugaca

SEQ ID NO: 27165 - RNA, 23 nt, Artificial Sequence
  Synthetic
ugagucagaaaaccacaugacaa

SEQ ID NO: 27166 - RNA, 23 nt, Artificial Sequence
  Synthetic
gagucagaaaaccacaugacaaa

SEQ ID NO: 27167 - RNA, 23 nt, Artificial Sequence
  Synthetic
agucagaaaaccacaugacaaaa

SEQ ID NO: 27168 - RNA, 23 nt, Artificial Sequence
  Synthetic
gucagaaaaccacaugacaaaau

SEQ ID NO: 27169 - RNA, 23 nt, Artificial Sequence
  Synthetic
ucagaaaaccacaugacaaaauu

SEQ ID NO: 27170 - RNA, 23 nt, Artificial Sequence
  Synthetic
cagaaaaccacaugacaaaauug

SEQ ID NO: 27171 - RNA, 23 nt, Artificial Sequence
  Synthetic
agaaaaccacaugacaaaauuga

SEQ ID NO: 27172 - RNA, 23 nt, Artificial Sequence
  Synthetic
gaaaaccacaugacaaaauugac

SEQ ID NO: 27173 - RNA, 23 nt, Artificial Sequence
  Synthetic
aaaaccacaugacaaaauugacu

SEQ ID NO: 27174 - RNA, 23 nt, Artificial Sequence
  Synthetic
aaaccacaugacaaaauugacuu

SEQ ID NO: 27175 - RNA, 23 nt, Artificial Sequence
  Synthetic
aaccacaugacaaaauugacuua

SEQ ID NO: 27176 - RNA, 23 nt, Artificial Sequence
  Synthetic
accacaugacaaaauugacuuag

SEQ ID NO: 27177 - RNA, 23 nt, Artificial Sequence
  Synthetic
ccacaugacaaaauugacuuaga

SEQ ID NO: 27178 - RNA, 23 nt, Artificial Sequence
  Synthetic
cacaugacaaaauugacuuagaa

SEQ ID NO: 27179 - RNA, 23 nt, Artificial Sequence
  Synthetic
acaugacaaaauugacuuagaac

SEQ ID NO: 27180 - RNA, 23 nt, Artificial Sequence
  Synthetic
caugacaaaauugacuuagaacu

SEQ ID NO: 27181 - RNA, 23 nt, Artificial Sequence
  Synthetic
augacaaaauugacuuagaacug

SEQ ID NO: 27182 - RNA, 23 nt, Artificial Sequence
  Synthetic
ugacaaaauugacuuagaacugu

SEQ ID NO: 27183 - RNA, 23 nt, Artificial Sequence
  Synthetic
gacaaaauugacuuagaacuguc

SEQ ID NO: 27184 - RNA, 23 nt, Artificial Sequence
  Synthetic
acaaaauugacuuagaacuguca

SEQ ID NO: 27185 - RNA, 23 nt, Artificial Sequence
  Synthetic
caaaauugacuuagaacugucac

SEQ ID NO: 27186 - RNA, 23 nt, Artificial Sequence
  Synthetic
aaaauugacuuagaacugucaca

SEQ ID NO: 27187 - RNA, 23 nt, Artificial Sequence
  Synthetic
aaauugacuuagaacugucacac

SEQ ID NO: 27188 - RNA, 23 nt, Artificial Sequence
  Synthetic
aauugacuuagaacugucacacg

SEQ ID NO: 27189 - RNA, 23 nt, Artificial Sequence
  Synthetic
auugacuuagaacugucacacga

SEQ ID NO: 27190 - RNA, 23 nt, Artificial Sequence
  Synthetic
uugacuuagaacugucacacgau

SEQ ID NO: 27191 - RNA, 23 nt, Artificial Sequence
  Synthetic
ugacuuagaacugucacacgaua

SEQ ID NO: 27192 - RNA, 23 nt, Artificial Sequence
  Synthetic
gacuuagaacugucacacgauaa

SEQ ID NO: 27193 - RNA, 23 nt, Artificial Sequence
  Synthetic
acuuagaacugucacacgauaag

SEQ ID NO: 27194 - RNA, 23 nt, Artificial Sequence
  Synthetic
cuuagaacugucacacgauaagg

SEQ ID NO: 27195 - RNA, 23 nt, Artificial Sequence
  Synthetic
uuagaacugucacacgauaaggg

SEQ ID NO: 27196 - RNA, 23 nt, Artificial Sequence
  Synthetic
uagaacugucacacgauaaggga

SEQ ID NO: 27197 - RNA, 23 nt, Artificial Sequence
  Synthetic
agaacugucacacgauaagggaa

SEQ ID NO: 27198 - RNA, 23 nt, Artificial Sequence
  Synthetic
gaacugucacacgauaagggaac

SEQ ID NO: 27199 - RNA, 23 nt, Artificial Sequence
  Synthetic
aacugucacacgauaagggaacc

SEQ ID NO: 27200 - RNA, 23 nt, Artificial Sequence
  Synthetic
acugucacacgauaagggaacca

SEQ ID NO: 27201 - RNA, 23 nt, Artificial Sequence
  Synthetic
cugucacacgauaagggaaccag

SEQ ID NO: 27202 - RNA, 23 nt, Artificial Sequence
  Synthetic
ugucacacgauaagggaaccagg

SEQ ID NO: 27203 - RNA, 23 nt, Artificial Sequence
  Synthetic
gucacacgauaagggaaccagga

SEQ ID NO: 27204 - RNA, 23 nt, Artificial Sequence
  Synthetic
ucacacgauaagggaaccaggaa

SEQ ID NO: 27205 - RNA, 23 nt, Artificial Sequence
  Synthetic
cacacgauaagggaaccaggaac

SEQ ID NO: 27206 - RNA, 23 nt, Artificial Sequence
  Synthetic
acacgauaagggaaccaggaacu

SEQ ID NO: 27207 - RNA, 23 nt, Artificial Sequence
  Synthetic
cacgauaagggaaccaggaacuc

SEQ ID NO: 27208 - RNA, 23 nt, Artificial Sequence
  Synthetic
acgauaagggaaccaggaacucu

SEQ ID NO: 27209 - RNA, 23 nt, Artificial Sequence
  Synthetic
cgauaagggaaccaggaacucuc

SEQ ID NO: 27210 - RNA, 23 nt, Artificial Sequence
  Synthetic
gauaagggaaccaggaacucucc

SEQ ID NO: 27211 - RNA, 23 nt, Artificial Sequence
  Synthetic
auaagggaaccaggaacucucca

SEQ ID NO: 27212 - RNA, 23 nt, Artificial Sequence
  Synthetic
uaagggaaccaggaacucuccaa

SEQ ID NO: 27213 - RNA, 23 nt, Artificial Sequence
  Synthetic
aagggaaccaggaacucuccaaa

SEQ ID NO: 27214 - RNA, 23 nt, Artificial Sequence
  Synthetic
agggaaccaggaacucuccaaau

SEQ ID NO: 27215 - RNA, 23 nt, Artificial Sequence
  Synthetic
gggaaccaggaacucuccaaaua

SEQ ID NO: 27216 - RNA, 23 nt, Artificial Sequence
  Synthetic
ggaaccaggaacucuccaaauag

SEQ ID NO: 27217 - RNA, 23 nt, Artificial Sequence
  Synthetic
gaaccaggaacucuccaaauaga

SEQ ID NO: 27218 - RNA, 23 nt, Artificial Sequence
  Synthetic
aaccaggaacucuccaaauagag

SEQ ID NO: 27219 - RNA, 23 nt, Artificial Sequence
  Synthetic
accaggaacucuccaaauagagu

SEQ ID NO: 27220 - RNA, 23 nt, Artificial Sequence
  Synthetic
ccaggaacucuccaaauagaguu

SEQ ID NO: 27221 - RNA, 23 nt, Artificial Sequence
  Synthetic
caggaacucuccaaauagaguuc

SEQ ID NO: 27222 - RNA, 23 nt, Artificial Sequence
  Synthetic
aggaacucuccaaauagaguucc

SEQ ID NO: 27223 - RNA, 23 nt, Artificial Sequence
  Synthetic
ggaacucuccaaauagaguuccu

SEQ ID NO: 27224 - RNA, 23 nt, Artificial Sequence
  Synthetic
gaacucuccaaauagaguuccua

SEQ ID NO: 27225 - RNA, 23 nt, Artificial Sequence
  Synthetic
aacucuccaaauagaguuccuaa

SEQ ID NO: 27226 - RNA, 23 nt, Artificial Sequence
  Synthetic
acucuccaaauagaguuccuaac

SEQ ID NO: 27227 - RNA, 23 nt, Artificial Sequence
  Synthetic
cucuccaaauagaguuccuaacu

SEQ ID NO: 27228 - RNA, 23 nt, Artificial Sequence
  Synthetic
ucuccaaauagaguuccuaacuc

SEQ ID NO: 27229 - RNA, 23 nt, Artificial Sequence
  Synthetic
cuccaaauagaguuccuaacucu

SEQ ID NO: 27230 - RNA, 23 nt, Artificial Sequence
  Synthetic
uccaaauagaguuccuaacucuu

SEQ ID NO: 27231 - RNA, 23 nt, Artificial Sequence
  Synthetic
ccaaauagaguuccuaacucuuu

SEQ ID NO: 27232 - RNA, 23 nt, Artificial Sequence
  Synthetic
caaauagaguuccuaacucuuuc

SEQ ID NO: 27233 - RNA, 23 nt, Artificial Sequence
  Synthetic
aaauagaguuccuaacucuuuca

SEQ ID NO: 27234 - RNA, 23 nt, Artificial Sequence
  Synthetic
aauagaguuccuaacucuuucag

SEQ ID NO: 27235 - RNA, 23 nt, Artificial Sequence
  Synthetic
auagaguuccuaacucuuucagu

SEQ ID NO: 27236 - RNA, 23 nt, Artificial Sequence
  Synthetic
uagaguuccuaacucuuucaguu

SEQ ID NO: 27237 - RNA, 23 nt, Artificial Sequence
  Synthetic
agaguuccuaacucuuucaguuc

SEQ ID NO: 27238 - RNA, 23 nt, Artificial Sequence
  Synthetic
gaguuccuaacucuuucaguucu

SEQ ID NO: 27239 - RNA, 23 nt, Artificial Sequence
  Synthetic
aguuccuaacucuuucaguucuc

SEQ ID NO: 27240 - RNA, 23 nt, Artificial Sequence
  Synthetic
guuccuaacucuuucaguucuca

SEQ ID NO: 27241 - RNA, 23 nt, Artificial Sequence
  Synthetic
uuccuaacucuuucaguucucag

SEQ ID NO: 27242 - RNA, 23 nt, Artificial Sequence
  Synthetic
uccuaacucuuucaguucucaga

SEQ ID NO: 27243 - RNA, 23 nt, Artificial Sequence
  Synthetic
ccuaacucuuucaguucucagaa

SEQ ID NO: 27244 - RNA, 23 nt, Artificial Sequence
  Synthetic
cuaacucuuucaguucucagaau

SEQ ID NO: 27245 - RNA, 23 nt, Artificial Sequence
  Synthetic
uaacucuuucaguucucagaauu

SEQ ID NO: 27246 - RNA, 23 nt, Artificial Sequence
  Synthetic
aacucuuucaguucucagaauua

SEQ ID NO: 27247 - RNA, 23 nt, Artificial Sequence
  Synthetic
acucuuucaguucucagaauuag

SEQ ID NO: 27248 - RNA, 23 nt, Artificial Sequence
  Synthetic
cucuuucaguucucagaauuagu

SEQ ID NO: 27249 - RNA, 23 nt, Artificial Sequence
  Synthetic
ucuuucaguucucagaauuagug

SEQ ID NO: 27250 - RNA, 23 nt, Artificial Sequence
  Synthetic
cuuucaguucucagaauuagugg

SEQ ID NO: 27251 - RNA, 23 nt, Artificial Sequence
  Synthetic
uuucaguucucagaauuagugga

SEQ ID NO: 27252 - RNA, 23 nt, Artificial Sequence
  Synthetic
uucaguucucagaauuaguggaa

SEQ ID NO: 27253 - RNA, 23 nt, Artificial Sequence
  Synthetic
ucaguucucagaauuaguggaaa

SEQ ID NO: 27254 - RNA, 23 nt, Artificial Sequence
  Synthetic
caguucucagaauuaguggaaag

SEQ ID NO: 27255 - RNA, 23 nt, Artificial Sequence
  Synthetic
aguucucagaauuaguggaaaga

SEQ ID NO: 27256 - RNA, 23 nt, Artificial Sequence
  Synthetic
guucucagaauuaguggaaagau

SEQ ID NO: 27257 - RNA, 23 nt, Artificial Sequence
  Synthetic
uucucagaauuaguggaaagauc

SEQ ID NO: 27258 - RNA, 23 nt, Artificial Sequence
  Synthetic
ucucagaauuaguggaaagaucc

SEQ ID NO: 27259 - RNA, 23 nt, Artificial Sequence
  Synthetic
cucagaauuaguggaaagauccu

SEQ ID NO: 27260 - RNA, 23 nt, Artificial Sequence
  Synthetic
ucagaauuaguggaaagauccug

SEQ ID NO: 27261 - RNA, 23 nt, Artificial Sequence
  Synthetic
cagaauuaguggaaagauccugc

SEQ ID NO: 27262 - RNA, 23 nt, Artificial Sequence
  Synthetic
agaauuaguggaaagauccugca

SEQ ID NO: 27263 - RNA, 23 nt, Artificial Sequence
  Synthetic
gaauuaguggaaagauccugcag

SEQ ID NO: 27264 - RNA, 23 nt, Artificial Sequence
  Synthetic
aauuaguggaaagauccugcagc

SEQ ID NO: 27265 - RNA, 23 nt, Artificial Sequence
  Synthetic
auuaguggaaagauccugcagcc

SEQ ID NO: 27266 - RNA, 23 nt, Artificial Sequence
  Synthetic
uuaguggaaagauccugcagcca

SEQ ID NO: 27267 - RNA, 23 nt, Artificial Sequence
  Synthetic
uaguggaaagauccugcagccau

SEQ ID NO: 27268 - RNA, 23 nt, Artificial Sequence
  Synthetic
aguggaaagauccugcagccauu

SEQ ID NO: 27269 - RNA, 23 nt, Artificial Sequence
  Synthetic
guggaaagauccugcagccauuu

SEQ ID NO: 27270 - RNA, 23 nt, Artificial Sequence
  Synthetic
uggaaagauccugcagccauuuc

SEQ ID NO: 27271 - RNA, 23 nt, Artificial Sequence
  Synthetic
ggaaagauccugcagccauuucc

SEQ ID NO: 27272 - RNA, 23 nt, Artificial Sequence
  Synthetic
gaaagauccugcagccauuucca

SEQ ID NO: 27273 - RNA, 23 nt, Artificial Sequence
  Synthetic
aaagauccugcagccauuuccag

SEQ ID NO: 27274 - RNA, 23 nt, Artificial Sequence
  Synthetic
aagauccugcagccauuuccagu

SEQ ID NO: 27275 - RNA, 23 nt, Artificial Sequence
  Synthetic
agauccugcagccauuuccagug

SEQ ID NO: 27276 - RNA, 23 nt, Artificial Sequence
  Synthetic
gauccugcagccauuuccagugc

SEQ ID NO: 27277 - RNA, 23 nt, Artificial Sequence
  Synthetic
auccugcagccauuuccagugca

SEQ ID NO: 27278 - RNA, 23 nt, Artificial Sequence
  Synthetic
uccugcagccauuuccagugcaa

SEQ ID NO: 27279 - RNA, 23 nt, Artificial Sequence
  Synthetic
ccugcagccauuuccagugcaac

SEQ ID NO: 27280 - RNA, 23 nt, Artificial Sequence
  Synthetic
cugcagccauuuccagugcaaca

SEQ ID NO: 27281 - RNA, 23 nt, Artificial Sequence
  Synthetic
ugcagccauuuccagugcaacau

SEQ ID NO: 27282 - RNA, 23 nt, Artificial Sequence
  Synthetic
gcagccauuuccagugcaacauc

SEQ ID NO: 27283 - RNA, 23 nt, Artificial Sequence
  Synthetic
cagccauuuccagugcaacaucc

SEQ ID NO: 27284 - RNA, 23 nt, Artificial Sequence
  Synthetic
agccauuuccagugcaacauccu

SEQ ID NO: 27285 - RNA, 23 nt, Artificial Sequence
  Synthetic
gccauuuccagugcaacauccua

SEQ ID NO: 27286 - RNA, 23 nt, Artificial Sequence
  Synthetic
ccauuuccagugcaacauccuag

SEQ ID NO: 27287 - RNA, 23 nt, Artificial Sequence
  Synthetic
cauuuccagugcaacauccuaga

SEQ ID NO: 27288 - RNA, 23 nt, Artificial Sequence
  Synthetic
auuuccagugcaacauccuagag

SEQ ID NO: 27289 - RNA, 23 nt, Artificial Sequence
  Synthetic
uuuccagugcaacauccuagaga

SEQ ID NO: 27290 - RNA, 23 nt, Artificial Sequence
  Synthetic
uuccagugcaacauccuagagau

SEQ ID NO: 27291 - RNA, 23 nt, Artificial Sequence
  Synthetic
uccagugcaacauccuagagauc

SEQ ID NO: 27292 - RNA, 23 nt, Artificial Sequence
  Synthetic
ccagugcaacauccuagagaucu

SEQ ID NO: 27293 - RNA, 23 nt, Artificial Sequence
  Synthetic
cagugcaacauccuagagaucug

SEQ ID NO: 27294 - RNA, 23 nt, Artificial Sequence
  Synthetic
agugcaacauccuagagaucuga

SEQ ID NO: 27295 - RNA, 23 nt, Artificial Sequence
  Synthetic
gugcaacauccuagagaucugag

SEQ ID NO: 27296 - RNA, 23 nt, Artificial Sequence
  Synthetic
ugcaacauccuagagaucugagg

SEQ ID NO: 27297 - RNA, 23 nt, Artificial Sequence
  Synthetic
gcaacauccuagagaucugaggu

SEQ ID NO: 27298 - RNA, 23 nt, Artificial Sequence
  Synthetic
caacauccuagagaucugagguu

SEQ ID NO: 27299 - RNA, 23 nt, Artificial Sequence
  Synthetic
aacauccuagagaucugagguuc

SEQ ID NO: 27300 - RNA, 23 nt, Artificial Sequence
  Synthetic
acauccuagagaucugagguucc

SEQ ID NO: 27301 - RNA, 23 nt, Artificial Sequence
  Synthetic
cauccuagagaucugagguuccc

SEQ ID NO: 27302 - RNA, 23 nt, Artificial Sequence
  Synthetic
auccuagagaucugagguucccu

SEQ ID NO: 27303 - RNA, 23 nt, Artificial Sequence
  Synthetic
uccuagagaucugagguucccug

SEQ ID NO: 27304 - RNA, 23 nt, Artificial Sequence
  Synthetic
ccuagagaucugagguucccugg

SEQ ID NO: 27305 - RNA, 23 nt, Artificial Sequence
  Synthetic
cuagagaucugagguucccugga

SEQ ID NO: 27306 - RNA, 23 nt, Artificial Sequence
  Synthetic
uagagaucugagguucccuggag

SEQ ID NO: 27307 - RNA, 23 nt, Artificial Sequence
  Synthetic
agagaucugagguucccuggaga

SEQ ID NO: 27308 - RNA, 23 nt, Artificial Sequence
  Synthetic
gagaucugagguucccuggagac

SEQ ID NO: 27309 - RNA, 23 nt, Artificial Sequence
  Synthetic
agaucugagguucccuggagacc

SEQ ID NO: 27310 - RNA, 23 nt, Artificial Sequence
  Synthetic
gaucugagguucccuggagacca

SEQ ID NO: 27311 - RNA, 23 nt, Artificial Sequence
  Synthetic
aucugagguucccuggagaccaa

SEQ ID NO: 27312 - RNA, 23 nt, Artificial Sequence
  Synthetic
ucugagguucccuggagaccaac

SEQ ID NO: 27313 - RNA, 23 nt, Artificial Sequence
  Synthetic
cugagguucccuggagaccaacu

SEQ ID NO: 27314 - RNA, 23 nt, Artificial Sequence
  Synthetic
ugagguucccuggagaccaacuc

SEQ ID NO: 27315 - RNA, 23 nt, Artificial Sequence
  Synthetic
gagguucccuggagaccaacucu

SEQ ID NO: 27316 - RNA, 23 nt, Artificial Sequence
  Synthetic
agguucccuggagaccaacucuc

SEQ ID NO: 27317 - RNA, 23 nt, Artificial Sequence
  Synthetic
gguucccuggagaccaacucuca

SEQ ID NO: 27318 - RNA, 23 nt, Artificial Sequence
  Synthetic
guucccuggagaccaacucucag

SEQ ID NO: 27319 - RNA, 23 nt, Artificial Sequence
  Synthetic
uucccuggagaccaacucucaga

SEQ ID NO: 27320 - RNA, 23 nt, Artificial Sequence
  Synthetic
ucccuggagaccaacucucagau

SEQ ID NO: 27321 - RNA, 23 nt, Artificial Sequence
  Synthetic
cccuggagaccaacucucagaug

SEQ ID NO: 27322 - RNA, 23 nt, Artificial Sequence
  Synthetic
ccuggagaccaacucucagauga

SEQ ID NO: 27323 - RNA, 23 nt, Artificial Sequence
  Synthetic
cuggagaccaacucucagaugau

SEQ ID NO: 27324 - RNA, 23 nt, Artificial Sequence
  Synthetic
uggagaccaacucucagaugauc

SEQ ID NO: 27325 - RNA, 23 nt, Artificial Sequence
  Synthetic
ggagaccaacucucagaugaucu

SEQ ID NO: 27326 - RNA, 23 nt, Artificial Sequence
  Synthetic
gagaccaacucucagaugaucuu

SEQ ID NO: 27327 - RNA, 23 nt, Artificial Sequence
  Synthetic
agaccaacucucagaugaucuug

SEQ ID NO: 27328 - RNA, 23 nt, Artificial Sequence
  Synthetic
gaccaacucucagaugaucuuga

SEQ ID NO: 27329 - RNA, 23 nt, Artificial Sequence
  Synthetic
accaacucucagaugaucuugac

SEQ ID NO: 27330 - RNA, 23 nt, Artificial Sequence
  Synthetic
ccaacucucagaugaucuugacu

SEQ ID NO: 27331 - RNA, 23 nt, Artificial Sequence
  Synthetic
caacucucagaugaucuugacug

SEQ ID NO: 27332 - RNA, 23 nt, Artificial Sequence
  Synthetic
aacucucagaugaucuugacugg

SEQ ID NO: 27333 - RNA, 23 nt, Artificial Sequence
  Synthetic
acucucagaugaucuugacuggg

SEQ ID NO: 27334 - RNA, 23 nt, Artificial Sequence
  Synthetic
cucucagaugaucuugacuggga

SEQ ID NO: 27335 - RNA, 23 nt, Artificial Sequence
  Synthetic
ucucagaugaucuugacugggau

SEQ ID NO: 27336 - RNA, 23 nt, Artificial Sequence
  Synthetic
cucagaugaucuugacugggauu

SEQ ID NO: 27337 - RNA, 23 nt, Artificial Sequence
  Synthetic
ucagaugaucuugacugggauua

SEQ ID NO: 27338 - RNA, 23 nt, Artificial Sequence
  Synthetic
cagaugaucuugacugggauuaa

SEQ ID NO: 27339 - RNA, 23 nt, Artificial Sequence
  Synthetic
agaugaucuugacugggauuaac

SEQ ID NO: 27340 - RNA, 23 nt, Artificial Sequence
  Synthetic
gaugaucuugacugggauuaaca

SEQ ID NO: 27341 - RNA, 23 nt, Artificial Sequence
  Synthetic
augaucuugacugggauuaacaa

SEQ ID NO: 27342 - RNA, 23 nt, Artificial Sequence
  Synthetic
ugaucuugacugggauuaacaac

SEQ ID NO: 27343 - RNA, 23 nt, Artificial Sequence
  Synthetic
gaucuugacugggauuaacaacg

SEQ ID NO: 27344 - RNA, 23 nt, Artificial Sequence
  Synthetic
aucuugacugggauuaacaacgg

SEQ ID NO: 27345 - RNA, 23 nt, Artificial Sequence
  Synthetic
ucuugacugggauuaacaacgga

SEQ ID NO: 27346 - RNA, 23 nt, Artificial Sequence
  Synthetic
cuugacugggauuaacaacggag

SEQ ID NO: 27347 - RNA, 23 nt, Artificial Sequence
  Synthetic
uugacugggauuaacaacggagg

SEQ ID NO: 27348 - RNA, 23 nt, Artificial Sequence
  Synthetic
ugacugggauuaacaacggagga

SEQ ID NO: 27349 - RNA, 23 nt, Artificial Sequence
  Synthetic
gacugggauuaacaacggaggac

SEQ ID NO: 27350 - RNA, 23 nt, Artificial Sequence
  Synthetic
acugggauuaacaacggaggaca

SEQ ID NO: 27351 - RNA, 23 nt, Artificial Sequence
  Synthetic
cugggauuaacaacggaggacag

SEQ ID NO: 27352 - RNA, 23 nt, Artificial Sequence
  Synthetic
ugggauuaacaacggaggacagg

SEQ ID NO: 27353 - RNA, 23 nt, Artificial Sequence
  Synthetic
gggauuaacaacggaggacagga

SEQ ID NO: 27354 - RNA, 23 nt, Artificial Sequence
  Synthetic
ggauuaacaacggaggacaggac

SEQ ID NO: 27355 - RNA, 23 nt, Artificial Sequence
  Synthetic
gauuaacaacggaggacaggaca

SEQ ID NO: 27356 - RNA, 23 nt, Artificial Sequence
  Synthetic
auuaacaacggaggacaggacac

SEQ ID NO: 27357 - RNA, 23 nt, Artificial Sequence
  Synthetic
uuaacaacggaggacaggacacu

SEQ ID NO: 27358 - RNA, 23 nt, Artificial Sequence
  Synthetic
uaacaacggaggacaggacacuc

SEQ ID NO: 27359 - RNA, 23 nt, Artificial Sequence
  Synthetic
aacaacggaggacaggacacucu

SEQ ID NO: 27360 - RNA, 23 nt, Artificial Sequence
  Synthetic
acaacggaggacaggacacucuc

SEQ ID NO: 27361 - RNA, 23 nt, Artificial Sequence
  Synthetic
caacggaggacaggacacucuca

SEQ ID NO: 27362 - RNA, 23 nt, Artificial Sequence
  Synthetic
aacggaggacaggacacucucag

SEQ ID NO: 27363 - RNA, 23 nt, Artificial Sequence
  Synthetic
acggaggacaggacacucucagg

SEQ ID NO: 27364 - RNA, 23 nt, Artificial Sequence
  Synthetic
cggaggacaggacacucucagga

SEQ ID NO: 27365 - RNA, 23 nt, Artificial Sequence
  Synthetic
ggaggacaggacacucucaggac

SEQ ID NO: 27366 - RNA, 23 nt, Artificial Sequence
  Synthetic
gaggacaggacacucucaggacu

SEQ ID NO: 27367 - RNA, 23 nt, Artificial Sequence
  Synthetic
aggacaggacacucucaggacuu

SEQ ID NO: 27368 - RNA, 23 nt, Artificial Sequence
  Synthetic
ggacaggacacucucaggacuua

SEQ ID NO: 27369 - RNA, 23 nt, Artificial Sequence
  Synthetic
gacaggacacucucaggacuuac

SEQ ID NO: 27370 - RNA, 23 nt, Artificial Sequence
  Synthetic
acaggacacucucaggacuuaca

SEQ ID NO: 27371 - RNA, 23 nt, Artificial Sequence
  Synthetic
caggacacucucaggacuuacaa

SEQ ID NO: 27372 - RNA, 23 nt, Artificial Sequence
  Synthetic
aggacacucucaggacuuacaaa

SEQ ID NO: 27373 - RNA, 23 nt, Artificial Sequence
  Synthetic
ggacacucucaggacuuacaaau

SEQ ID NO: 27374 - RNA, 23 nt, Artificial Sequence
  Synthetic
gacacucucaggacuuacaaauu

SEQ ID NO: 27375 - RNA, 23 nt, Artificial Sequence
  Synthetic
acacucucaggacuuacaaauua

SEQ ID NO: 27376 - RNA, 23 nt, Artificial Sequence
  Synthetic
cacucucaggacuuacaaauuac

SEQ ID NO: 27377 - RNA, 23 nt, Artificial Sequence
  Synthetic
acucucaggacuuacaaauuaca

SEQ ID NO: 27378 - RNA, 23 nt, Artificial Sequence
  Synthetic
cucucaggacuuacaaauuacaa

SEQ ID NO: 27379 - RNA, 23 nt, Artificial Sequence
  Synthetic
ucucaggacuuacaaauuacaac

SEQ ID NO: 27380 - RNA, 23 nt, Artificial Sequence
  Synthetic
cucaggacuuacaaauuacaacu

SEQ ID NO: 27381 - RNA, 23 nt, Artificial Sequence
  Synthetic
ucaggacuuacaaauuacaacug

SEQ ID NO: 27382 - RNA, 23 nt, Artificial Sequence
  Synthetic
caggacuuacaaauuacaacugc

SEQ ID NO: 27383 - RNA, 23 nt, Artificial Sequence
  Synthetic
aggacuuacaaauuacaacugcu

SEQ ID NO: 27384 - RNA, 23 nt, Artificial Sequence
  Synthetic
ggacuuacaaauuacaacugcua

SEQ ID NO: 27385 - RNA, 23 nt, Artificial Sequence
  Synthetic
gacuuacaaauuacaacugcuau

SEQ ID NO: 27386 - RNA, 23 nt, Artificial Sequence
  Synthetic
acuuacaaauuacaacugcuauu

SEQ ID NO: 27387 - RNA, 23 nt, Artificial Sequence
  Synthetic
cuuacaaauuacaacugcuauua

SEQ ID NO: 27388 - RNA, 23 nt, Artificial Sequence
  Synthetic
uuacaaauuacaacugcuauuac

SEQ ID NO: 27389 - RNA, 23 nt, Artificial Sequence
  Synthetic
uacaaauuacaacugcuauuaca

SEQ ID NO: 27390 - RNA, 23 nt, Artificial Sequence
  Synthetic
acaaauuacaacugcuauuacag

SEQ ID NO: 27391 - RNA, 23 nt, Artificial Sequence
  Synthetic
caaauuacaacugcuauuacagc

SEQ ID NO: 27392 - RNA, 23 nt, Artificial Sequence
  Synthetic
aaauuacaacugcuauuacagcu

SEQ ID NO: 27393 - RNA, 23 nt, Artificial Sequence
  Synthetic
aauuacaacugcuauuacagcuc

SEQ ID NO: 27394 - RNA, 23 nt, Artificial Sequence
  Synthetic
auuacaacugcuauuacagcuca

SEQ ID NO: 27395 - RNA, 23 nt, Artificial Sequence
  Synthetic
uuacaacugcuauuacagcucag

SEQ ID NO: 27396 - RNA, 23 nt, Artificial Sequence
  Synthetic
uacaacugcuauuacagcucagc

SEQ ID NO: 27397 - RNA, 23 nt, Artificial Sequence
  Synthetic
acaacugcuauuacagcucagca

SEQ ID NO: 27398 - RNA, 23 nt, Artificial Sequence
  Synthetic
caacugcuauuacagcucagcau

SEQ ID NO: 27399 - RNA, 23 nt, Artificial Sequence
  Synthetic
aacugcuauuacagcucagcauu

SEQ ID NO: 27400 - RNA, 23 nt, Artificial Sequence
  Synthetic
acugcuauuacagcucagcauuu

SEQ ID NO: 27401 - RNA, 23 nt, Artificial Sequence
  Synthetic
cugcuauuacagcucagcauuuc

SEQ ID NO: 27402 - RNA, 23 nt, Artificial Sequence
  Synthetic
ugcuauuacagcucagcauuuca

SEQ ID NO: 27403 - RNA, 23 nt, Artificial Sequence
  Synthetic
gcuauuacagcucagcauuucaa

SEQ ID NO: 27404 - RNA, 23 nt, Artificial Sequence
  Synthetic
cuauuacagcucagcauuucaaa

SEQ ID NO: 27405 - RNA, 23 nt, Artificial Sequence
  Synthetic
uauuacagcucagcauuucaaau

SEQ ID NO: 27406 - RNA, 23 nt, Artificial Sequence
  Synthetic
auuacagcucagcauuucaaauu

SEQ ID NO: 27407 - RNA, 23 nt, Artificial Sequence
  Synthetic
uuacagcucagcauuucaaauuc

SEQ ID NO: 27408 - RNA, 23 nt, Artificial Sequence
  Synthetic
uacagcucagcauuucaaauuca

SEQ ID NO: 27409 - RNA, 23 nt, Artificial Sequence
  Synthetic
acagcucagcauuucaaauucaa

SEQ ID NO: 27410 - RNA, 23 nt, Artificial Sequence
  Synthetic
cagcucagcauuucaaauucaag

SEQ ID NO: 27411 - RNA, 23 nt, Artificial Sequence
  Synthetic
agcucagcauuucaaauucaaga

SEQ ID NO: 27412 - RNA, 23 nt, Artificial Sequence
  Synthetic
gcucagcauuucaaauucaagau

SEQ ID NO: 27413 - RNA, 23 nt, Artificial Sequence
  Synthetic
cucagcauuucaaauucaagaua

SEQ ID NO: 27414 - RNA, 23 nt, Artificial Sequence
  Synthetic
ucagcauuucaaauucaagauaa

SEQ ID NO: 27415 - RNA, 23 nt, Artificial Sequence
  Synthetic
cagcauuucaaauucaagauaau

SEQ ID NO: 27416 - RNA, 23 nt, Artificial Sequence
  Synthetic
agcauuucaaauucaagauaauu

SEQ ID NO: 27417 - RNA, 23 nt, Artificial Sequence
  Synthetic
gcauuucaaauucaagauaauuu

SEQ ID NO: 27418 - RNA, 23 nt, Artificial Sequence
  Synthetic
cauuucaaauucaagauaauuuc

SEQ ID NO: 27419 - RNA, 23 nt, Artificial Sequence
  Synthetic
auuucaaauucaagauaauuucu

SEQ ID NO: 27420 - RNA, 23 nt, Artificial Sequence
  Synthetic
uuucaaauucaagauaauuucuu

SEQ ID NO: 27421 - RNA, 23 nt, Artificial Sequence
  Synthetic
uucaaauucaagauaauuucuua

SEQ ID NO: 27422 - RNA, 23 nt, Artificial Sequence
  Synthetic
ucaaauucaagauaauuucuuau

SEQ ID NO: 27423 - RNA, 23 nt, Artificial Sequence
  Synthetic
caaauucaagauaauuucuuauu

SEQ ID NO: 27424 - RNA, 23 nt, Artificial Sequence
  Synthetic
aaauucaagauaauuucuuauuc

SEQ ID NO: 27425 - RNA, 23 nt, Artificial Sequence
  Synthetic
aauucaagauaauuucuuauuca

SEQ ID NO: 27426 - RNA, 23 nt, Artificial Sequence
  Synthetic
auucaagauaauuucuuauucaa

SEQ ID NO: 27427 - RNA, 23 nt, Artificial Sequence
  Synthetic
uucaagauaauuucuuauucaaa

SEQ ID NO: 27428 - RNA, 23 nt, Artificial Sequence
  Synthetic
ucaagauaauuucuuauucaaau

SEQ ID NO: 27429 - RNA, 23 nt, Artificial Sequence
  Synthetic
caagauaauuucuuauucaaaug

SEQ ID NO: 27430 - RNA, 23 nt, Artificial Sequence
  Synthetic
aagauaauuucuuauucaaaugu

SEQ ID NO: 27431 - RNA, 23 nt, Artificial Sequence
  Synthetic
agauaauuucuuauucaaaugug

SEQ ID NO: 27432 - RNA, 23 nt, Artificial Sequence
  Synthetic
gauaauuucuuauucaaaugugg

SEQ ID NO: 27433 - RNA, 23 nt, Artificial Sequence
  Synthetic
auaauuucuuauucaaaugugga

SEQ ID NO: 27434 - RNA, 23 nt, Artificial Sequence
  Synthetic
uaauuucuuauucaaauguggac

SEQ ID NO: 27435 - RNA, 23 nt, Artificial Sequence
  Synthetic
aauuucuuauucaaauguggacc

SEQ ID NO: 27436 - RNA, 23 nt, Artificial Sequence
  Synthetic
auuucuuauucaaauguggacca

SEQ ID NO: 27437 - RNA, 23 nt, Artificial Sequence
  Synthetic
uuucuuauucaaauguggaccaa

SEQ ID NO: 27438 - RNA, 23 nt, Artificial Sequence
  Synthetic
uucuuauucaaauguggaccaac

SEQ ID NO: 27439 - RNA, 23 nt, Artificial Sequence
  Synthetic
ucuuauucaaauguggaccaaca

SEQ ID NO: 27440 - RNA, 23 nt, Artificial Sequence
  Synthetic
cuuauucaaauguggaccaacag

SEQ ID NO: 27441 - RNA, 23 nt, Artificial Sequence
  Synthetic
uuauucaaauguggaccaacaga

SEQ ID NO: 27442 - RNA, 23 nt, Artificial Sequence
  Synthetic
uauucaaauguggaccaacagau

SEQ ID NO: 27443 - RNA, 23 nt, Artificial Sequence
  Synthetic
auucaaauguggaccaacagaua

SEQ ID NO: 27444 - RNA, 23 nt, Artificial Sequence
  Synthetic
uucaaauguggaccaacagauaa

SEQ ID NO: 27445 - RNA, 23 nt, Artificial Sequence
  Synthetic
ucaaauguggaccaacagauaac

SEQ ID NO: 27446 - RNA, 23 nt, Artificial Sequence
  Synthetic
caaauguggaccaacagauaacu

SEQ ID NO: 27447 - RNA, 23 nt, Artificial Sequence
  Synthetic
aaauguggaccaacagauaacug

SEQ ID NO: 27448 - RNA, 23 nt, Artificial Sequence
  Synthetic
aauguggaccaacagauaacuga

SEQ ID NO: 27449 - RNA, 23 nt, Artificial Sequence
  Synthetic
auguggaccaacagauaacugaa

SEQ ID NO: 27450 - RNA, 23 nt, Artificial Sequence
  Synthetic
uguggaccaacagauaacugaaa

SEQ ID NO: 27451 - RNA, 23 nt, Artificial Sequence
  Synthetic
guggaccaacagauaacugaaaa

SEQ ID NO: 27452 - RNA, 23 nt, Artificial Sequence
  Synthetic
uggaccaacagauaacugaaaau

SEQ ID NO: 27453 - RNA, 23 nt, Artificial Sequence
  Synthetic
ggaccaacagauaacugaaaauu

SEQ ID NO: 27454 - RNA, 23 nt, Artificial Sequence
  Synthetic
gaccaacagauaacugaaaauuc

SEQ ID NO: 27455 - RNA, 23 nt, Artificial Sequence
  Synthetic
accaacagauaacugaaaauuca

SEQ ID NO: 27456 - RNA, 23 nt, Artificial Sequence
  Synthetic
ccaacagauaacugaaaauucag

SEQ ID NO: 27457 - RNA, 23 nt, Artificial Sequence
  Synthetic
caacagauaacugaaaauucagu

SEQ ID NO: 27458 - RNA, 23 nt, Artificial Sequence
  Synthetic
aacagauaacugaaaauucaguu

SEQ ID NO: 27459 - RNA, 23 nt, Artificial Sequence
  Synthetic
acagauaacugaaaauucaguuu

SEQ ID NO: 27460 - RNA, 23 nt, Artificial Sequence
  Synthetic
cagauaacugaaaauucaguuuc

SEQ ID NO: 27461 - RNA, 23 nt, Artificial Sequence
  Synthetic
agauaacugaaaauucaguuuca

SEQ ID NO: 27462 - RNA, 23 nt, Artificial Sequence
  Synthetic
gauaacugaaaauucaguuucau

SEQ ID NO: 27463 - RNA, 23 nt, Artificial Sequence
  Synthetic
auaacugaaaauucaguuucaug

SEQ ID NO: 27464 - RNA, 23 nt, Artificial Sequence
  Synthetic
uaacugaaaauucaguuucauga

SEQ ID NO: 27465 - RNA, 23 nt, Artificial Sequence
  Synthetic
aacugaaaauucaguuucaugag

SEQ ID NO: 27466 - RNA, 23 nt, Artificial Sequence
  Synthetic
acugaaaauucaguuucaugaga

SEQ ID NO: 27467 - RNA, 23 nt, Artificial Sequence
  Synthetic
cugaaaauucaguuucaugagac

SEQ ID NO: 27468 - RNA, 23 nt, Artificial Sequence
  Synthetic
ugaaaauucaguuucaugagacg

SEQ ID NO: 27469 - RNA, 23 nt, Artificial Sequence
  Synthetic
gaaaauucaguuucaugagacgu

SEQ ID NO: 27470 - RNA, 23 nt, Artificial Sequence
  Synthetic
aaaauucaguuucaugagacgua

SEQ ID NO: 27471 - RNA, 23 nt, Artificial Sequence
  Synthetic
aaauucaguuucaugagacguaa

SEQ ID NO: 27472 - RNA, 23 nt, Artificial Sequence
  Synthetic
aauucaguuucaugagacguaag

SEQ ID NO: 27473 - RNA, 23 nt, Artificial Sequence
  Synthetic
auucaguuucaugagacguaagc

SEQ ID NO: 27474 - RNA, 23 nt, Artificial Sequence
  Synthetic
uucaguuucaugagacguaagca

SEQ ID NO: 27475 - RNA, 23 nt, Artificial Sequence
  Synthetic
ucaguuucaugagacguaagcag

SEQ ID NO: 27476 - RNA, 23 nt, Artificial Sequence
  Synthetic
caguuucaugagacguaagcagc

SEQ ID NO: 27477 - RNA, 23 nt, Artificial Sequence
  Synthetic
aguuucaugagacguaagcagcu

SEQ ID NO: 27478 - RNA, 23 nt, Artificial Sequence
  Synthetic
guuucaugagacguaagcagcua

SEQ ID NO: 27479 - RNA, 23 nt, Artificial Sequence
  Synthetic
uuucaugagacguaagcagcuag

SEQ ID NO: 27480 - RNA, 23 nt, Artificial Sequence
  Synthetic
uucaugagacguaagcagcuaga

SEQ ID NO: 27481 - RNA, 23 nt, Artificial Sequence
  Synthetic
ucaugagacguaagcagcuagau

SEQ ID NO: 27482 - RNA, 23 nt, Artificial Sequence
  Synthetic
caugagacguaagcagcuagaug

SEQ ID NO: 27483 - RNA, 23 nt, Artificial Sequence
  Synthetic
augagacguaagcagcuagaugu

SEQ ID NO: 27484 - RNA, 23 nt, Artificial Sequence
  Synthetic
ugagacguaagcagcuagaugua

SEQ ID NO: 27485 - RNA, 23 nt, Artificial Sequence
  Synthetic
gagacguaagcagcuagauguaa

SEQ ID NO: 27486 - RNA, 23 nt, Artificial Sequence
  Synthetic
agacguaagcagcuagauguaaa

SEQ ID NO: 27487 - RNA, 23 nt, Artificial Sequence
  Synthetic
gacguaagcagcuagauguaaag

SEQ ID NO: 27488 - RNA, 23 nt, Artificial Sequence
  Synthetic
acguaagcagcuagauguaaagg

SEQ ID NO: 27489 - RNA, 23 nt, Artificial Sequence
  Synthetic
cguaagcagcuagauguaaaggg

SEQ ID NO: 27490 - RNA, 23 nt, Artificial Sequence
  Synthetic
guaagcagcuagauguaaagggg

SEQ ID NO: 27491 - RNA, 23 nt, Artificial Sequence
  Synthetic
uaagcagcuagauguaaagggga

SEQ ID NO: 27492 - RNA, 23 nt, Artificial Sequence
  Synthetic
aagcagcuagauguaaaggggau

SEQ ID NO: 27493 - RNA, 23 nt, Artificial Sequence
  Synthetic
agcagcuagauguaaaggggaua

SEQ ID NO: 27494 - RNA, 23 nt, Artificial Sequence
  Synthetic
gcagcuagauguaaaggggauaa

SEQ ID NO: 27495 - RNA, 23 nt, Artificial Sequence
  Synthetic
cagcuagauguaaaggggauaaa

SEQ ID NO: 27496 - RNA, 23 nt, Artificial Sequence
  Synthetic
agcuagauguaaaggggauaaag

SEQ ID NO: 27497 - RNA, 23 nt, Artificial Sequence
  Synthetic
gcuagauguaaaggggauaaaga

SEQ ID NO: 27498 - RNA, 23 nt, Artificial Sequence
  Synthetic
cuagauguaaaggggauaaagag

SEQ ID NO: 27499 - RNA, 23 nt, Artificial Sequence
  Synthetic
uagauguaaaggggauaaagagg

SEQ ID NO: 27500 - RNA, 23 nt, Artificial Sequence
  Synthetic
agauguaaaggggauaaagagga

SEQ ID NO: 27501 - RNA, 23 nt, Artificial Sequence
  Synthetic
gauguaaaggggauaaagaggac

SEQ ID NO: 27502 - RNA, 23 nt, Artificial Sequence
  Synthetic
auguaaaggggauaaagaggaca

SEQ ID NO: 27503 - RNA, 23 nt, Artificial Sequence
  Synthetic
uguaaaggggauaaagaggacaa

SEQ ID NO: 27504 - RNA, 23 nt, Artificial Sequence
  Synthetic
guaaaggggauaaagaggacaaa

SEQ ID NO: 27505 - RNA, 23 nt, Artificial Sequence
  Synthetic
uaaaggggauaaagaggacaaag

SEQ ID NO: 27506 - RNA, 23 nt, Artificial Sequence
  Synthetic
aaaggggauaaagaggacaaagu

SEQ ID NO: 27507 - RNA, 23 nt, Artificial Sequence
  Synthetic
aaggggauaaagaggacaaaguc

SEQ ID NO: 27508 - RNA, 23 nt, Artificial Sequence
  Synthetic
aggggauaaagaggacaaaguca

SEQ ID NO: 27509 - RNA, 23 nt, Artificial Sequence
  Synthetic
ggggauaaagaggacaaagucau

SEQ ID NO: 27510 - RNA, 23 nt, Artificial Sequence
  Synthetic
gggauaaagaggacaaagucaug

SEQ ID NO: 27511 - RNA, 23 nt, Artificial Sequence
  Synthetic
ggauaaagaggacaaagucaugc

SEQ ID NO: 27512 - RNA, 23 nt, Artificial Sequence
  Synthetic
gauaaagaggacaaagucaugcg

SEQ ID NO: 27513 - RNA, 23 nt, Artificial Sequence
  Synthetic
auaaagaggacaaagucaugcgc

SEQ ID NO: 27514 - RNA, 23 nt, Artificial Sequence
  Synthetic
uaaagaggacaaagucaugcgcu

SEQ ID NO: 27515 - RNA, 23 nt, Artificial Sequence
  Synthetic
aaagaggacaaagucaugcgcuu

SEQ ID NO: 27516 - RNA, 23 nt, Artificial Sequence
  Synthetic
aagaggacaaagucaugcgcuuu

SEQ ID NO: 27517 - RNA, 23 nt, Artificial Sequence
  Synthetic
agaggacaaagucaugcgcuuuu

SEQ ID NO: 27518 - RNA, 23 nt, Artificial Sequence
  Synthetic
gaggacaaagucaugcgcuuuua

SEQ ID NO: 27519 - RNA, 23 nt, Artificial Sequence
  Synthetic
aggacaaagucaugcgcuuuuac

SEQ ID NO: 27520 - RNA, 23 nt, Artificial Sequence
  Synthetic
ggacaaagucaugcgcuuuuaca

SEQ ID NO: 27521 - RNA, 23 nt, Artificial Sequence
  Synthetic
gacaaagucaugcgcuuuuacau

SEQ ID NO: 27522 - RNA, 23 nt, Artificial Sequence
  Synthetic
acaaagucaugcgcuuuuacauu

SEQ ID NO: 27523 - RNA, 23 nt, Artificial Sequence
  Synthetic
caaagucaugcgcuuuuacauuc

SEQ ID NO: 27524 - RNA, 23 nt, Artificial Sequence
  Synthetic
aaagucaugcgcuuuuacauucg

SEQ ID NO: 27525 - RNA, 23 nt, Artificial Sequence
  Synthetic
aagucaugcgcuuuuacauucgg

SEQ ID NO: 27526 - RNA, 23 nt, Artificial Sequence
  Synthetic
agucaugcgcuuuuacauucgga

SEQ ID NO: 27527 - RNA, 23 nt, Artificial Sequence
  Synthetic
gucaugcgcuuuuacauucggaa

SEQ ID NO: 27528 - RNA, 23 nt, Artificial Sequence
  Synthetic
ucaugcgcuuuuacauucggaau

SEQ ID NO: 27529 - RNA, 23 nt, Artificial Sequence
  Synthetic
caugcgcuuuuacauucggaauu

SEQ ID NO: 27530 - RNA, 23 nt, Artificial Sequence
  Synthetic
augcgcuuuuacauucggaauuc

SEQ ID NO: 27531 - RNA, 23 nt, Artificial Sequence
  Synthetic
ugcgcuuuuacauucggaauucu

SEQ ID NO: 27532 - RNA, 23 nt, Artificial Sequence
  Synthetic
gcgcuuuuacauucggaauucug

SEQ ID NO: 27533 - RNA, 23 nt, Artificial Sequence
  Synthetic
cgcuuuuacauucggaauucugc

SEQ ID NO: 27534 - RNA, 23 nt, Artificial Sequence
  Synthetic
gcuuuuacauucggaauucugca

SEQ ID NO: 27535 - RNA, 23 nt, Artificial Sequence
  Synthetic
cuuuuacauucggaauucugcac

SEQ ID NO: 27536 - RNA, 23 nt, Artificial Sequence
  Synthetic
uuuuacauucggaauucugcacu

SEQ ID NO: 27537 - RNA, 23 nt, Artificial Sequence
  Synthetic
uuuacauucggaauucugcacuu

SEQ ID NO: 27538 - RNA, 23 nt, Artificial Sequence
  Synthetic
uuacauucggaauucugcacuuc

SEQ ID NO: 27539 - RNA, 23 nt, Artificial Sequence
  Synthetic
uacauucggaauucugcacuucc

SEQ ID NO: 27540 - RNA, 23 nt, Artificial Sequence
  Synthetic
acauucggaauucugcacuucca

SEQ ID NO: 27541 - RNA, 23 nt, Artificial Sequence
  Synthetic
cauucggaauucugcacuuccag

SEQ ID NO: 27542 - RNA, 23 nt, Artificial Sequence
  Synthetic
auucggaauucugcacuuccagc

SEQ ID NO: 27543 - RNA, 23 nt, Artificial Sequence
  Synthetic
uucggaauucugcacuuccagca

SEQ ID NO: 27544 - RNA, 23 nt, Artificial Sequence
  Synthetic
ucggaauucugcacuuccagcac

SEQ ID NO: 27545 - RNA, 23 nt, Artificial Sequence
  Synthetic
cggaauucugcacuuccagcaca

SEQ ID NO: 27546 - RNA, 23 nt, Artificial Sequence
  Synthetic
ggaauucugcacuuccagcacag

SEQ ID NO: 27547 - RNA, 23 nt, Artificial Sequence
  Synthetic
gaauucugcacuuccagcacagu

SEQ ID NO: 27548 - RNA, 23 nt, Artificial Sequence
  Synthetic
aauucugcacuuccagcacaguu

SEQ ID NO: 27549 - RNA, 23 nt, Artificial Sequence
  Synthetic
auucugcacuuccagcacaguuc

SEQ ID NO: 27550 - RNA, 23 nt, Artificial Sequence
  Synthetic
uucugcacuuccagcacaguucu

SEQ ID NO: 27551 - RNA, 23 nt, Artificial Sequence
  Synthetic
ucugcacuuccagcacaguucua

SEQ ID NO: 27552 - RNA, 23 nt, Artificial Sequence
  Synthetic
cugcacuuccagcacaguucuaa

SEQ ID NO: 27553 - RNA, 23 nt, Artificial Sequence
  Synthetic
ugcacuuccagcacaguucuaaa

SEQ ID NO: 27554 - RNA, 23 nt, Artificial Sequence
  Synthetic
gcacuuccagcacaguucuaaac

SEQ ID NO: 27555 - RNA, 23 nt, Artificial Sequence
  Synthetic
cacuuccagcacaguucuaaaca

SEQ ID NO: 27556 - RNA, 23 nt, Artificial Sequence
  Synthetic
acuuccagcacaguucuaaacau

SEQ ID NO: 27557 - RNA, 23 nt, Artificial Sequence
  Synthetic
cuuccagcacaguucuaaacauc

SEQ ID NO: 27558 - RNA, 23 nt, Artificial Sequence
  Synthetic
uuccagcacaguucuaaacaucu

SEQ ID NO: 27559 - RNA, 23 nt, Artificial Sequence
  Synthetic
uccagcacaguucuaaacaucuu

SEQ ID NO: 27560 - RNA, 23 nt, Artificial Sequence
  Synthetic
ccagcacaguucuaaacaucuug

SEQ ID NO: 27561 - RNA, 23 nt, Artificial Sequence
  Synthetic
cagcacaguucuaaacaucuugu

SEQ ID NO: 27562 - RNA, 23 nt, Artificial Sequence
  Synthetic
agcacaguucuaaacaucuugua

SEQ ID NO: 27563 - RNA, 23 nt, Artificial Sequence
  Synthetic
gcacaguucuaaacaucuuguau

SEQ ID NO: 27564 - RNA, 23 nt, Artificial Sequence
  Synthetic
cacaguucuaaacaucuuguauu

SEQ ID NO: 27565 - RNA, 23 nt, Artificial Sequence
  Synthetic
acaguucuaaacaucuuguauug

SEQ ID NO: 27566 - RNA, 23 nt, Artificial Sequence
  Synthetic
caguucuaaacaucuuguauuga

SEQ ID NO: 27567 - RNA, 23 nt, Artificial Sequence
  Synthetic
aguucuaaacaucuuguauugac

SEQ ID NO: 27568 - RNA, 23 nt, Artificial Sequence
  Synthetic
guucuaaacaucuuguauugacu

SEQ ID NO: 27569 - RNA, 23 nt, Artificial Sequence
  Synthetic
uucuaaacaucuuguauugacuu

SEQ ID NO: 27570 - RNA, 23 nt, Artificial Sequence
  Synthetic
ucuaaacaucuuguauugacuuu

SEQ ID NO: 27571 - RNA, 23 nt, Artificial Sequence
  Synthetic
cuaaacaucuuguauugacuuug

SEQ ID NO: 27572 - RNA, 23 nt, Artificial Sequence
  Synthetic
uaaacaucuuguauugacuuugg

SEQ ID NO: 27573 - RNA, 23 nt, Artificial Sequence
  Synthetic
aaacaucuuguauugacuuugga

SEQ ID NO: 27574 - RNA, 23 nt, Artificial Sequence
  Synthetic
aacaucuuguauugacuuuggag

SEQ ID NO: 27575 - RNA, 23 nt, Artificial Sequence
  Synthetic
acaucuuguauugacuuuggagg

SEQ ID NO: 27576 - RNA, 23 nt, Artificial Sequence
  Synthetic
caucuuguauugacuuuggagga

SEQ ID NO: 27577 - RNA, 23 nt, Artificial Sequence
  Synthetic
aucuuguauugacuuuggaggag

SEQ ID NO: 27578 - RNA, 23 nt, Artificial Sequence
  Synthetic
ucuuguauugacuuuggaggaga

SEQ ID NO: 27579 - RNA, 23 nt, Artificial Sequence
  Synthetic
cuuguauugacuuuggaggagaa

SEQ ID NO: 27580 - RNA, 23 nt, Artificial Sequence
  Synthetic
uuguauugacuuuggaggagaau

SEQ ID NO: 27581 - RNA, 23 nt, Artificial Sequence
  Synthetic
uguauugacuuuggaggagaaug

SEQ ID NO: 27582 - RNA, 23 nt, Artificial Sequence
  Synthetic
guauugacuuuggaggagaauga

SEQ ID NO: 27583 - RNA, 23 nt, Artificial Sequence
  Synthetic
uauugacuuuggaggagaaugaa

SEQ ID NO: 27584 - RNA, 23 nt, Artificial Sequence
  Synthetic
auugacuuuggaggagaaugaaa

SEQ ID NO: 27585 - RNA, 23 nt, Artificial Sequence
  Synthetic
uugacuuuggaggagaaugaaaa

SEQ ID NO: 27586 - RNA, 23 nt, Artificial Sequence
  Synthetic
ugacuuuggaggagaaugaaaau

SEQ ID NO: 27587 - RNA, 23 nt, Artificial Sequence
  Synthetic
gacuuuggaggagaaugaaaaua

SEQ ID NO: 27588 - RNA, 23 nt, Artificial Sequence
  Synthetic
acuuuggaggagaaugaaaauag

SEQ ID NO: 27589 - RNA, 23 nt, Artificial Sequence
  Synthetic
cuuuggaggagaaugaaaauagu

SEQ ID NO: 27590 - RNA, 23 nt, Artificial Sequence
  Synthetic
uuuggaggagaaugaaaauagug

SEQ ID NO: 27591 - RNA, 23 nt, Artificial Sequence
  Synthetic
uuggaggagaaugaaaauaguga

SEQ ID NO: 27592 - RNA, 23 nt, Artificial Sequence
  Synthetic
uggaggagaaugaaaauagugaa

SEQ ID NO: 27593 - RNA, 23 nt, Artificial Sequence
  Synthetic
ggaggagaaugaaaauagugaag

SEQ ID NO: 27594 - RNA, 23 nt, Artificial Sequence
  Synthetic
gaggagaaugaaaauagugaagc

SEQ ID NO: 27595 - RNA, 23 nt, Artificial Sequence
  Synthetic
aggagaaugaaaauagugaagca

SEQ ID NO: 27596 - RNA, 23 nt, Artificial Sequence
  Synthetic
ggagaaugaaaauagugaagcaa

SEQ ID NO: 27597 - RNA, 23 nt, Artificial Sequence
  Synthetic
gagaaugaaaauagugaagcaag

SEQ ID NO: 27598 - RNA, 23 nt, Artificial Sequence
  Synthetic
agaaugaaaauagugaagcaaga

SEQ ID NO: 27599 - RNA, 23 nt, Artificial Sequence
  Synthetic
gaaugaaaauagugaagcaagag

SEQ ID NO: 27600 - RNA, 23 nt, Artificial Sequence
  Synthetic
aaugaaaauagugaagcaagagu

SEQ ID NO: 27601 - RNA, 23 nt, Artificial Sequence
  Synthetic
augaaaauagugaagcaagagug

SEQ ID NO: 27602 - RNA, 23 nt, Artificial Sequence
  Synthetic
ugaaaauagugaagcaagagugg

SEQ ID NO: 27603 - RNA, 23 nt, Artificial Sequence
  Synthetic
gaaaauagugaagcaagagugga

SEQ ID NO: 27604 - RNA, 23 nt, Artificial Sequence
  Synthetic
aaaauagugaagcaagaguggau

SEQ ID NO: 27605 - RNA, 23 nt, Artificial Sequence
  Synthetic
aaauagugaagcaagaguggauu

SEQ ID NO: 27606 - RNA, 23 nt, Artificial Sequence
  Synthetic
aauagugaagcaagaguggauua

SEQ ID NO: 27607 - RNA, 23 nt, Artificial Sequence
  Synthetic
auagugaagcaagaguggauuag

SEQ ID NO: 27608 - RNA, 23 nt, Artificial Sequence
  Synthetic
uagugaagcaagaguggauuagu

SEQ ID NO: 27609 - RNA, 23 nt, Artificial Sequence
  Synthetic
agugaagcaagaguggauuagua

SEQ ID NO: 27610 - RNA, 23 nt, Artificial Sequence
  Synthetic
gugaagcaagaguggauuaguaa

SEQ ID NO: 27611 - RNA, 23 nt, Artificial Sequence
  Synthetic
ugaagcaagaguggauuaguaaa

SEQ ID NO: 27612 - RNA, 23 nt, Artificial Sequence
  Synthetic
gaagcaagaguggauuaguaaau

SEQ ID NO: 27613 - RNA, 23 nt, Artificial Sequence
  Synthetic
aagcaagaguggauuaguaaaua

SEQ ID NO: 27614 - RNA, 23 nt, Artificial Sequence
  Synthetic
agcaagaguggauuaguaaauau

SEQ ID NO: 27615 - RNA, 23 nt, Artificial Sequence
  Synthetic
gcaagaguggauuaguaaauaua

SEQ ID NO: 27616 - RNA, 23 nt, Artificial Sequence
  Synthetic
caagaguggauuaguaaauauac

SEQ ID NO: 27617 - RNA, 23 nt, Artificial Sequence
  Synthetic
aagaguggauuaguaaauauacu

SEQ ID NO: 27618 - RNA, 23 nt, Artificial Sequence
  Synthetic
agaguggauuaguaaauauacuu

SEQ ID NO: 27619 - RNA, 23 nt, Artificial Sequence
  Synthetic
gaguggauuaguaaauauacuua

SEQ ID NO: 27620 - RNA, 23 nt, Artificial Sequence
  Synthetic
aguggauuaguaaauauacuuaa

SEQ ID NO: 27621 - RNA, 23 nt, Artificial Sequence
  Synthetic
guggauuaguaaauauacuuaaa

SEQ ID NO: 27622 - RNA, 23 nt, Artificial Sequence
  Synthetic
uggauuaguaaauauacuuaaau

SEQ ID NO: 27623 - RNA, 23 nt, Artificial Sequence
  Synthetic
ggauuaguaaauauacuuaaauc

SEQ ID NO: 27624 - RNA, 23 nt, Artificial Sequence
  Synthetic
gauuaguaaauauacuuaaaucg

SEQ ID NO: 27625 - RNA, 23 nt, Artificial Sequence
  Synthetic
auuaguaaauauacuuaaaucgc

SEQ ID NO: 27626 - RNA, 23 nt, Artificial Sequence
  Synthetic
uuaguaaauauacuuaaaucgca

SEQ ID NO: 27627 - RNA, 23 nt, Artificial Sequence
  Synthetic
uaguaaauauacuuaaaucgcaa

SEQ ID NO: 27628 - RNA, 23 nt, Artificial Sequence
  Synthetic
aguaaauauacuuaaaucgcaau

SEQ ID NO: 27629 - RNA, 23 nt, Artificial Sequence
  Synthetic
guaaauauacuuaaaucgcaaua

SEQ ID NO: 27630 - RNA, 23 nt, Artificial Sequence
  Synthetic
uaaauauacuuaaaucgcaauac

SEQ ID NO: 27631 - RNA, 23 nt, Artificial Sequence
  Synthetic
aaauauacuuaaaucgcaauacc

SEQ ID NO: 27632 - RNA, 23 nt, Artificial Sequence
  Synthetic
aauauacuuaaaucgcaauaccu

SEQ ID NO: 27633 - RNA, 23 nt, Artificial Sequence
  Synthetic
auauacuuaaaucgcaauaccua

SEQ ID NO: 27634 - RNA, 23 nt, Artificial Sequence
  Synthetic
uauacuuaaaucgcaauaccuag

SEQ ID NO: 27635 - RNA, 23 nt, Artificial Sequence
  Synthetic
auacuuaaaucgcaauaccuagg

SEQ ID NO: 27636 - RNA, 23 nt, Artificial Sequence
  Synthetic
uacuuaaaucgcaauaccuagga

SEQ ID NO: 27637 - RNA, 23 nt, Artificial Sequence
  Synthetic
acuuaaaucgcaauaccuaggag

SEQ ID NO: 27638 - RNA, 23 nt, Artificial Sequence
  Synthetic
cuuaaaucgcaauaccuaggaga

SEQ ID NO: 27639 - RNA, 23 nt, Artificial Sequence
  Synthetic
uuaaaucgcaauaccuaggagaa

SEQ ID NO: 27640 - RNA, 23 nt, Artificial Sequence
  Synthetic
uaaaucgcaauaccuaggagaag

SEQ ID NO: 27641 - RNA, 23 nt, Artificial Sequence
  Synthetic
aaaucgcaauaccuaggagaaga

SEQ ID NO: 27642 - RNA, 23 nt, Artificial Sequence
  Synthetic
aaucgcaauaccuaggagaagag

SEQ ID NO: 27643 - RNA, 23 nt, Artificial Sequence
  Synthetic
aucgcaauaccuaggagaagagu

SEQ ID NO: 27644 - RNA, 23 nt, Artificial Sequence
  Synthetic
ucgcaauaccuaggagaagagug

SEQ ID NO: 27645 - RNA, 23 nt, Artificial Sequence
  Synthetic
cgcaauaccuaggagaagagugu

SEQ ID NO: 27646 - RNA, 23 nt, Artificial Sequence
  Synthetic
gcaauaccuaggagaagaguguu

SEQ ID NO: 27647 - RNA, 23 nt, Artificial Sequence
  Synthetic
caauaccuaggagaagaguguuu

SEQ ID NO: 27648 - RNA, 23 nt, Artificial Sequence
  Synthetic
aauaccuaggagaagaguguuug

SEQ ID NO: 27649 - RNA, 23 nt, Artificial Sequence
  Synthetic
auaccuaggagaagaguguuugg

SEQ ID NO: 27650 - RNA, 23 nt, Artificial Sequence
  Synthetic
uaccuaggagaagaguguuuggc

SEQ ID NO: 27651 - RNA, 23 nt, Artificial Sequence
  Synthetic
accuaggagaagaguguuuggcu

SEQ ID NO: 27652 - RNA, 23 nt, Artificial Sequence
  Synthetic
ccuaggagaagaguguuuggcug

SEQ ID NO: 27653 - RNA, 23 nt, Artificial Sequence
  Synthetic
cuaggagaagaguguuuggcuga

SEQ ID NO: 27654 - RNA, 23 nt, Artificial Sequence
  Synthetic
uaggagaagaguguuuggcugaa

SEQ ID NO: 27655 - RNA, 23 nt, Artificial Sequence
  Synthetic
aggagaagaguguuuggcugaac

SEQ ID NO: 27656 - RNA, 23 nt, Artificial Sequence
  Synthetic
ggagaagaguguuuggcugaacu

SEQ ID NO: 27657 - RNA, 23 nt, Artificial Sequence
  Synthetic
gagaagaguguuuggcugaacug

SEQ ID NO: 27658 - RNA, 23 nt, Artificial Sequence
  Synthetic
agaagaguguuuggcugaacuga

SEQ ID NO: 27659 - RNA, 23 nt, Artificial Sequence
  Synthetic
gaagaguguuuggcugaacugaa

SEQ ID NO: 27660 - RNA, 23 nt, Artificial Sequence
  Synthetic
aagaguguuuggcugaacugaaa

SEQ ID NO: 27661 - RNA, 23 nt, Artificial Sequence
  Synthetic
agaguguuuggcugaacugaaau

SEQ ID NO: 27662 - RNA, 23 nt, Artificial Sequence
  Synthetic
gaguguuuggcugaacugaaaua

SEQ ID NO: 27663 - RNA, 23 nt, Artificial Sequence
  Synthetic
aguguuuggcugaacugaaauac

SEQ ID NO: 27664 - RNA, 23 nt, Artificial Sequence
  Synthetic
guguuuggcugaacugaaauacu

SEQ ID NO: 27665 - RNA, 23 nt, Artificial Sequence
  Synthetic
uguuuggcugaacugaaauacuu

SEQ ID NO: 27666 - RNA, 23 nt, Artificial Sequence
  Synthetic
guuuggcugaacugaaauacuuu

SEQ ID NO: 27667 - RNA, 23 nt, Artificial Sequence
  Synthetic
uuuggcugaacugaaauacuuuu

SEQ ID NO: 27668 - RNA, 23 nt, Artificial Sequence
  Synthetic
uuggcugaacugaaauacuuuua

SEQ ID NO: 27669 - RNA, 23 nt, Artificial Sequence
  Synthetic
uggcugaacugaaauacuuuuaa

SEQ ID NO: 27670 - RNA, 23 nt, Artificial Sequence
  Synthetic
ggcugaacugaaauacuuuuaac

SEQ ID NO: 27671 - RNA, 23 nt, Artificial Sequence
  Synthetic
gcugaacugaaauacuuuuaaca

SEQ ID NO: 27672 - RNA, 23 nt, Artificial Sequence
  Synthetic
cugaacugaaauacuuuuaacac

SEQ ID NO: 27673 - RNA, 23 nt, Artificial Sequence
  Synthetic
ugaacugaaauacuuuuaacaca

SEQ ID NO: 27674 - RNA, 23 nt, Artificial Sequence
  Synthetic
gaacugaaauacuuuuaacacac

SEQ ID NO: 27675 - RNA, 23 nt, Artificial Sequence
  Synthetic
aacugaaauacuuuuaacacaca

SEQ ID NO: 27676 - RNA, 23 nt, Artificial Sequence
  Synthetic
acugaaauacuuuuaacacacag

SEQ ID NO: 27677 - RNA, 23 nt, Artificial Sequence
  Synthetic
cugaaauacuuuuaacacacagu

SEQ ID NO: 27678 - RNA, 23 nt, Artificial Sequence
  Synthetic
ugaaauacuuuuaacacacagug

SEQ ID NO: 27679 - RNA, 23 nt, Artificial Sequence
  Synthetic
gaaauacuuuuaacacacagugc

SEQ ID NO: 27680 - RNA, 23 nt, Artificial Sequence
  Synthetic
aaauacuuuuaacacacagugca

SEQ ID NO: 27681 - RNA, 23 nt, Artificial Sequence
  Synthetic
aauacuuuuaacacacagugcag

SEQ ID NO: 27682 - RNA, 23 nt, Artificial Sequence
  Synthetic
auacuuuuaacacacagugcagu

SEQ ID NO: 27683 - RNA, 23 nt, Artificial Sequence
  Synthetic
uacuuuuaacacacagugcaguu

SEQ ID NO: 27684 - RNA, 23 nt, Artificial Sequence
  Synthetic
acuuuuaacacacagugcaguua

SEQ ID NO: 27685 - RNA, 23 nt, Artificial Sequence
  Synthetic
cuuuuaacacacagugcaguuac

SEQ ID NO: 27686 - RNA, 23 nt, Artificial Sequence
  Synthetic
uuuuaacacacagugcaguuaca

SEQ ID NO: 27687 - RNA, 23 nt, Artificial Sequence
  Synthetic
uuuaacacacagugcaguuacau

SEQ ID NO: 27688 - RNA, 23 nt, Artificial Sequence
  Synthetic
uuaacacacagugcaguuacaug

SEQ ID NO: 27689 - RNA, 23 nt, Artificial Sequence
  Synthetic
uaacacacagugcaguuacauga

SEQ ID NO: 27690 - RNA, 23 nt, Artificial Sequence
  Synthetic
aacacacagugcaguuacaugag

SEQ ID NO: 27691 - RNA, 23 nt, Artificial Sequence
  Synthetic
acacacagugcaguuacaugagu

SEQ ID NO: 27692 - RNA, 23 nt, Artificial Sequence
  Synthetic
cacacagugcaguuacaugagug

SEQ ID NO: 27693 - RNA, 23 nt, Artificial Sequence
  Synthetic
acacagugcaguuacaugaguga

SEQ ID NO: 27694 - RNA, 23 nt, Artificial Sequence
  Synthetic
cacagugcaguuacaugagugac

SEQ ID NO: 27695 - RNA, 23 nt, Artificial Sequence
  Synthetic
acagugcaguuacaugagugacu

SEQ ID NO: 27696 - RNA, 23 nt, Artificial Sequence
  Synthetic
cagugcaguuacaugagugacuu

SEQ ID NO: 27697 - RNA, 23 nt, Artificial Sequence
  Synthetic
agugcaguuacaugagugacuua

SEQ ID NO: 27698 - RNA, 23 nt, Artificial Sequence
  Synthetic
gugcaguuacaugagugacuuaa

SEQ ID NO: 27699 - RNA, 23 nt, Artificial Sequence
  Synthetic
ugcaguuacaugagugacuuaag

SEQ ID NO: 27700 - RNA, 23 nt, Artificial Sequence
  Synthetic
gcaguuacaugagugacuuaagg

SEQ ID NO: 27701 - RNA, 23 nt, Artificial Sequence
  Synthetic
caguuacaugagugacuuaaggg

SEQ ID NO: 27702 - RNA, 23 nt, Artificial Sequence
  Synthetic
aguuacaugagugacuuaagggu

SEQ ID NO: 27703 - RNA, 23 nt, Artificial Sequence
  Synthetic
guuacaugagugacuuaaggguu

SEQ ID NO: 27704 - RNA, 23 nt, Artificial Sequence
  Synthetic
uuacaugagugacuuaaggguuc

SEQ ID NO: 27705 - RNA, 23 nt, Artificial Sequence
  Synthetic
uacaugagugacuuaaggguucu

SEQ ID NO: 27706 - RNA, 23 nt, Artificial Sequence
  Synthetic
acaugagugacuuaaggguucuu

SEQ ID NO: 27707 - RNA, 23 nt, Artificial Sequence
  Synthetic
caugagugacuuaaggguucuua

SEQ ID NO: 27708 - RNA, 23 nt, Artificial Sequence
  Synthetic
augagugacuuaaggguucuuau

SEQ ID NO: 27709 - RNA, 23 nt, Artificial Sequence
  Synthetic
ugagugacuuaaggguucuuauc

SEQ ID NO: 27710 - RNA, 23 nt, Artificial Sequence
  Synthetic
gagugacuuaaggguucuuaucu

SEQ ID NO: 27711 - RNA, 23 nt, Artificial Sequence
  Synthetic
agugacuuaaggguucuuaucuc

SEQ ID NO: 27712 - RNA, 23 nt, Artificial Sequence
  Synthetic
gugacuuaaggguucuuaucucu

SEQ ID NO: 27713 - RNA, 23 nt, Artificial Sequence
  Synthetic
ugacuuaaggguucuuaucucug

SEQ ID NO: 27714 - RNA, 23 nt, Artificial Sequence
  Synthetic
gacuuaaggguucuuaucucugg

SEQ ID NO: 27715 - RNA, 23 nt, Artificial Sequence
  Synthetic
acuuaaggguucuuaucucugga

SEQ ID NO: 27716 - RNA, 23 nt, Artificial Sequence
  Synthetic
cuuaaggguucuuaucucuggac

SEQ ID NO: 27717 - RNA, 23 nt, Artificial Sequence
  Synthetic
uuaaggguucuuaucucuggacu

SEQ ID NO: 27718 - RNA, 23 nt, Artificial Sequence
  Synthetic
uaaggguucuuaucucuggacuu

SEQ ID NO: 27719 - RNA, 23 nt, Artificial Sequence
  Synthetic
aaggguucuuaucucuggacuuu

SEQ ID NO: 27720 - RNA, 23 nt, Artificial Sequence
  Synthetic
aggguucuuaucucuggacuuug

SEQ ID NO: 27721 - RNA, 23 nt, Artificial Sequence
  Synthetic
ggguucuuaucucuggacuuuga

SEQ ID NO: 27722 - RNA, 23 nt, Artificial Sequence
  Synthetic
gguucuuaucucuggacuuugag

SEQ ID NO: 27723 - RNA, 23 nt, Artificial Sequence
  Synthetic
guucuuaucucuggacuuugagu

SEQ ID NO: 27724 - RNA, 23 nt, Artificial Sequence
  Synthetic
uucuuaucucuggacuuugaguu

SEQ ID NO: 27725 - RNA, 23 nt, Artificial Sequence
  Synthetic
ucuuaucucuggacuuugaguuu

SEQ ID NO: 27726 - RNA, 23 nt, Artificial Sequence
  Synthetic
cuuaucucuggacuuugaguuuu

SEQ ID NO: 27727 - RNA, 23 nt, Artificial Sequence
  Synthetic
uuaucucuggacuuugaguuuug

SEQ ID NO: 27728 - RNA, 23 nt, Artificial Sequence
  Synthetic
uaucucuggacuuugaguuuugg

SEQ ID NO: 27729 - RNA, 23 nt, Artificial Sequence
  Synthetic
aucucuggacuuugaguuuuggc

SEQ ID NO: 27730 - RNA, 23 nt, Artificial Sequence
  Synthetic
ucucuggacuuugaguuuuggcc

SEQ ID NO: 27731 - RNA, 23 nt, Artificial Sequence
  Synthetic
cucuggacuuugaguuuuggccu

SEQ ID NO: 27732 - RNA, 23 nt, Artificial Sequence
  Synthetic
ucuggacuuugaguuuuggccua

SEQ ID NO: 27733 - RNA, 23 nt, Artificial Sequence
  Synthetic
cuggacuuugaguuuuggccuaa

SEQ ID NO: 27734 - RNA, 23 nt, Artificial Sequence
  Synthetic
uggacuuugaguuuuggccuaaa

SEQ ID NO: 27735 - RNA, 23 nt, Artificial Sequence
  Synthetic
ggacuuugaguuuuggccuaaaa

SEQ ID NO: 27736 - RNA, 23 nt, Artificial Sequence
  Synthetic
gacuuugaguuuuggccuaaaau

SEQ ID NO: 27737 - RNA, 23 nt, Artificial Sequence
  Synthetic
acuuugaguuuuggccuaaaaug

SEQ ID NO: 27738 - RNA, 23 nt, Artificial Sequence
  Synthetic
cuuugaguuuuggccuaaaauga

SEQ ID NO: 27739 - RNA, 23 nt, Artificial Sequence
  Synthetic
uuugaguuuuggccuaaaaugau

SEQ ID NO: 27740 - RNA, 23 nt, Artificial Sequence
  Synthetic
uugaguuuuggccuaaaaugaug

SEQ ID NO: 27741 - RNA, 23 nt, Artificial Sequence
  Synthetic
ugaguuuuggccuaaaaugaugu

SEQ ID NO: 27742 - RNA, 23 nt, Artificial Sequence
  Synthetic
gaguuuuggccuaaaaugaugua

SEQ ID NO: 27743 - RNA, 23 nt, Artificial Sequence
  Synthetic
aguuuuggccuaaaaugauguaa

SEQ ID NO: 27744 - RNA, 23 nt, Artificial Sequence
  Synthetic
guuuuggccuaaaaugauguaau

SEQ ID NO: 27745 - RNA, 23 nt, Artificial Sequence
  Synthetic
uuuuggccuaaaaugauguaaug

SEQ ID NO: 27746 - RNA, 23 nt, Artificial Sequence
  Synthetic
uuuggccuaaaaugauguaauga

SEQ ID NO: 27747 - RNA, 23 nt, Artificial Sequence
  Synthetic
uuggccuaaaaugauguaaugau

SEQ ID NO: 27748 - RNA, 23 nt, Artificial Sequence
  Synthetic
uggccuaaaaugauguaaugaug

SEQ ID NO: 27749 - RNA, 23 nt, Artificial Sequence
  Synthetic
ggccuaaaaugauguaaugaugu

SEQ ID NO: 27750 - RNA, 23 nt, Artificial Sequence
  Synthetic
gccuaaaaugauguaaugauguu

SEQ ID NO: 27751 - RNA, 23 nt, Artificial Sequence
  Synthetic
ccuaaaaugauguaaugauguug

SEQ ID NO: 27752 - RNA, 23 nt, Artificial Sequence
  Synthetic
cuaaaaugauguaaugauguugc

SEQ ID NO: 27753 - RNA, 23 nt, Artificial Sequence
  Synthetic
uaaaaugauguaaugauguugcu

SEQ ID NO: 27754 - RNA, 23 nt, Artificial Sequence
  Synthetic
aaaaugauguaaugauguugcua

SEQ ID NO: 27755 - RNA, 23 nt, Artificial Sequence
  Synthetic
aaaugauguaaugauguugcuaa

SEQ ID NO: 27756 - RNA, 23 nt, Artificial Sequence
  Synthetic
aaugauguaaugauguugcuaaa

SEQ ID NO: 27757 - RNA, 23 nt, Artificial Sequence
  Synthetic
augauguaaugauguugcuaaaa

SEQ ID NO: 27758 - RNA, 23 nt, Artificial Sequence
  Synthetic
ugauguaaugauguugcuaaaaa

SEQ ID NO: 27759 - RNA, 23 nt, Artificial Sequence
  Synthetic
gauguaaugauguugcuaaaaag

SEQ ID NO: 27760 - RNA, 23 nt, Artificial Sequence
  Synthetic
auguaaugauguugcuaaaaaga

SEQ ID NO: 27761 - RNA, 23 nt, Artificial Sequence
  Synthetic
uguaaugauguugcuaaaaagac

SEQ ID NO: 27762 - RNA, 23 nt, Artificial Sequence
  Synthetic
guaaugauguugcuaaaaagaca

SEQ ID NO: 27763 - RNA, 23 nt, Artificial Sequence
  Synthetic
uaaugauguugcuaaaaagacau

SEQ ID NO: 27764 - RNA, 23 nt, Artificial Sequence
  Synthetic
aaugauguugcuaaaaagacauu

SEQ ID NO: 27765 - RNA, 23 nt, Artificial Sequence
  Synthetic
augauguugcuaaaaagacauug

SEQ ID NO: 27766 - RNA, 23 nt, Artificial Sequence
  Synthetic
ugauguugcuaaaaagacauugu

SEQ ID NO: 27767 - RNA, 23 nt, Artificial Sequence
  Synthetic
gauguugcuaaaaagacauuguu

SEQ ID NO: 27768 - RNA, 23 nt, Artificial Sequence
  Synthetic
auguugcuaaaaagacauuguua

SEQ ID NO: 27769 - RNA, 23 nt, Artificial Sequence
  Synthetic
uguugcuaaaaagacauuguuaa

SEQ ID NO: 27770 - RNA, 23 nt, Artificial Sequence
  Synthetic
guugcuaaaaagacauuguuaaa

SEQ ID NO: 27771 - RNA, 23 nt, Artificial Sequence
  Synthetic
uugcuaaaaagacauuguuaaag

SEQ ID NO: 27772 - RNA, 23 nt, Artificial Sequence
  Synthetic
ugcuaaaaagacauuguuaaaga

SEQ ID NO: 27773 - RNA, 23 nt, Artificial Sequence
  Synthetic
gcuaaaaagacauuguuaaagaa

SEQ ID NO: 27774 - RNA, 23 nt, Artificial Sequence
  Synthetic
cuaaaaagacauuguuaaagaac

SEQ ID NO: 27775 - RNA, 23 nt, Artificial Sequence
  Synthetic
uaaaaagacauuguuaaagaacu

SEQ ID NO: 27776 - RNA, 23 nt, Artificial Sequence
  Synthetic
aaaaagacauuguuaaagaacuu

SEQ ID NO: 27777 - RNA, 23 nt, Artificial Sequence
  Synthetic
aaaagacauuguuaaagaacuua

SEQ ID NO: 27778 - RNA, 23 nt, Artificial Sequence
  Synthetic
aaagacauuguuaaagaacuuaa

SEQ ID NO: 27779 - RNA, 23 nt, Artificial Sequence
  Synthetic
aagacauuguuaaagaacuuaaa

SEQ ID NO: 27780 - RNA, 23 nt, Artificial Sequence
  Synthetic
agacauuguuaaagaacuuaaag

SEQ ID NO: 27781 - RNA, 23 nt, Artificial Sequence
  Synthetic
gacauuguuaaagaacuuaaagc

SEQ ID NO: 27782 - RNA, 23 nt, Artificial Sequence
  Synthetic
acauuguuaaagaacuuaaagcc

SEQ ID NO: 27783 - RNA, 23 nt, Artificial Sequence
  Synthetic
cauuguuaaagaacuuaaagccg

SEQ ID NO: 27784 - RNA, 23 nt, Artificial Sequence
  Synthetic
auuguuaaagaacuuaaagccga

SEQ ID NO: 27785 - RNA, 23 nt, Artificial Sequence
  Synthetic
uuguuaaagaacuuaaagccgaa

SEQ ID NO: 27786 - RNA, 23 nt, Artificial Sequence
  Synthetic
uguuaaagaacuuaaagccgaaa

SEQ ID NO: 27787 - RNA, 23 nt, Artificial Sequence
  Synthetic
guuaaagaacuuaaagccgaaac

SEQ ID NO: 27788 - RNA, 23 nt, Artificial Sequence
  Synthetic
uuaaagaacuuaaagccgaaaca

SEQ ID NO: 27789 - RNA, 23 nt, Artificial Sequence
  Synthetic
uaaagaacuuaaagccgaaacag

SEQ ID NO: 27790 - RNA, 23 nt, Artificial Sequence
  Synthetic
aaagaacuuaaagccgaaacagc

SEQ ID NO: 27791 - RNA, 23 nt, Artificial Sequence
  Synthetic
aagaacuuaaagccgaaacagcu

SEQ ID NO: 27792 - RNA, 23 nt, Artificial Sequence
  Synthetic
agaacuuaaagccgaaacagcuc

SEQ ID NO: 27793 - RNA, 23 nt, Artificial Sequence
  Synthetic
gaacuuaaagccgaaacagcuca

SEQ ID NO: 27794 - RNA, 23 nt, Artificial Sequence
  Synthetic
aacuuaaagccgaaacagcucag

SEQ ID NO: 27795 - RNA, 23 nt, Artificial Sequence
  Synthetic
acuuaaagccgaaacagcucagc

SEQ ID NO: 27796 - RNA, 23 nt, Artificial Sequence
  Synthetic
cuuaaagccgaaacagcucagca

SEQ ID NO: 27797 - RNA, 23 nt, Artificial Sequence
  Synthetic
uuaaagccgaaacagcucagcag

SEQ ID NO: 27798 - RNA, 23 nt, Artificial Sequence
  Synthetic
uaaagccgaaacagcucagcagg

SEQ ID NO: 27799 - RNA, 23 nt, Artificial Sequence
  Synthetic
aaagccgaaacagcucagcagga

SEQ ID NO: 27800 - RNA, 23 nt, Artificial Sequence
  Synthetic
aagccgaaacagcucagcaggau

SEQ ID NO: 27801 - RNA, 23 nt, Artificial Sequence
  Synthetic
agccgaaacagcucagcaggaug

SEQ ID NO: 27802 - RNA, 23 nt, Artificial Sequence
  Synthetic
gccgaaacagcucagcaggauga

SEQ ID NO: 27803 - RNA, 23 nt, Artificial Sequence
  Synthetic
ccgaaacagcucagcaggaugaa

SEQ ID NO: 27804 - RNA, 23 nt, Artificial Sequence
  Synthetic
cgaaacagcucagcaggaugaau

SEQ ID NO: 27805 - RNA, 23 nt, Artificial Sequence
  Synthetic
gaaacagcucagcaggaugaaug

SEQ ID NO: 27806 - RNA, 23 nt, Artificial Sequence
  Synthetic
aaacagcucagcaggaugaauga

SEQ ID NO: 27807 - RNA, 23 nt, Artificial Sequence
  Synthetic
aacagcucagcaggaugaaugaa

SEQ ID NO: 27808 - RNA, 23 nt, Artificial Sequence
  Synthetic
acagcucagcaggaugaaugaag

SEQ ID NO: 27809 - RNA, 23 nt, Artificial Sequence
  Synthetic
cagcucagcaggaugaaugaaga

SEQ ID NO: 27810 - RNA, 23 nt, Artificial Sequence
  Synthetic
agcucagcaggaugaaugaagau

SEQ ID NO: 27811 - RNA, 23 nt, Artificial Sequence
  Synthetic
gcucagcaggaugaaugaagaug

SEQ ID NO: 27812 - RNA, 23 nt, Artificial Sequence
  Synthetic
cucagcaggaugaaugaagauga

SEQ ID NO: 27813 - RNA, 23 nt, Artificial Sequence
  Synthetic
ucagcaggaugaaugaagaugaa

SEQ ID NO: 27814 - RNA, 23 nt, Artificial Sequence
  Synthetic
cagcaggaugaaugaagaugaag

SEQ ID NO: 27815 - RNA, 23 nt, Artificial Sequence
  Synthetic
agcaggaugaaugaagaugaagg

SEQ ID NO: 27816 - RNA, 23 nt, Artificial Sequence
  Synthetic
gcaggaugaaugaagaugaaggu

SEQ ID NO: 27817 - RNA, 23 nt, Artificial Sequence
  Synthetic
caggaugaaugaagaugaaggua

SEQ ID NO: 27818 - RNA, 23 nt, Artificial Sequence
  Synthetic
aggaugaaugaagaugaagguac

SEQ ID NO: 27819 - RNA, 23 nt, Artificial Sequence
  Synthetic
ggaugaaugaagaugaagguacu

SEQ ID NO: 27820 - RNA, 23 nt, Artificial Sequence
  Synthetic
gaugaaugaagaugaagguacug

SEQ ID NO: 27821 - RNA, 23 nt, Artificial Sequence
  Synthetic
augaaugaagaugaagguacugg

SEQ ID NO: 27822 - RNA, 23 nt, Artificial Sequence
  Synthetic
ugaaugaagaugaagguacuggc

SEQ ID NO: 27823 - RNA, 23 nt, Artificial Sequence
  Synthetic
gaaugaagaugaagguacuggcu

SEQ ID NO: 27824 - RNA, 23 nt, Artificial Sequence
  Synthetic
aaugaagaugaagguacuggcua

SEQ ID NO: 27825 - RNA, 23 nt, Artificial Sequence
  Synthetic
augaagaugaagguacuggcuau

SEQ ID NO: 27826 - RNA, 23 nt, Artificial Sequence
  Synthetic
ugaagaugaagguacuggcuauc

SEQ ID NO: 27827 - RNA, 23 nt, Artificial Sequence
  Synthetic
gaagaugaagguacuggcuaucc

SEQ ID NO: 27828 - RNA, 23 nt, Artificial Sequence
  Synthetic
aagaugaagguacuggcuauccc

SEQ ID NO: 27829 - RNA, 23 nt, Artificial Sequence
  Synthetic
agaugaagguacuggcuauccca

SEQ ID NO: 27830 - RNA, 23 nt, Artificial Sequence
  Synthetic
gaugaagguacuggcuaucccaa

SEQ ID NO: 27831 - RNA, 23 nt, Artificial Sequence
  Synthetic
augaagguacuggcuaucccaag

SEQ ID NO: 27832 - RNA, 23 nt, Artificial Sequence
  Synthetic
ugaagguacuggcuaucccaagg

SEQ ID NO: 27833 - RNA, 23 nt, Artificial Sequence
  Synthetic
gaagguacuggcuaucccaagga

SEQ ID NO: 27834 - RNA, 23 nt, Artificial Sequence
  Synthetic
aagguacuggcuaucccaaggag

SEQ ID NO: 27835 - RNA, 23 nt, Artificial Sequence
  Synthetic
agguacuggcuaucccaaggagc

SEQ ID NO: 27836 - RNA, 23 nt, Artificial Sequence
  Synthetic
gguacuggcuaucccaaggagcc

SEQ ID NO: 27837 - RNA, 23 nt, Artificial Sequence
  Synthetic
guacuggcuaucccaaggagccc

SEQ ID NO: 27838 - RNA, 23 nt, Artificial Sequence
  Synthetic
uacuggcuaucccaaggagccca

SEQ ID NO: 27839 - RNA, 23 nt, Artificial Sequence
  Synthetic
acuggcuaucccaaggagcccau

SEQ ID NO: 27840 - RNA, 23 nt, Artificial Sequence
  Synthetic
cuggcuaucccaaggagcccauu

SEQ ID NO: 27841 - RNA, 23 nt, Artificial Sequence
  Synthetic
uggcuaucccaaggagcccauuc

SEQ ID NO: 27842 - RNA, 23 nt, Artificial Sequence
  Synthetic
ggcuaucccaaggagcccauuca

SEQ ID NO: 27843 - RNA, 23 nt, Artificial Sequence
  Synthetic
gcuaucccaaggagcccauucaa

SEQ ID NO: 27844 - RNA, 23 nt, Artificial Sequence
  Synthetic
cuaucccaaggagcccauucaac

SEQ ID NO: 27845 - RNA, 23 nt, Artificial Sequence
  Synthetic
uaucccaaggagcccauucaaca

SEQ ID NO: 27846 - RNA, 23 nt, Artificial Sequence
  Synthetic
aucccaaggagcccauucaacag

SEQ ID NO: 27847 - RNA, 23 nt, Artificial Sequence
  Synthetic
ucccaaggagcccauucaacagc

SEQ ID NO: 27848 - RNA, 23 nt, Artificial Sequence
  Synthetic
cccaaggagcccauucaacagca

SEQ ID NO: 27849 - RNA, 23 nt, Artificial Sequence
  Synthetic
ccaaggagcccauucaacagcag

SEQ ID NO: 27850 - RNA, 23 nt, Artificial Sequence
  Synthetic
caaggagcccauucaacagcagc

SEQ ID NO: 27851 - RNA, 23 nt, Artificial Sequence
  Synthetic
aaggagcccauucaacagcagcu

SEQ ID NO: 27852 - RNA, 23 nt, Artificial Sequence
  Synthetic
aggagcccauucaacagcagcuu

SEQ ID NO: 27853 - RNA, 23 nt, Artificial Sequence
  Synthetic
ggagcccauucaacagcagcuua

SEQ ID NO: 27854 - RNA, 23 nt, Artificial Sequence
  Synthetic
gagcccauucaacagcagcuuac

SEQ ID NO: 27855 - RNA, 23 nt, Artificial Sequence
  Synthetic
agcccauucaacagcagcuuacc

SEQ ID NO: 27856 - RNA, 23 nt, Artificial Sequence
  Synthetic
gcccauucaacagcagcuuaccu

SEQ ID NO: 27857 - RNA, 23 nt, Artificial Sequence
  Synthetic
cccauucaacagcagcuuaccuc

SEQ ID NO: 27858 - RNA, 23 nt, Artificial Sequence
  Synthetic
ccauucaacagcagcuuaccucu

SEQ ID NO: 27859 - RNA, 23 nt, Artificial Sequence
  Synthetic
cauucaacagcagcuuaccucuu

SEQ ID NO: 27860 - RNA, 23 nt, Artificial Sequence
  Synthetic
auucaacagcagcuuaccucuuc

SEQ ID NO: 27861 - RNA, 23 nt, Artificial Sequence
  Synthetic
uucaacagcagcuuaccucuucu

SEQ ID NO: 27862 - RNA, 23 nt, Artificial Sequence
  Synthetic
ucaacagcagcuuaccucuucuc

SEQ ID NO: 27863 - RNA, 23 nt, Artificial Sequence
  Synthetic
caacagcagcuuaccucuucuca

SEQ ID NO: 27864 - RNA, 23 nt, Artificial Sequence
  Synthetic
aacagcagcuuaccucuucucag

SEQ ID NO: 27865 - RNA, 23 nt, Artificial Sequence
  Synthetic
acagcagcuuaccucuucucagc

SEQ ID NO: 27866 - RNA, 23 nt, Artificial Sequence
  Synthetic
cagcagcuuaccucuucucagcu

SEQ ID NO: 27867 - RNA, 23 nt, Artificial Sequence
  Synthetic
agcagcuuaccucuucucagcuc

SEQ ID NO: 27868 - RNA, 23 nt, Artificial Sequence
  Synthetic
gcagcuuaccucuucucagcucc

SEQ ID NO: 27869 - RNA, 23 nt, Artificial Sequence
  Synthetic
cagcuuaccucuucucagcucca

SEQ ID NO: 27870 - RNA, 23 nt, Artificial Sequence
  Synthetic
agcuuaccucuucucagcuccau

SEQ ID NO: 27871 - RNA, 23 nt, Artificial Sequence
  Synthetic
gcuuaccucuucucagcuccaua

SEQ ID NO: 27872 - RNA, 23 nt, Artificial Sequence
  Synthetic
cuuaccucuucucagcuccauau

SEQ ID NO: 27873 - RNA, 23 nt, Artificial Sequence
  Synthetic
uuaccucuucucagcuccauauu

SEQ ID NO: 27874 - RNA, 23 nt, Artificial Sequence
  Synthetic
uaccucuucucagcuccauauuu

SEQ ID NO: 27875 - RNA, 23 nt, Artificial Sequence
  Synthetic
accucuucucagcuccauauuuu

SEQ ID NO: 27876 - RNA, 23 nt, Artificial Sequence
  Synthetic
ccucuucucagcuccauauuuuc

SEQ ID NO: 27877 - RNA, 23 nt, Artificial Sequence
  Synthetic
cucuucucagcuccauauuuuca

SEQ ID NO: 27878 - RNA, 23 nt, Artificial Sequence
  Synthetic
ucuucucagcuccauauuuucaa

SEQ ID NO: 27879 - RNA, 23 nt, Artificial Sequence
  Synthetic
cuucucagcuccauauuuucaau

SEQ ID NO: 27880 - RNA, 23 nt, Artificial Sequence
  Synthetic
uucucagcuccauauuuucaaug

SEQ ID NO: 27881 - RNA, 23 nt, Artificial Sequence
  Synthetic
ucucagcuccauauuuucaaugu

SEQ ID NO: 27882 - RNA, 23 nt, Artificial Sequence
  Synthetic
cucagcuccauauuuucaaugug

SEQ ID NO: 27883 - RNA, 23 nt, Artificial Sequence
  Synthetic
ucagcuccauauuuucaauguga

SEQ ID NO: 27884 - RNA, 23 nt, Artificial Sequence
  Synthetic
cagcuccauauuuucaaugugac

SEQ ID NO: 27885 - RNA, 23 nt, Artificial Sequence
  Synthetic
agcuccauauuuucaaugugacu

SEQ ID NO: 27886 - RNA, 23 nt, Artificial Sequence
  Synthetic
gcuccauauuuucaaugugacug

SEQ ID NO: 27887 - RNA, 23 nt, Artificial Sequence
  Synthetic
cuccauauuuucaaugugacugg

SEQ ID NO: 27888 - RNA, 23 nt, Artificial Sequence
  Synthetic
uccauauuuucaaugugacuggg

SEQ ID NO: 27889 - RNA, 23 nt, Artificial Sequence
  Synthetic
ccauauuuucaaugugacugggu

SEQ ID NO: 27890 - RNA, 23 nt, Artificial Sequence
  Synthetic
cauauuuucaaugugacuggguc

SEQ ID NO: 27891 - RNA, 23 nt, Artificial Sequence
  Synthetic
auauuuucaaugugacugggucu

SEQ ID NO: 27892 - RNA, 23 nt, Artificial Sequence
  Synthetic
uauuuucaaugugacugggucuu

SEQ ID NO: 27893 - RNA, 23 nt, Artificial Sequence
  Synthetic
auuuucaaugugacugggucuua

SEQ ID NO: 27894 - RNA, 23 nt, Artificial Sequence
  Synthetic
uuuucaaugugacugggucuuau

SEQ ID NO: 27895 - RNA, 23 nt, Artificial Sequence
  Synthetic
uuucaaugugacugggucuuaua

SEQ ID NO: 27896 - RNA, 23 nt, Artificial Sequence
  Synthetic
uucaaugugacugggucuuauag

SEQ ID NO: 27897 - RNA, 23 nt, Artificial Sequence
  Synthetic
ucaaugugacugggucuuauagu

SEQ ID NO: 27898 - RNA, 23 nt, Artificial Sequence
  Synthetic
caaugugacugggucuuauagua

SEQ ID NO: 27899 - RNA, 23 nt, Artificial Sequence
  Synthetic
aaugugacugggucuuauaguac

SEQ ID NO: 27900 - RNA, 23 nt, Artificial Sequence
  Synthetic
augugacugggucuuauaguaca

SEQ ID NO: 27901 - RNA, 23 nt, Artificial Sequence
  Synthetic
ugugacugggucuuauaguacag

SEQ ID NO: 27902 - RNA, 23 nt, Artificial Sequence
  Synthetic
gugacugggucuuauaguacagg

SEQ ID NO: 27903 - RNA, 23 nt, Artificial Sequence
  Synthetic
ugacugggucuuauaguacaggc

SEQ ID NO: 27904 - RNA, 23 nt, Artificial Sequence
  Synthetic
gacugggucuuauaguacaggcu

SEQ ID NO: 27905 - RNA, 23 nt, Artificial Sequence
  Synthetic
acugggucuuauaguacaggcuu

SEQ ID NO: 27906 - RNA, 23 nt, Artificial Sequence
  Synthetic
cugggucuuauaguacaggcuug

SEQ ID NO: 27907 - RNA, 23 nt, Artificial Sequence
  Synthetic
ugggucuuauaguacaggcuugu

SEQ ID NO: 27908 - RNA, 23 nt, Artificial Sequence
  Synthetic
gggucuuauaguacaggcuugua

SEQ ID NO: 27909 - RNA, 23 nt, Artificial Sequence
  Synthetic
ggucuuauaguacaggcuuguau

SEQ ID NO: 27910 - RNA, 23 nt, Artificial Sequence
  Synthetic
gucuuauaguacaggcuuguauu

SEQ ID NO: 27911 - RNA, 23 nt, Artificial Sequence
  Synthetic
ucuuauaguacaggcuuguauuc

SEQ ID NO: 27912 - RNA, 23 nt, Artificial Sequence
  Synthetic
cuuauaguacaggcuuguauuca

SEQ ID NO: 27913 - RNA, 23 nt, Artificial Sequence
  Synthetic
uuauaguacaggcuuguauucau

SEQ ID NO: 27914 - RNA, 23 nt, Artificial Sequence
  Synthetic
uauaguacaggcuuguauucauc

SEQ ID NO: 27915 - RNA, 23 nt, Artificial Sequence
  Synthetic
auaguacaggcuuguauucauca

SEQ ID NO: 27916 - RNA, 23 nt, Artificial Sequence
  Synthetic
uaguacaggcuuguauucaucac

SEQ ID NO: 27917 - RNA, 23 nt, Artificial Sequence
  Synthetic
aguacaggcuuguauucaucaca

SEQ ID NO: 27918 - RNA, 23 nt, Artificial Sequence
  Synthetic
guacaggcuuguauucaucacag

SEQ ID NO: 27919 - RNA, 23 nt, Artificial Sequence
  Synthetic
uacaggcuuguauucaucacaga

SEQ ID NO: 27920 - RNA, 23 nt, Artificial Sequence
  Synthetic
acaggcuuguauucaucacagau

SEQ ID NO: 27921 - RNA, 23 nt, Artificial Sequence
  Synthetic
caggcuuguauucaucacagaug

SEQ ID NO: 27922 - RNA, 23 nt, Artificial Sequence
  Synthetic
aggcuuguauucaucacagaugu

SEQ ID NO: 27923 - RNA, 23 nt, Artificial Sequence
  Synthetic
ggcuuguauucaucacagauguu

SEQ ID NO: 27924 - RNA, 23 nt, Artificial Sequence
  Synthetic
gcuuguauucaucacagauguuu

SEQ ID NO: 27925 - RNA, 23 nt, Artificial Sequence
  Synthetic
cuuguauucaucacagauguuug

SEQ ID NO: 27926 - RNA, 23 nt, Artificial Sequence
  Synthetic
uuguauucaucacagauguuugg

SEQ ID NO: 27927 - RNA, 23 nt, Artificial Sequence
  Synthetic
uguauucaucacagauguuugga

SEQ ID NO: 27928 - RNA, 23 nt, Artificial Sequence
  Synthetic
guauucaucacagauguuuggaa

SEQ ID NO: 27929 - RNA, 23 nt, Artificial Sequence
  Synthetic
uauucaucacagauguuuggaac

SEQ ID NO: 27930 - RNA, 23 nt, Artificial Sequence
  Synthetic
auucaucacagauguuuggaacu

SEQ ID NO: 27931 - RNA, 23 nt, Artificial Sequence
  Synthetic
uucaucacagauguuuggaacuu

SEQ ID NO: 27932 - RNA, 23 nt, Artificial Sequence
  Synthetic
ucaucacagauguuuggaacuuc

SEQ ID NO: 27933 - RNA, 23 nt, Artificial Sequence
  Synthetic
caucacagauguuuggaacuuca

SEQ ID NO: 27934 - RNA, 23 nt, Artificial Sequence
  Synthetic
aucacagauguuuggaacuucag

SEQ ID NO: 27935 - RNA, 23 nt, Artificial Sequence
  Synthetic
ucacagauguuuggaacuucaga

SEQ ID NO: 27936 - RNA, 23 nt, Artificial Sequence
  Synthetic
cacagauguuuggaacuucagaa

SEQ ID NO: 27937 - RNA, 23 nt, Artificial Sequence
  Synthetic
acagauguuuggaacuucagaau

SEQ ID NO: 27938 - RNA, 23 nt, Artificial Sequence
  Synthetic
cagauguuuggaacuucagaaua

SEQ ID NO: 27939 - RNA, 23 nt, Artificial Sequence
  Synthetic
agauguuuggaacuucagaauaa

SEQ ID NO: 27940 - RNA, 23 nt, Artificial Sequence
  Synthetic
gauguuuggaacuucagaauaau

SEQ ID NO: 27941 - RNA, 23 nt, Artificial Sequence
  Synthetic
auguuuggaacuucagaauaaua

SEQ ID NO: 27942 - RNA, 23 nt, Artificial Sequence
  Synthetic
uguuuggaacuucagaauaauac

SEQ ID NO: 27943 - RNA, 23 nt, Artificial Sequence
  Synthetic
guuuggaacuucagaauaauaca

SEQ ID NO: 27944 - RNA, 23 nt, Artificial Sequence
  Synthetic
uuuggaacuucagaauaauacau

SEQ ID NO: 27945 - RNA, 23 nt, Artificial Sequence
  Synthetic
uuggaacuucagaauaauacaug

SEQ ID NO: 27946 - RNA, 23 nt, Artificial Sequence
  Synthetic
uggaacuucagaauaauacaugg

SEQ ID NO: 27947 - RNA, 23 nt, Artificial Sequence
  Synthetic
ggaacuucagaauaauacauggu

SEQ ID NO: 27948 - RNA, 23 nt, Artificial Sequence
  Synthetic
gaacuucagaauaauacauggug

SEQ ID NO: 27949 - RNA, 23 nt, Artificial Sequence
  Synthetic
aacuucagaauaauacauggugc

SEQ ID NO: 27950 - RNA, 23 nt, Artificial Sequence
  Synthetic
acuucagaauaauacauggugca

SEQ ID NO: 27951 - RNA, 23 nt, Artificial Sequence
  Synthetic
cuucagaauaauacauggugcaa

SEQ ID NO: 27952 - RNA, 23 nt, Artificial Sequence
  Synthetic
uucagaauaauacauggugcaaa

SEQ ID NO: 27953 - RNA, 23 nt, Artificial Sequence
  Synthetic
ucagaauaauacauggugcaaau

SEQ ID NO: 27954 - RNA, 23 nt, Artificial Sequence
  Synthetic
cagaauaauacauggugcaaauu

SEQ ID NO: 27955 - RNA, 23 nt, Artificial Sequence
  Synthetic
agaauaauacauggugcaaauuu

SEQ ID NO: 27956 - RNA, 23 nt, Artificial Sequence
  Synthetic
gaauaauacauggugcaaauuug

SEQ ID NO: 27957 - RNA, 23 nt, Artificial Sequence
  Synthetic
aauaauacauggugcaaauuugc

SEQ ID NO: 27958 - RNA, 23 nt, Artificial Sequence
  Synthetic
auaauacauggugcaaauuugca

SEQ ID NO: 27959 - RNA, 23 nt, Artificial Sequence
  Synthetic
uaauacauggugcaaauuugcau

SEQ ID NO: 27960 - RNA, 23 nt, Artificial Sequence
  Synthetic
aauacauggugcaaauuugcauu

SEQ ID NO: 27961 - RNA, 23 nt, Artificial Sequence
  Synthetic
auacauggugcaaauuugcauuu

SEQ ID NO: 27962 - RNA, 23 nt, Artificial Sequence
  Synthetic
uacauggugcaaauuugcauuua

SEQ ID NO: 27963 - RNA, 23 nt, Artificial Sequence
  Synthetic
acauggugcaaauuugcauuuac

SEQ ID NO: 27964 - RNA, 23 nt, Artificial Sequence
  Synthetic
cauggugcaaauuugcauuuacc

SEQ ID NO: 27965 - RNA, 23 nt, Artificial Sequence
  Synthetic
auggugcaaauuugcauuuaccu

SEQ ID NO: 27966 - RNA, 23 nt, Artificial Sequence
  Synthetic
uggugcaaauuugcauuuaccuu

SEQ ID NO: 27967 - RNA, 23 nt, Artificial Sequence
  Synthetic
ggugcaaauuugcauuuaccuuc

SEQ ID NO: 27968 - RNA, 23 nt, Artificial Sequence
  Synthetic
gugcaaauuugcauuuaccuucc

SEQ ID NO: 27969 - RNA, 23 nt, Artificial Sequence
  Synthetic
ugcaaauuugcauuuaccuucca

SEQ ID NO: 27970 - RNA, 23 nt, Artificial Sequence
  Synthetic
gcaaauuugcauuuaccuuccau

SEQ ID NO: 27971 - RNA, 23 nt, Artificial Sequence
  Synthetic
caaauuugcauuuaccuuccauu

SEQ ID NO: 27972 - RNA, 23 nt, Artificial Sequence
  Synthetic
aaauuugcauuuaccuuccauug

SEQ ID NO: 27973 - RNA, 23 nt, Artificial Sequence
  Synthetic
aauuugcauuuaccuuccauugu

SEQ ID NO: 27974 - RNA, 23 nt, Artificial Sequence
  Synthetic
auuugcauuuaccuuccauugua

SEQ ID NO: 27975 - RNA, 23 nt, Artificial Sequence
  Synthetic
uuugcauuuaccuuccauuguaa

SEQ ID NO: 27976 - RNA, 23 nt, Artificial Sequence
  Synthetic
uugcauuuaccuuccauuguaaa

SEQ ID NO: 27977 - RNA, 23 nt, Artificial Sequence
  Synthetic
ugcauuuaccuuccauuguaaau

SEQ ID NO: 27978 - RNA, 23 nt, Artificial Sequence
  Synthetic
gcauuuaccuuccauuguaaauc

SEQ ID NO: 27979 - RNA, 23 nt, Artificial Sequence
  Synthetic
cauuuaccuuccauuguaaauca

SEQ ID NO: 27980 - RNA, 23 nt, Artificial Sequence
  Synthetic
auuuaccuuccauuguaaaucag

SEQ ID NO: 27981 - RNA, 23 nt, Artificial Sequence
  Synthetic
uuuaccuuccauuguaaaucagu

SEQ ID NO: 27982 - RNA, 23 nt, Artificial Sequence
  Synthetic
uuaccuuccauuguaaaucaguu

SEQ ID NO: 27983 - RNA, 23 nt, Artificial Sequence
  Synthetic
uaccuuccauuguaaaucaguuc

SEQ ID NO: 27984 - RNA, 23 nt, Artificial Sequence
  Synthetic
accuuccauuguaaaucaguucc

SEQ ID NO: 27985 - RNA, 23 nt, Artificial Sequence
  Synthetic
ccuuccauuguaaaucaguucca

SEQ ID NO: 27986 - RNA, 23 nt, Artificial Sequence
  Synthetic
cuuccauuguaaaucaguuccaa

SEQ ID NO: 27987 - RNA, 23 nt, Artificial Sequence
  Synthetic
uuccauuguaaaucaguuccaau

SEQ ID NO: 27988 - RNA, 23 nt, Artificial Sequence
  Synthetic
uccauuguaaaucaguuccaaua

SEQ ID NO: 27989 - RNA, 23 nt, Artificial Sequence
  Synthetic
ccauuguaaaucaguuccaauaa

SEQ ID NO: 27990 - RNA, 23 nt, Artificial Sequence
  Synthetic
cauuguaaaucaguuccaauaaa

SEQ ID NO: 27991 - RNA, 23 nt, Artificial Sequence
  Synthetic
auuguaaaucaguuccaauaaaa

SEQ ID NO: 27992 - RNA, 23 nt, Artificial Sequence
  Synthetic
uuguaaaucaguuccaauaaaag

SEQ ID NO: 27993 - RNA, 23 nt, Artificial Sequence
  Synthetic
uguaaaucaguuccaauaaaaga

SEQ ID NO: 27994 - RNA, 23 nt, Artificial Sequence
  Synthetic
guaaaucaguuccaauaaaagau

SEQ ID NO: 27995 - RNA, 23 nt, Artificial Sequence
  Synthetic
uaaaucaguuccaauaaaagaua

SEQ ID NO: 27996 - RNA, 23 nt, Artificial Sequence
  Synthetic
aaaucaguuccaauaaaagauaa

SEQ ID NO: 27997 - RNA, 23 nt, Artificial Sequence
  Synthetic
aaucaguuccaauaaaagauaau

SEQ ID NO: 27998 - RNA, 23 nt, Artificial Sequence
  Synthetic
aucaguuccaauaaaagauaaua

SEQ ID NO: 27999 - RNA, 23 nt, Artificial Sequence
  Synthetic
ucaguuccaauaaaagauaauau

SEQ ID NO: 28000 - RNA, 23 nt, Artificial Sequence
  Synthetic
caguuccaauaaaagauaauaua

SEQ ID NO: 28001 - RNA, 23 nt, Artificial Sequence
  Synthetic
aguuccaauaaaagauaauauaa

SEQ ID NO: 28002 - RNA, 23 nt, Artificial Sequence
  Synthetic
guuccaauaaaagauaauauaaa

SEQ ID NO: 28003 - RNA, 23 nt, Artificial Sequence
  Synthetic
uuccaauaaaagauaauauaaaa

SEQ ID NO: 28004 - RNA, 23 nt, Artificial Sequence
  Synthetic
uccaauaaaagauaauauaaaag

SEQ ID NO: 28005 - RNA, 23 nt, Artificial Sequence
  Synthetic
ccaauaaaagauaauauaaaagg

SEQ ID NO: 28006 - RNA, 23 nt, Artificial Sequence
  Synthetic
caauaaaagauaauauaaaaggc

SEQ ID NO: 28007 - RNA, 23 nt, Artificial Sequence
  Synthetic
aauaaaagauaauauaaaaggca

SEQ ID NO: 28008 - RNA, 23 nt, Artificial Sequence
  Synthetic
auaaaagauaauauaaaaggcag

SEQ ID NO: 28009 - RNA, 23 nt, Artificial Sequence
  Synthetic
uaaaagauaauauaaaaggcaga

SEQ ID NO: 28010 - RNA, 23 nt, Artificial Sequence
  Synthetic
aaaagauaauauaaaaggcagag

SEQ ID NO: 28011 - RNA, 23 nt, Artificial Sequence
  Synthetic
aaagauaauauaaaaggcagagc

SEQ ID NO: 28012 - RNA, 23 nt, Artificial Sequence
  Synthetic
aagauaauauaaaaggcagagcu

SEQ ID NO: 28013 - RNA, 23 nt, Artificial Sequence
  Synthetic
agauaauauaaaaggcagagcuu

SEQ ID NO: 28014 - RNA, 23 nt, Artificial Sequence
  Synthetic
gauaauauaaaaggcagagcuuc

SEQ ID NO: 28015 - RNA, 23 nt, Artificial Sequence
  Synthetic
auaauauaaaaggcagagcuucu

SEQ ID NO: 28016 - RNA, 23 nt, Artificial Sequence
  Synthetic
uaauauaaaaggcagagcuucug

SEQ ID NO: 28017 - RNA, 23 nt, Artificial Sequence
  Synthetic
aauauaaaaggcagagcuucugc

SEQ ID NO: 28018 - RNA, 23 nt, Artificial Sequence
  Synthetic
auauaaaaggcagagcuucugcc

SEQ ID NO: 28019 - RNA, 23 nt, Artificial Sequence
  Synthetic
uauaaaaggcagagcuucugccu

SEQ ID NO: 28020 - RNA, 23 nt, Artificial Sequence
  Synthetic
auaaaaggcagagcuucugccuu

SEQ ID NO: 28021 - RNA, 23 nt, Artificial Sequence
  Synthetic
uaaaaggcagagcuucugccuug

SEQ ID NO: 28022 - RNA, 23 nt, Artificial Sequence
  Synthetic
aaaaggcagagcuucugccuugg

SEQ ID NO: 28023 - RNA, 23 nt, Artificial Sequence
  Synthetic
aaaggcagagcuucugccuugga

SEQ ID NO: 28024 - RNA, 23 nt, Artificial Sequence
  Synthetic
aaggcagagcuucugccuuggau

SEQ ID NO: 28025 - RNA, 23 nt, Artificial Sequence
  Synthetic
aggcagagcuucugccuuggauu

SEQ ID NO: 28026 - RNA, 23 nt, Artificial Sequence
  Synthetic
ggcagagcuucugccuuggauuu

SEQ ID NO: 28027 - RNA, 23 nt, Artificial Sequence
  Synthetic
gcagagcuucugccuuggauuuu

SEQ ID NO: 28028 - RNA, 23 nt, Artificial Sequence
  Synthetic
cagagcuucugccuuggauuuug

SEQ ID NO: 28029 - RNA, 23 nt, Artificial Sequence
  Synthetic
agagcuucugccuuggauuuugu

SEQ ID NO: 28030 - RNA, 23 nt, Artificial Sequence
  Synthetic
gagcuucugccuuggauuuugug

SEQ ID NO: 28031 - RNA, 23 nt, Artificial Sequence
  Synthetic
agcuucugccuuggauuuugugu

SEQ ID NO: 28032 - RNA, 23 nt, Artificial Sequence
  Synthetic
gcuucugccuuggauuuuguguu

SEQ ID NO: 28033 - RNA, 23 nt, Artificial Sequence
  Synthetic
cuucugccuuggauuuuguguuc

SEQ ID NO: 28034 - RNA, 23 nt, Artificial Sequence
  Synthetic
uucugccuuggauuuuguguucu

SEQ ID NO: 28035 - RNA, 23 nt, Artificial Sequence
  Synthetic
ucugccuuggauuuuguguucuu

SEQ ID NO: 28036 - RNA, 23 nt, Artificial Sequence
  Synthetic
cugccuuggauuuuguguucuuu

SEQ ID NO: 28037 - RNA, 23 nt, Artificial Sequence
  Synthetic
ugccuuggauuuuguguucuuua

SEQ ID NO: 28038 - RNA, 23 nt, Artificial Sequence
  Synthetic
gccuuggauuuuguguucuuuaa

SEQ ID NO: 28039 - RNA, 23 nt, Artificial Sequence
  Synthetic
ccuuggauuuuguguucuuuaaa

SEQ ID NO: 28040 - RNA, 23 nt, Artificial Sequence
  Synthetic
cuuggauuuuguguucuuuaaau

SEQ ID NO: 28041 - RNA, 23 nt, Artificial Sequence
  Synthetic
uuggauuuuguguucuuuaaauu

SEQ ID NO: 28042 - RNA, 23 nt, Artificial Sequence
  Synthetic
uggauuuuguguucuuuaaauuu

SEQ ID NO: 28043 - RNA, 23 nt, Artificial Sequence
  Synthetic
ggauuuuguguucuuuaaauuuu

SEQ ID NO: 28044 - RNA, 23 nt, Artificial Sequence
  Synthetic
gauuuuguguucuuuaaauuuuu

SEQ ID NO: 28045 - RNA, 23 nt, Artificial Sequence
  Synthetic
auuuuguguucuuuaaauuuuuu

SEQ ID NO: 28046 - RNA, 23 nt, Artificial Sequence
  Synthetic
uuuuguguucuuuaaauuuuuug

SEQ ID NO: 28047 - RNA, 23 nt, Artificial Sequence
  Synthetic
uuuguguucuuuaaauuuuuugg

SEQ ID NO: 28048 - RNA, 23 nt, Artificial Sequence
  Synthetic
uuguguucuuuaaauuuuuuggu

SEQ ID NO: 28049 - RNA, 23 nt, Artificial Sequence
  Synthetic
uguguucuuuaaauuuuuuggug

SEQ ID NO: 28050 - RNA, 23 nt, Artificial Sequence
  Synthetic
guguucuuuaaauuuuuuggugc

SEQ ID NO: 28051 - RNA, 23 nt, Artificial Sequence
  Synthetic
uguucuuuaaauuuuuuggugca

SEQ ID NO: 28052 - RNA, 23 nt, Artificial Sequence
  Synthetic
guucuuuaaauuuuuuggugcau

SEQ ID NO: 28053 - RNA, 23 nt, Artificial Sequence
  Synthetic
uucuuuaaauuuuuuggugcauu

SEQ ID NO: 28054 - RNA, 23 nt, Artificial Sequence
  Synthetic
ucuuuaaauuuuuuggugcauuc

SEQ ID NO: 28055 - RNA, 23 nt, Artificial Sequence
  Synthetic
cuuuaaauuuuuuggugcauucu

SEQ ID NO: 28056 - RNA, 23 nt, Artificial Sequence
  Synthetic
uuuaaauuuuuuggugcauucug

SEQ ID NO: 28057 - RNA, 23 nt, Artificial Sequence
  Synthetic
uuaaauuuuuuggugcauucugu

SEQ ID NO: 28058 - RNA, 23 nt, Artificial Sequence
  Synthetic
uaaauuuuuuggugcauucuguc

SEQ ID NO: 28059 - RNA, 23 nt, Artificial Sequence
  Synthetic
aaauuuuuuggugcauucugucu

SEQ ID NO: 28060 - RNA, 23 nt, Artificial Sequence
  Synthetic
aauuuuuuggugcauucugucuu

SEQ ID NO: 28061 - RNA, 23 nt, Artificial Sequence
  Synthetic
auuuuuuggugcauucugucuuu

SEQ ID NO: 28062 - RNA, 23 nt, Artificial Sequence
  Synthetic
uuuuuuggugcauucugucuuua

SEQ ID NO: 28063 - RNA, 23 nt, Artificial Sequence
  Synthetic
uuuuuggugcauucugucuuuaa

SEQ ID NO: 28064 - RNA, 23 nt, Artificial Sequence
  Synthetic
uuuuggugcauucugucuuuaaa

SEQ ID NO: 28065 - RNA, 23 nt, Artificial Sequence
  Synthetic
uuuggugcauucugucuuuaaaa

SEQ ID NO: 28066 - RNA, 23 nt, Artificial Sequence
  Synthetic
uuggugcauucugucuuuaaaau

SEQ ID NO: 28067 - RNA, 23 nt, Artificial Sequence
  Synthetic
uggugcauucugucuuuaaaaua

SEQ ID NO: 28068 - RNA, 23 nt, Artificial Sequence
  Synthetic
ggugcauucugucuuuaaaauau

SEQ ID NO: 28069 - RNA, 23 nt, Artificial Sequence
  Synthetic
gugcauucugucuuuaaaauaua

SEQ ID NO: 28070 - RNA, 23 nt, Artificial Sequence
  Synthetic
ugcauucugucuuuaaaauauaa

SEQ ID NO: 28071 - RNA, 23 nt, Artificial Sequence
  Synthetic
gcauucugucuuuaaaauauaag

SEQ ID NO: 28072 - RNA, 23 nt, Artificial Sequence
  Synthetic
cauucugucuuuaaaauauaaga

SEQ ID NO: 28073 - RNA, 23 nt, Artificial Sequence
  Synthetic
auucugucuuuaaaauauaagaa

SEQ ID NO: 28074 - RNA, 23 nt, Artificial Sequence
  Synthetic
uucugucuuuaaaauauaagaag

SEQ ID NO: 28075 - RNA, 23 nt, Artificial Sequence
  Synthetic
ucugucuuuaaaauauaagaagu

SEQ ID NO: 28076 - RNA, 23 nt, Artificial Sequence
  Synthetic
cugucuuuaaaauauaagaagua

SEQ ID NO: 28077 - RNA, 23 nt, Artificial Sequence
  Synthetic
ugucuuuaaaauauaagaaguac

SEQ ID NO: 28078 - RNA, 23 nt, Artificial Sequence
  Synthetic
gucuuuaaaauauaagaaguacc

SEQ ID NO: 28079 - RNA, 23 nt, Artificial Sequence
  Synthetic
ucuuuaaaauauaagaaguaccu

SEQ ID NO: 28080 - RNA, 23 nt, Artificial Sequence
  Synthetic
cuuuaaaauauaagaaguaccuc

SEQ ID NO: 28081 - RNA, 23 nt, Artificial Sequence
  Synthetic
uuuaaaauauaagaaguaccuca

SEQ ID NO: 28082 - RNA, 23 nt, Artificial Sequence
  Synthetic
uuaaaauauaagaaguaccucac

SEQ ID NO: 28083 - RNA, 23 nt, Artificial Sequence
  Synthetic
uaaaauauaagaaguaccucacu

SEQ ID NO: 28084 - RNA, 23 nt, Artificial Sequence
  Synthetic
aaaauauaagaaguaccucacua

SEQ ID NO: 28085 - RNA, 23 nt, Artificial Sequence
  Synthetic
aaauauaagaaguaccucacuau

SEQ ID NO: 28086 - RNA, 23 nt, Artificial Sequence
  Synthetic
aauauaagaaguaccucacuaua

SEQ ID NO: 28087 - RNA, 23 nt, Artificial Sequence
  Synthetic
auauaagaaguaccucacuauau

SEQ ID NO: 28088 - RNA, 23 nt, Artificial Sequence
  Synthetic
uauaagaaguaccucacuauauu

SEQ ID NO: 28089 - RNA, 23 nt, Artificial Sequence
  Synthetic
auaagaaguaccucacuauauuc

SEQ ID NO: 28090 - RNA, 23 nt, Artificial Sequence
  Synthetic
uaagaaguaccucacuauauuca

SEQ ID NO: 28091 - RNA, 23 nt, Artificial Sequence
  Synthetic
aagaaguaccucacuauauucag

SEQ ID NO: 28092 - RNA, 23 nt, Artificial Sequence
  Synthetic
agaaguaccucacuauauucagu

SEQ ID NO: 28093 - RNA, 23 nt, Artificial Sequence
  Synthetic
gaaguaccucacuauauucagug

SEQ ID NO: 28094 - RNA, 23 nt, Artificial Sequence
  Synthetic
aaguaccucacuauauucagugu

SEQ ID NO: 28095 - RNA, 23 nt, Artificial Sequence
  Synthetic
aguaccucacuauauucagugua

SEQ ID NO: 28096 - RNA, 23 nt, Artificial Sequence
  Synthetic
guaccucacuauauucaguguaa

SEQ ID NO: 28097 - RNA, 23 nt, Artificial Sequence
  Synthetic
uaccucacuauauucaguguaac

SEQ ID NO: 28098 - RNA, 23 nt, Artificial Sequence
  Synthetic
accucacuauauucaguguaaca

SEQ ID NO: 28099 - RNA, 23 nt, Artificial Sequence
  Synthetic
ccucacuauauucaguguaacac

SEQ ID NO: 28100 - RNA, 23 nt, Artificial Sequence
  Synthetic
cucacuauauucaguguaacacu

SEQ ID NO: 28101 - RNA, 23 nt, Artificial Sequence
  Synthetic
ucacuauauucaguguaacacuc

SEQ ID NO: 28102 - RNA, 23 nt, Artificial Sequence
  Synthetic
cacuauauucaguguaacacuca

SEQ ID NO: 28103 - RNA, 23 nt, Artificial Sequence
  Synthetic
acuauauucaguguaacacucaa

SEQ ID NO: 28104 - RNA, 23 nt, Artificial Sequence
  Synthetic
cuauauucaguguaacacucaac

SEQ ID NO: 28105 - RNA, 23 nt, Artificial Sequence
  Synthetic
uauauucaguguaacacucaacc

SEQ ID NO: 28106 - RNA, 23 nt, Artificial Sequence
  Synthetic
auauucaguguaacacucaaccg

SEQ ID NO: 28107 - RNA, 23 nt, Artificial Sequence
  Synthetic
uauucaguguaacacucaaccgu

SEQ ID NO: 28108 - RNA, 23 nt, Artificial Sequence
  Synthetic
auucaguguaacacucaaccguc

SEQ ID NO: 28109 - RNA, 23 nt, Artificial Sequence
  Synthetic
uucaguguaacacucaaccgucc

SEQ ID NO: 28110 - RNA, 23 nt, Artificial Sequence
  Synthetic
ucaguguaacacucaaccguccc

SEQ ID NO: 28111 - RNA, 23 nt, Artificial Sequence
  Synthetic
caguguaacacucaaccgucccu

SEQ ID NO: 28112 - RNA, 23 nt, Artificial Sequence
  Synthetic
aguguaacacucaaccgucccug

SEQ ID NO: 28113 - RNA, 23 nt, Artificial Sequence
  Synthetic
guguaacacucaaccgucccugu

SEQ ID NO: 28114 - RNA, 23 nt, Artificial Sequence
  Synthetic
uguaacacucaaccgucccuguc

SEQ ID NO: 28115 - RNA, 23 nt, Artificial Sequence
  Synthetic
guaacacucaaccgucccuguca

SEQ ID NO: 28116 - RNA, 23 nt, Artificial Sequence
  Synthetic
uaacacucaaccgucccugucau

SEQ ID NO: 28117 - RNA, 23 nt, Artificial Sequence
  Synthetic
aacacucaaccgucccugucaug

SEQ ID NO: 28118 - RNA, 23 nt, Artificial Sequence
  Synthetic
acacucaaccgucccugucauga

SEQ ID NO: 28119 - RNA, 23 nt, Artificial Sequence
  Synthetic
cacucaaccgucccugucaugag

SEQ ID NO: 28120 - RNA, 23 nt, Artificial Sequence
  Synthetic
acucaaccgucccugucaugagc

SEQ ID NO: 28121 - RNA, 23 nt, Artificial Sequence
  Synthetic
cucaaccgucccugucaugagcu

SEQ ID NO: 28122 - RNA, 23 nt, Artificial Sequence
  Synthetic
ucaaccgucccugucaugagcug

SEQ ID NO: 28123 - RNA, 23 nt, Artificial Sequence
  Synthetic
caaccgucccugucaugagcugg

SEQ ID NO: 28124 - RNA, 23 nt, Artificial Sequence
  Synthetic
aaccgucccugucaugagcuggg

SEQ ID NO: 28125 - RNA, 23 nt, Artificial Sequence
  Synthetic
accgucccugucaugagcugggu

SEQ ID NO: 28126 - RNA, 23 nt, Artificial Sequence
  Synthetic
ccgucccugucaugagcugggug

SEQ ID NO: 28127 - RNA, 23 nt, Artificial Sequence
  Synthetic
cgucccugucaugagcuggguga

SEQ ID NO: 28128 - RNA, 23 nt, Artificial Sequence
  Synthetic
gucccugucaugagcugggugac

SEQ ID NO: 28129 - RNA, 23 nt, Artificial Sequence
  Synthetic
ucccugucaugagcugggugacc

SEQ ID NO: 28130 - RNA, 23 nt, Artificial Sequence
  Synthetic
cccugucaugagcugggugaccu

SEQ ID NO: 28131 - RNA, 23 nt, Artificial Sequence
  Synthetic
ccugucaugagcugggugaccuu

SEQ ID NO: 28132 - RNA, 23 nt, Artificial Sequence
  Synthetic
cugucaugagcugggugaccuug

SEQ ID NO: 28133 - RNA, 23 nt, Artificial Sequence
  Synthetic
ugucaugagcugggugaccuugg

SEQ ID NO: 28134 - RNA, 23 nt, Artificial Sequence
  Synthetic
gucaugagcugggugaccuuggu

SEQ ID NO: 28135 - RNA, 23 nt, Artificial Sequence
  Synthetic
ucaugagcugggugaccuugguc

SEQ ID NO: 28136 - RNA, 23 nt, Artificial Sequence
  Synthetic
caugagcugggugaccuugguca

SEQ ID NO: 28137 - RNA, 23 nt, Artificial Sequence
  Synthetic
augagcugggugaccuuggucau

SEQ ID NO: 28138 - RNA, 23 nt, Artificial Sequence
  Synthetic
ugagcugggugaccuuggucauu

SEQ ID NO: 28139 - RNA, 23 nt, Artificial Sequence
  Synthetic
gagcugggugaccuuggucauuc

SEQ ID NO: 28140 - RNA, 23 nt, Artificial Sequence
  Synthetic
agcugggugaccuuggucauuca

SEQ ID NO: 28141 - RNA, 23 nt, Artificial Sequence
  Synthetic
gcugggugaccuuggucauucau

SEQ ID NO: 28142 - RNA, 23 nt, Artificial Sequence
  Synthetic
cugggugaccuuggucauucauu

SEQ ID NO: 28143 - RNA, 23 nt, Artificial Sequence
  Synthetic
ugggugaccuuggucauucauuu

SEQ ID NO: 28144 - RNA, 23 nt, Artificial Sequence
  Synthetic
gggugaccuuggucauucauuua

SEQ ID NO: 28145 - RNA, 23 nt, Artificial Sequence
  Synthetic
ggugaccuuggucauucauuuau

SEQ ID NO: 28146 - RNA, 23 nt, Artificial Sequence
  Synthetic
gugaccuuggucauucauuuauc

SEQ ID NO: 28147 - RNA, 23 nt, Artificial Sequence
  Synthetic
ugaccuuggucauucauuuaucc

SEQ ID NO: 28148 - RNA, 23 nt, Artificial Sequence
  Synthetic
gaccuuggucauucauuuauccu

SEQ ID NO: 28149 - RNA, 23 nt, Artificial Sequence
  Synthetic
accuuggucauucauuuauccuc

SEQ ID NO: 28150 - RNA, 23 nt, Artificial Sequence
  Synthetic
ccuuggucauucauuuauccucu

SEQ ID NO: 28151 - RNA, 23 nt, Artificial Sequence
  Synthetic
cuuggucauucauuuauccucug

SEQ ID NO: 28152 - RNA, 23 nt, Artificial Sequence
  Synthetic
uuggucauucauuuauccucugg

SEQ ID NO: 28153 - RNA, 23 nt, Artificial Sequence
  Synthetic
uggucauucauuuauccucuggu

SEQ ID NO: 28154 - RNA, 23 nt, Artificial Sequence
  Synthetic
ggucauucauuuauccucuggug

SEQ ID NO: 28155 - RNA, 23 nt, Artificial Sequence
  Synthetic
gucauucauuuauccucuggugg

SEQ ID NO: 28156 - RNA, 23 nt, Artificial Sequence
  Synthetic
ucauucauuuauccucugguggg

SEQ ID NO: 28157 - RNA, 23 nt, Artificial Sequence
  Synthetic
cauucauuuauccucuggugggc

SEQ ID NO: 28158 - RNA, 23 nt, Artificial Sequence
  Synthetic
auucauuuauccucuggugggcu

SEQ ID NO: 28159 - RNA, 23 nt, Artificial Sequence
  Synthetic
uucauuuauccucuggugggcuc

SEQ ID NO: 28160 - RNA, 23 nt, Artificial Sequence
  Synthetic
ucauuuauccucuggugggcuca

SEQ ID NO: 28161 - RNA, 23 nt, Artificial Sequence
  Synthetic
cauuuauccucuggugggcucaa

SEQ ID NO: 28162 - RNA, 23 nt, Artificial Sequence
  Synthetic
auuuauccucuggugggcucaaa

SEQ ID NO: 28163 - RNA, 23 nt, Artificial Sequence
  Synthetic
uuuauccucuggugggcucaaau

SEQ ID NO: 28164 - RNA, 23 nt, Artificial Sequence
  Synthetic
uuauccucuggugggcucaaauu

SEQ ID NO: 28165 - RNA, 23 nt, Artificial Sequence
  Synthetic
uauccucuggugggcucaaauua

SEQ ID NO: 28166 - RNA, 23 nt, Artificial Sequence
  Synthetic
auccucuggugggcucaaauuau

SEQ ID NO: 28167 - RNA, 23 nt, Artificial Sequence
  Synthetic
uccucuggugggcucaaauuauu

SEQ ID NO: 28168 - RNA, 23 nt, Artificial Sequence
  Synthetic
ccucuggugggcucaaauuauuc

SEQ ID NO: 28169 - RNA, 23 nt, Artificial Sequence
  Synthetic
cucuggugggcucaaauuauuca

SEQ ID NO: 28170 - RNA, 23 nt, Artificial Sequence
  Synthetic
ucuggugggcucaaauuauucau

SEQ ID NO: 28171 - RNA, 23 nt, Artificial Sequence
  Synthetic
cuggugggcucaaauuauucauc

SEQ ID NO: 28172 - RNA, 23 nt, Artificial Sequence
  Synthetic
uggugggcucaaauuauucauca

SEQ ID NO: 28173 - RNA, 23 nt, Artificial Sequence
  Synthetic
ggugggcucaaauuauucaucag

SEQ ID NO: 28174 - RNA, 23 nt, Artificial Sequence
  Synthetic
gugggcucaaauuauucaucagu

SEQ ID NO: 28175 - RNA, 23 nt, Artificial Sequence
  Synthetic
ugggcucaaauuauucaucagua

SEQ ID NO: 28176 - RNA, 23 nt, Artificial Sequence
  Synthetic
gggcucaaauuauucaucaguaa

SEQ ID NO: 28177 - RNA, 23 nt, Artificial Sequence
  Synthetic
ggcucaaauuauucaucaguaaa

SEQ ID NO: 28178 - RNA, 23 nt, Artificial Sequence
  Synthetic
gcucaaauuauucaucaguaaaa

SEQ ID NO: 28179 - RNA, 23 nt, Artificial Sequence
  Synthetic
cucaaauuauucaucaguaaaau

SEQ ID NO: 28180 - RNA, 23 nt, Artificial Sequence
  Synthetic
ucaaauuauucaucaguaaaaua

SEQ ID NO: 28181 - RNA, 23 nt, Artificial Sequence
  Synthetic
caaauuauucaucaguaaaauaa

SEQ ID NO: 28182 - RNA, 23 nt, Artificial Sequence
  Synthetic
aaauuauucaucaguaaaauaac

SEQ ID NO: 28183 - RNA, 23 nt, Artificial Sequence
  Synthetic
aauuauucaucaguaaaauaacg

SEQ ID NO: 28184 - RNA, 23 nt, Artificial Sequence
  Synthetic
auuauucaucaguaaaauaacga

SEQ ID NO: 28185 - RNA, 23 nt, Artificial Sequence
  Synthetic
uuauucaucaguaaaauaacgag

SEQ ID NO: 28186 - RNA, 23 nt, Artificial Sequence
  Synthetic
uauucaucaguaaaauaacgagc

SEQ ID NO: 28187 - RNA, 23 nt, Artificial Sequence
  Synthetic
auucaucaguaaaauaacgagcc

SEQ ID NO: 28188 - RNA, 23 nt, Artificial Sequence
  Synthetic
uucaucaguaaaauaacgagccu

SEQ ID NO: 28189 - RNA, 23 nt, Artificial Sequence
  Synthetic
ucaucaguaaaauaacgagccug

SEQ ID NO: 28190 - RNA, 23 nt, Artificial Sequence
  Synthetic
caucaguaaaauaacgagccugu

SEQ ID NO: 28191 - RNA, 23 nt, Artificial Sequence
  Synthetic
aucaguaaaauaacgagccugua

SEQ ID NO: 28192 - RNA, 23 nt, Artificial Sequence
  Synthetic
ucaguaaaauaacgagccuguac

SEQ ID NO: 28193 - RNA, 23 nt, Artificial Sequence
  Synthetic
caguaaaauaacgagccuguaca

SEQ ID NO: 28194 - RNA, 23 nt, Artificial Sequence
  Synthetic
aguaaaauaacgagccuguacaa

SEQ ID NO: 28195 - RNA, 23 nt, Artificial Sequence
  Synthetic
guaaaauaacgagccuguacaaa

SEQ ID NO: 28196 - RNA, 23 nt, Artificial Sequence
  Synthetic
uaaaauaacgagccuguacaaau

SEQ ID NO: 28197 - RNA, 23 nt, Artificial Sequence
  Synthetic
aaaauaacgagccuguacaaaua

SEQ ID NO: 28198 - RNA, 23 nt, Artificial Sequence
  Synthetic
aaauaacgagccuguacaaauaa

SEQ ID NO: 28199 - RNA, 23 nt, Artificial Sequence
  Synthetic
aauaacgagccuguacaaauaaa

SEQ ID NO: 28200 - RNA, 23 nt, Artificial Sequence
  Synthetic
auaacgagccuguacaaauaaaa

SEQ ID NO: 28201 - RNA, 23 nt, Artificial Sequence
  Synthetic
uaacgagccuguacaaauaaaau

SEQ ID NO: 28202 - RNA, 23 nt, Artificial Sequence
  Synthetic
aacgagccuguacaaauaaaaug

SEQ ID NO: 28203 - RNA, 23 nt, Artificial Sequence
  Synthetic
acgagccuguacaaauaaaaugu

SEQ ID NO: 28204 - RNA, 23 nt, Artificial Sequence
  Synthetic
cgagccuguacaaauaaaaugua

SEQ ID NO: 28205 - RNA, 23 nt, Artificial Sequence
  Synthetic
gagccuguacaaauaaaauguaa

SEQ ID NO: 28206 - RNA, 23 nt, Artificial Sequence
  Synthetic
agccuguacaaauaaaauguaau

SEQ ID NO: 28207 - RNA, 23 nt, Artificial Sequence
  Synthetic
gccuguacaaauaaaauguaauu

SEQ ID NO: 28208 - RNA, 23 nt, Artificial Sequence
  Synthetic
ccuguacaaauaaaauguaauuu

SEQ ID NO: 28209 - RNA, 23 nt, Artificial Sequence
  Synthetic
cuguacaaauaaaauguaauuuu

SEQ ID NO: 28210 - RNA, 23 nt, Artificial Sequence
  Synthetic
uguacaaauaaaauguaauuuuu

SEQ ID NO: 28211 - RNA, 23 nt, Artificial Sequence
  Synthetic
guacaaauaaaauguaauuuuuu

SEQ ID NO: 28212 - RNA, 23 nt, Artificial Sequence
  Synthetic
uacaaauaaaauguaauuuuuuu

SEQ ID NO: 28213 - RNA, 23 nt, Artificial Sequence
  Synthetic
acaaauaaaauguaauuuuuuuc

SEQ ID NO: 28214 - RNA, 23 nt, Artificial Sequence
  Synthetic
caaauaaaauguaauuuuuuuca

SEQ ID NO: 28215 - RNA, 23 nt, Artificial Sequence
  Synthetic
aaauaaaauguaauuuuuuucac

SEQ ID NO: 28216 - RNA, 23 nt, Artificial Sequence
  Synthetic
aauaaaauguaauuuuuuucaca

SEQ ID NO: 28217 - RNA, 23 nt, Artificial Sequence
  Synthetic
auaaaauguaauuuuuuucacau

SEQ ID NO: 28218 - RNA, 23 nt, Artificial Sequence
  Synthetic
uaaaauguaauuuuuuucacauc

SEQ ID NO: 28219 - RNA, 23 nt, Artificial Sequence
  Synthetic
aaaauguaauuuuuuucacauca

SEQ ID NO: 28220 - RNA, 23 nt, Artificial Sequence
  Synthetic
aaauguaauuuuuuucacaucag

SEQ ID NO: 28221 - RNA, 23 nt, Artificial Sequence
  Synthetic
aauguaauuuuuuucacaucaga

SEQ ID NO: 28222 - RNA, 23 nt, Artificial Sequence
  Synthetic
auguaauuuuuuucacaucagau

SEQ ID NO: 28223 - RNA, 23 nt, Artificial Sequence
  Synthetic
uguaauuuuuuucacaucagaug

SEQ ID NO: 28224 - RNA, 23 nt, Artificial Sequence
  Synthetic
guaauuuuuuucacaucagaugg

SEQ ID NO: 28225 - RNA, 23 nt, Artificial Sequence
  Synthetic
uaauuuuuuucacaucagauggg

SEQ ID NO: 28226 - RNA, 23 nt, Artificial Sequence
  Synthetic
aauuuuuuucacaucagaugggu

SEQ ID NO: 28227 - RNA, 23 nt, Artificial Sequence
  Synthetic
auuuuuuucacaucagaugggua

SEQ ID NO: 28228 - RNA, 23 nt, Artificial Sequence
  Synthetic
uuuuuuucacaucagauggguaa

SEQ ID NO: 28229 - RNA, 23 nt, Artificial Sequence
  Synthetic
uuuuuucacaucagauggguaac

SEQ ID NO: 28230 - RNA, 23 nt, Artificial Sequence
  Synthetic
uuuuucacaucagauggguaacg

SEQ ID NO: 28231 - RNA, 23 nt, Artificial Sequence
  Synthetic
uuuucacaucagauggguaacgu

SEQ ID NO: 28232 - RNA, 23 nt, Artificial Sequence
  Synthetic
uuucacaucagauggguaacgug

SEQ ID NO: 28233 - RNA, 23 nt, Artificial Sequence
  Synthetic
uucacaucagauggguaacgugc

SEQ ID NO: 28234 - RNA, 23 nt, Artificial Sequence
  Synthetic
ucacaucagauggguaacgugcc

SEQ ID NO: 28235 - RNA, 23 nt, Artificial Sequence
  Synthetic
cacaucagauggguaacgugcca

SEQ ID NO: 28236 - RNA, 23 nt, Artificial Sequence
  Synthetic
acaucagauggguaacgugccaa

SEQ ID NO: 28237 - RNA, 23 nt, Artificial Sequence
  Synthetic
caucagauggguaacgugccaaa

SEQ ID NO: 28238 - RNA, 23 nt, Artificial Sequence
  Synthetic
aucagauggguaacgugccaaau

SEQ ID NO: 28239 - RNA, 23 nt, Artificial Sequence
  Synthetic
ucagauggguaacgugccaaauc

SEQ ID NO: 28240 - RNA, 23 nt, Artificial Sequence
  Synthetic
cagauggguaacgugccaaauca

SEQ ID NO: 28241 - RNA, 23 nt, Artificial Sequence
  Synthetic
agauggguaacgugccaaaucau

SEQ ID NO: 28242 - RNA, 23 nt, Artificial Sequence
  Synthetic
gauggguaacgugccaaaucaua

SEQ ID NO: 28243 - RNA, 23 nt, Artificial Sequence
  Synthetic
auggguaacgugccaaaucauaa

SEQ ID NO: 28244 - RNA, 23 nt, Artificial Sequence
  Synthetic
uggguaacgugccaaaucauaac

SEQ ID NO: 28245 - RNA, 23 nt, Artificial Sequence
  Synthetic
ggguaacgugccaaaucauaaca

SEQ ID NO: 28246 - RNA, 23 nt, Artificial Sequence
  Synthetic
gguaacgugccaaaucauaacaa

SEQ ID NO: 28247 - RNA, 23 nt, Artificial Sequence
  Synthetic
guaacgugccaaaucauaacaag

SEQ ID NO: 28248 - RNA, 23 nt, Artificial Sequence
  Synthetic
uaacgugccaaaucauaacaagg

SEQ ID NO: 28249 - RNA, 23 nt, Artificial Sequence
  Synthetic
aacgugccaaaucauaacaaggu

SEQ ID NO: 28250 - RNA, 23 nt, Artificial Sequence
  Synthetic
acgugccaaaucauaacaagguu

SEQ ID NO: 28251 - RNA, 23 nt, Artificial Sequence
  Synthetic
cgugccaaaucauaacaagguuu

SEQ ID NO: 28252 - RNA, 23 nt, Artificial Sequence
  Synthetic
gugccaaaucauaacaagguuug

SEQ ID NO: 28253 - RNA, 23 nt, Artificial Sequence
  Synthetic
ugccaaaucauaacaagguuuga

SEQ ID NO: 28254 - RNA, 23 nt, Artificial Sequence
  Synthetic
gccaaaucauaacaagguuugag

SEQ ID NO: 28255 - RNA, 23 nt, Artificial Sequence
  Synthetic
ccaaaucauaacaagguuugagc

SEQ ID NO: 28256 - RNA, 23 nt, Artificial Sequence
  Synthetic
caaaucauaacaagguuugagcg

SEQ ID NO: 28257 - RNA, 23 nt, Artificial Sequence
  Synthetic
aaaucauaacaagguuugagcga

SEQ ID NO: 28258 - RNA, 23 nt, Artificial Sequence
  Synthetic
aaucauaacaagguuugagcgag

SEQ ID NO: 28259 - RNA, 23 nt, Artificial Sequence
  Synthetic
aucauaacaagguuugagcgagg

SEQ ID NO: 28260 - RNA, 23 nt, Artificial Sequence
  Synthetic
ucauaacaagguuugagcgaggc

SEQ ID NO: 28261 - RNA, 23 nt, Artificial Sequence
  Synthetic
cauaacaagguuugagcgaggca

SEQ ID NO: 28262 - RNA, 23 nt, Artificial Sequence
  Synthetic
auaacaagguuugagcgaggcac

SEQ ID NO: 28263 - RNA, 23 nt, Artificial Sequence
  Synthetic
uaacaagguuugagcgaggcaca

SEQ ID NO: 28264 - RNA, 23 nt, Artificial Sequence
  Synthetic
aacaagguuugagcgaggcacau

SEQ ID NO: 28265 - RNA, 23 nt, Artificial Sequence
  Synthetic
acaagguuugagcgaggcacauc

SEQ ID NO: 28266 - RNA, 23 nt, Artificial Sequence
  Synthetic
caagguuugagcgaggcacaucu

SEQ ID NO: 28267 - RNA, 23 nt, Artificial Sequence
  Synthetic
aagguuugagcgaggcacaucuc

SEQ ID NO: 28268 - RNA, 23 nt, Artificial Sequence
  Synthetic
agguuugagcgaggcacaucuca

SEQ ID NO: 28269 - RNA, 23 nt, Artificial Sequence
  Synthetic
gguuugagcgaggcacaucucac

SEQ ID NO: 28270 - RNA, 23 nt, Artificial Sequence
  Synthetic
guuugagcgaggcacaucucaca

SEQ ID NO: 28271 - RNA, 23 nt, Artificial Sequence
  Synthetic
uuugagcgaggcacaucucacac

SEQ ID NO: 28272 - RNA, 23 nt, Artificial Sequence
  Synthetic
uugagcgaggcacaucucacaca

SEQ ID NO: 28273 - RNA, 23 nt, Artificial Sequence
  Synthetic
ugagcgaggcacaucucacacau

SEQ ID NO: 28274 - RNA, 23 nt, Artificial Sequence
  Synthetic
gagcgaggcacaucucacacaug

SEQ ID NO: 28275 - RNA, 23 nt, Artificial Sequence
  Synthetic
agcgaggcacaucucacacaugg

SEQ ID NO: 28276 - RNA, 23 nt, Artificial Sequence
  Synthetic
gcgaggcacaucucacacauggg

SEQ ID NO: 28277 - RNA, 23 nt, Artificial Sequence
  Synthetic
cgaggcacaucucacacaugggc

SEQ ID NO: 28278 - RNA, 23 nt, Artificial Sequence
  Synthetic
gaggcacaucucacacaugggca

SEQ ID NO: 28279 - RNA, 23 nt, Artificial Sequence
  Synthetic
aggcacaucucacacaugggcau

SEQ ID NO: 28280 - RNA, 23 nt, Artificial Sequence
  Synthetic
ggcacaucucacacaugggcaug

SEQ ID NO: 28281 - RNA, 23 nt, Artificial Sequence
  Synthetic
gcacaucucacacaugggcauga

SEQ ID NO: 28282 - RNA, 23 nt, Artificial Sequence
  Synthetic
cacaucucacacaugggcaugaa

SEQ ID NO: 28283 - RNA, 23 nt, Artificial Sequence
  Synthetic
acaucucacacaugggcaugaaa

SEQ ID NO: 28284 - RNA, 23 nt, Artificial Sequence
  Synthetic
caucucacacaugggcaugaaaa

SEQ ID NO: 28285 - RNA, 23 nt, Artificial Sequence
  Synthetic
aucucacacaugggcaugaaaac

SEQ ID NO: 28286 - RNA, 23 nt, Artificial Sequence
  Synthetic
ucucacacaugggcaugaaaacc

SEQ ID NO: 28287 - RNA, 23 nt, Artificial Sequence
  Synthetic
cucacacaugggcaugaaaaccc

SEQ ID NO: 28288 - RNA, 23 nt, Artificial Sequence
  Synthetic
ucacacaugggcaugaaaaccca

SEQ ID NO: 28289 - RNA, 23 nt, Artificial Sequence
  Synthetic
cacacaugggcaugaaaacccaa

SEQ ID NO: 28290 - RNA, 23 nt, Artificial Sequence
  Synthetic
acacaugggcaugaaaacccaau

SEQ ID NO: 28291 - RNA, 23 nt, Artificial Sequence
  Synthetic
cacaugggcaugaaaacccaauc

SEQ ID NO: 28292 - RNA, 23 nt, Artificial Sequence
  Synthetic
acaugggcaugaaaacccaauca

SEQ ID NO: 28293 - RNA, 23 nt, Artificial Sequence
  Synthetic
caugggcaugaaaacccaaucau

SEQ ID NO: 28294 - RNA, 23 nt, Artificial Sequence
  Synthetic
augggcaugaaaacccaaucauc

SEQ ID NO: 28295 - RNA, 23 nt, Artificial Sequence
  Synthetic
ugggcaugaaaacccaaucaucg

SEQ ID NO: 28296 - RNA, 23 nt, Artificial Sequence
  Synthetic
gggcaugaaaacccaaucaucgc

SEQ ID NO: 28297 - RNA, 23 nt, Artificial Sequence
  Synthetic
ggcaugaaaacccaaucaucgcu

SEQ ID NO: 28298 - RNA, 23 nt, Artificial Sequence
  Synthetic
gcaugaaaacccaaucaucgcuu

SEQ ID NO: 28299 - RNA, 23 nt, Artificial Sequence
  Synthetic
caugaaaacccaaucaucgcuua

SEQ ID NO: 28300 - RNA, 23 nt, Artificial Sequence
  Synthetic
augaaaacccaaucaucgcuuau

SEQ ID NO: 28301 - RNA, 23 nt, Artificial Sequence
  Synthetic
ugaaaacccaaucaucgcuuaug

SEQ ID NO: 28302 - RNA, 23 nt, Artificial Sequence
  Synthetic
gaaaacccaaucaucgcuuauga

SEQ ID NO: 28303 - RNA, 23 nt, Artificial Sequence
  Synthetic
aaaacccaaucaucgcuuaugaa

SEQ ID NO: 28304 - RNA, 23 nt, Artificial Sequence
  Synthetic
aaacccaaucaucgcuuaugaaa

SEQ ID NO: 28305 - RNA, 23 nt, Artificial Sequence
  Synthetic
aacccaaucaucgcuuaugaaac

SEQ ID NO: 28306 - RNA, 23 nt, Artificial Sequence
  Synthetic
acccaaucaucgcuuaugaaacu

SEQ ID NO: 28307 - RNA, 23 nt, Artificial Sequence
  Synthetic
cccaaucaucgcuuaugaaacua

SEQ ID NO: 28308 - RNA, 23 nt, Artificial Sequence
  Synthetic
ccaaucaucgcuuaugaaacuaa

SEQ ID NO: 28309 - RNA, 23 nt, Artificial Sequence
  Synthetic
caaucaucgcuuaugaaacuaac

SEQ ID NO: 28310 - RNA, 23 nt, Artificial Sequence
  Synthetic
aaucaucgcuuaugaaacuaaca

SEQ ID NO: 28311 - RNA, 23 nt, Artificial Sequence
  Synthetic
aucaucgcuuaugaaacuaacau

SEQ ID NO: 28312 - RNA, 23 nt, Artificial Sequence
  Synthetic
ucaucgcuuaugaaacuaacauu

SEQ ID NO: 28313 - RNA, 23 nt, Artificial Sequence
  Synthetic
caucgcuuaugaaacuaacauuu

SEQ ID NO: 28314 - RNA, 23 nt, Artificial Sequence
  Synthetic
aucgcuuaugaaacuaacauuuc

SEQ ID NO: 28315 - RNA, 23 nt, Artificial Sequence
  Synthetic
ucgcuuaugaaacuaacauuuca

SEQ ID NO: 28316 - RNA, 23 nt, Artificial Sequence
  Synthetic
cgcuuaugaaacuaacauuucaa

SEQ ID NO: 28317 - RNA, 23 nt, Artificial Sequence
  Synthetic
gcuuaugaaacuaacauuucaau

SEQ ID NO: 28318 - RNA, 23 nt, Artificial Sequence
  Synthetic
cuuaugaaacuaacauuucaaua

SEQ ID NO: 28319 - RNA, 23 nt, Artificial Sequence
  Synthetic
uuaugaaacuaacauuucaauag

SEQ ID NO: 28320 - RNA, 23 nt, Artificial Sequence
  Synthetic
uaugaaacuaacauuucaauaga

SEQ ID NO: 28321 - RNA, 23 nt, Artificial Sequence
  Synthetic
augaaacuaacauuucaauagaa

SEQ ID NO: 28322 - RNA, 23 nt, Artificial Sequence
  Synthetic
ugaaacuaacauuucaauagaaa

SEQ ID NO: 28323 - RNA, 23 nt, Artificial Sequence
  Synthetic
gaaacuaacauuucaauagaaau

SEQ ID NO: 28324 - RNA, 23 nt, Artificial Sequence
  Synthetic
aaacuaacauuucaauagaaaua

SEQ ID NO: 28325 - RNA, 23 nt, Artificial Sequence
  Synthetic
aacuaacauuucaauagaaauac

SEQ ID NO: 28326 - RNA, 23 nt, Artificial Sequence
  Synthetic
acuaacauuucaauagaaauaca

SEQ ID NO: 28327 - RNA, 23 nt, Artificial Sequence
  Synthetic
cuaacauuucaauagaaauacau

SEQ ID NO: 28328 - RNA, 23 nt, Artificial Sequence
  Synthetic
uaacauuucaauagaaauacauu

SEQ ID NO: 28329 - RNA, 23 nt, Artificial Sequence
  Synthetic
aacauuucaauagaaauacauua

SEQ ID NO: 28330 - RNA, 23 nt, Artificial Sequence
  Synthetic
acauuucaauagaaauacauuau

SEQ ID NO: 28331 - RNA, 23 nt, Artificial Sequence
  Synthetic
cauuucaauagaaauacauuaug

SEQ ID NO: 28332 - RNA, 23 nt, Artificial Sequence
  Synthetic
auuucaauagaaauacauuauga

SEQ ID NO: 28333 - RNA, 23 nt, Artificial Sequence
  Synthetic
uuucaauagaaauacauuaugaa

SEQ ID NO: 28334 - RNA, 23 nt, Artificial Sequence
  Synthetic
uucaauagaaauacauuaugaaa

SEQ ID NO: 28335 - RNA, 23 nt, Artificial Sequence
  Synthetic
ucaauagaaauacauuaugaaag

SEQ ID NO: 28336 - RNA, 23 nt, Artificial Sequence
  Synthetic
caauagaaauacauuaugaaagu

SEQ ID NO: 28337 - RNA, 23 nt, Artificial Sequence
  Synthetic
aauagaaauacauuaugaaaguu

SEQ ID NO: 28338 - RNA, 23 nt, Artificial Sequence
  Synthetic
auagaaauacauuaugaaaguuc

SEQ ID NO: 28339 - RNA, 23 nt, Artificial Sequence
  Synthetic
uagaaauacauuaugaaaguucu

SEQ ID NO: 28340 - RNA, 23 nt, Artificial Sequence
  Synthetic
agaaauacauuaugaaaguucug

SEQ ID NO: 28341 - RNA, 23 nt, Artificial Sequence
  Synthetic
gaaauacauuaugaaaguucugg

SEQ ID NO: 28342 - RNA, 23 nt, Artificial Sequence
  Synthetic
aaauacauuaugaaaguucuggu

SEQ ID NO: 28343 - RNA, 23 nt, Artificial Sequence
  Synthetic
aauacauuaugaaaguucugguu

SEQ ID NO: 28344 - RNA, 23 nt, Artificial Sequence
  Synthetic
auacauuaugaaaguucugguuc

SEQ ID NO: 28345 - RNA, 23 nt, Artificial Sequence
  Synthetic
uacauuaugaaaguucugguucu

SEQ ID NO: 28346 - RNA, 23 nt, Artificial Sequence
  Synthetic
acauuaugaaaguucugguucua

SEQ ID NO: 28347 - RNA, 23 nt, Artificial Sequence
  Synthetic
cauuaugaaaguucugguucuaa

SEQ ID NO: 28348 - RNA, 23 nt, Artificial Sequence
  Synthetic
auuaugaaaguucugguucuaaa

SEQ ID NO: 28349 - RNA, 23 nt, Artificial Sequence
  Synthetic
uuaugaaaguucugguucuaaau

SEQ ID NO: 28350 - RNA, 23 nt, Artificial Sequence
  Synthetic
uaugaaaguucugguucuaaauc

SEQ ID NO: 28351 - RNA, 23 nt, Artificial Sequence
  Synthetic
augaaaguucugguucuaaaucc

SEQ ID NO: 28352 - RNA, 23 nt, Artificial Sequence
  Synthetic
ugaaaguucugguucuaaaucca

SEQ ID NO: 28353 - RNA, 23 nt, Artificial Sequence
  Synthetic
gaaaguucugguucuaaauccau

SEQ ID NO: 28354 - RNA, 23 nt, Artificial Sequence
  Synthetic
aaaguucugguucuaaauccaua

SEQ ID NO: 28355 - RNA, 23 nt, Artificial Sequence
  Synthetic
aaguucugguucuaaauccauau

SEQ ID NO: 28356 - RNA, 23 nt, Artificial Sequence
  Synthetic
aguucugguucuaaauccauauu

SEQ ID NO: 28357 - RNA, 23 nt, Artificial Sequence
  Synthetic
guucugguucuaaauccauauua

SEQ ID NO: 28358 - RNA, 23 nt, Artificial Sequence
  Synthetic
uucugguucuaaauccauauuau

SEQ ID NO: 28359 - RNA, 23 nt, Artificial Sequence
  Synthetic
ucugguucuaaauccauauuauc

SEQ ID NO: 28360 - RNA, 23 nt, Artificial Sequence
  Synthetic
cugguucuaaauccauauuaucu

SEQ ID NO: 28361 - RNA, 23 nt, Artificial Sequence
  Synthetic
ugguucuaaauccauauuaucuu

SEQ ID NO: 28362 - RNA, 23 nt, Artificial Sequence
  Synthetic
gguucuaaauccauauuaucuug

SEQ ID NO: 28363 - RNA, 23 nt, Artificial Sequence
  Synthetic
guucuaaauccauauuaucuuga

SEQ ID NO: 28364 - RNA, 23 nt, Artificial Sequence
  Synthetic
uucuaaauccauauuaucuugag

SEQ ID NO: 28365 - RNA, 23 nt, Artificial Sequence
  Synthetic
ucuaaauccauauuaucuugagg

SEQ ID NO: 28366 - RNA, 23 nt, Artificial Sequence
  Synthetic
cuaaauccauauuaucuugaggg

SEQ ID NO: 28367 - RNA, 23 nt, Artificial Sequence
  Synthetic
uaaauccauauuaucuugagggc

SEQ ID NO: 28368 - RNA, 23 nt, Artificial Sequence
  Synthetic
aaauccauauuaucuugagggca

SEQ ID NO: 28369 - RNA, 23 nt, Artificial Sequence
  Synthetic
aauccauauuaucuugagggcau

SEQ ID NO: 28370 - RNA, 23 nt, Artificial Sequence
  Synthetic
auccauauuaucuugagggcaua

SEQ ID NO: 28371 - RNA, 23 nt, Artificial Sequence
  Synthetic
uccauauuaucuugagggcauau

SEQ ID NO: 28372 - RNA, 23 nt, Artificial Sequence
  Synthetic
ccauauuaucuugagggcauauc

SEQ ID NO: 28373 - RNA, 23 nt, Artificial Sequence
  Synthetic
cauauuaucuugagggcauaucc

SEQ ID NO: 28374 - RNA, 23 nt, Artificial Sequence
  Synthetic
auauuaucuugagggcauaucca

SEQ ID NO: 28375 - RNA, 23 nt, Artificial Sequence
  Synthetic
uauuaucuugagggcauauccac

SEQ ID NO: 28376 - RNA, 23 nt, Artificial Sequence
  Synthetic
auuaucuugagggcauauccacu

SEQ ID NO: 28377 - RNA, 23 nt, Artificial Sequence
  Synthetic
uuaucuugagggcauauccacug

SEQ ID NO: 28378 - RNA, 23 nt, Artificial Sequence
  Synthetic
uaucuugagggcauauccacuga

SEQ ID NO: 28379 - RNA, 23 nt, Artificial Sequence
  Synthetic
aucuugagggcauauccacugau

SEQ ID NO: 28380 - RNA, 23 nt, Artificial Sequence
  Synthetic
ucuugagggcauauccacugaug

SEQ ID NO: 28381 - RNA, 23 nt, Artificial Sequence
  Synthetic
cuugagggcauauccacugaugc

SEQ ID NO: 28382 - RNA, 23 nt, Artificial Sequence
  Synthetic
uugagggcauauccacugaugca

SEQ ID NO: 28383 - RNA, 23 nt, Artificial Sequence
  Synthetic
ugagggcauauccacugaugcaa

SEQ ID NO: 28384 - RNA, 23 nt, Artificial Sequence
  Synthetic
gagggcauauccacugaugcaau

SEQ ID NO: 28385 - RNA, 23 nt, Artificial Sequence
  Synthetic
agggcauauccacugaugcaaug

SEQ ID NO: 28386 - RNA, 23 nt, Artificial Sequence
  Synthetic
gggcauauccacugaugcaaugg

SEQ ID NO: 28387 - RNA, 23 nt, Artificial Sequence
  Synthetic
ggcauauccacugaugcaaugga

SEQ ID NO: 28388 - RNA, 23 nt, Artificial Sequence
  Synthetic
gcauauccacugaugcaauggau

SEQ ID NO: 28389 - RNA, 23 nt, Artificial Sequence
  Synthetic
cauauccacugaugcaauggaua

SEQ ID NO: 28390 - RNA, 23 nt, Artificial Sequence
  Synthetic
auauccacugaugcaauggauau

SEQ ID NO: 28391 - RNA, 23 nt, Artificial Sequence
  Synthetic
uauccacugaugcaauggauaug

SEQ ID NO: 28392 - RNA, 23 nt, Artificial Sequence
  Synthetic
auccacugaugcaauggauauga

SEQ ID NO: 28393 - RNA, 23 nt, Artificial Sequence
  Synthetic
uccacugaugcaauggauaugau

SEQ ID NO: 28394 - RNA, 23 nt, Artificial Sequence
  Synthetic
ccacugaugcaauggauaugauc

SEQ ID NO: 28395 - RNA, 23 nt, Artificial Sequence
  Synthetic
cacugaugcaauggauaugauca

SEQ ID NO: 28396 - RNA, 23 nt, Artificial Sequence
  Synthetic
acugaugcaauggauaugaucau

SEQ ID NO: 28397 - RNA, 23 nt, Artificial Sequence
  Synthetic
cugaugcaauggauaugaucauu

SEQ ID NO: 28398 - RNA, 23 nt, Artificial Sequence
  Synthetic
ugaugcaauggauaugaucauua

SEQ ID NO: 28399 - RNA, 23 nt, Artificial Sequence
  Synthetic
gaugcaauggauaugaucauuau

SEQ ID NO: 28400 - RNA, 23 nt, Artificial Sequence
  Synthetic
augcaauggauaugaucauuauu

SEQ ID NO: 28401 - RNA, 23 nt, Artificial Sequence
  Synthetic
ugcaauggauaugaucauuauuu

SEQ ID NO: 28402 - RNA, 23 nt, Artificial Sequence
  Synthetic
gcaauggauaugaucauuauuug

SEQ ID NO: 28403 - RNA, 23 nt, Artificial Sequence
  Synthetic
caauggauaugaucauuauuuga

SEQ ID NO: 28404 - RNA, 23 nt, Artificial Sequence
  Synthetic
aauggauaugaucauuauuugau

SEQ ID NO: 28405 - RNA, 23 nt, Artificial Sequence
  Synthetic
auggauaugaucauuauuugauu

SEQ ID NO: 28406 - RNA, 23 nt, Artificial Sequence
  Synthetic
uggauaugaucauuauuugauuu

SEQ ID NO: 28407 - RNA, 23 nt, Artificial Sequence
  Synthetic
ggauaugaucauuauuugauuug

SEQ ID NO: 28408 - RNA, 23 nt, Artificial Sequence
  Synthetic
gauaugaucauuauuugauuuga

SEQ ID NO: 28409 - RNA, 23 nt, Artificial Sequence
  Synthetic
auaugaucauuauuugauuugau

SEQ ID NO: 28410 - RNA, 23 nt, Artificial Sequence
  Synthetic
uaugaucauuauuugauuugaua

SEQ ID NO: 28411 - RNA, 23 nt, Artificial Sequence
  Synthetic
augaucauuauuugauuugauau

SEQ ID NO: 28412 - RNA, 23 nt, Artificial Sequence
  Synthetic
ugaucauuauuugauuugauauc

SEQ ID NO: 28413 - RNA, 23 nt, Artificial Sequence
  Synthetic
gaucauuauuugauuugauauca

SEQ ID NO: 28414 - RNA, 23 nt, Artificial Sequence
  Synthetic
aucauuauuugauuugauaucaa

SEQ ID NO: 28415 - RNA, 23 nt, Artificial Sequence
  Synthetic
ucauuauuugauuugauaucaaa

SEQ ID NO: 28416 - RNA, 23 nt, Artificial Sequence
  Synthetic
cauuauuugauuugauaucaaac

SEQ ID NO: 28417 - RNA, 23 nt, Artificial Sequence
  Synthetic
auuauuugauuugauaucaaacu

SEQ ID NO: 28418 - RNA, 23 nt, Artificial Sequence
  Synthetic
uuauuugauuugauaucaaacua

SEQ ID NO: 28419 - RNA, 23 nt, Artificial Sequence
  Synthetic
uauuugauuugauaucaaacuaa

SEQ ID NO: 28420 - RNA, 23 nt, Artificial Sequence
  Synthetic
auuugauuugauaucaaacuaaa

SEQ ID NO: 28421 - RNA, 23 nt, Artificial Sequence
  Synthetic
uuugauuugauaucaaacuaaaa

SEQ ID NO: 28422 - RNA, 23 nt, Artificial Sequence
  Synthetic
uugauuugauaucaaacuaaaac

SEQ ID NO: 28423 - RNA, 23 nt, Artificial Sequence
  Synthetic
ugauuugauaucaaacuaaaacg

SEQ ID NO: 28424 - RNA, 23 nt, Artificial Sequence
  Synthetic
gauuugauaucaaacuaaaacga

SEQ ID NO: 28425 - RNA, 23 nt, Artificial Sequence
  Synthetic
auuugauaucaaacuaaaacgag

SEQ ID NO: 28426 - RNA, 23 nt, Artificial Sequence
  Synthetic
uuugauaucaaacuaaaacgagu

SEQ ID NO: 28427 - RNA, 23 nt, Artificial Sequence
  Synthetic
uugauaucaaacuaaaacgagug

SEQ ID NO: 28428 - RNA, 23 nt, Artificial Sequence
  Synthetic
ugauaucaaacuaaaacgaguga

SEQ ID NO: 28429 - RNA, 23 nt, Artificial Sequence
  Synthetic
gauaucaaacuaaaacgagugag

SEQ ID NO: 28430 - RNA, 23 nt, Artificial Sequence
  Synthetic
auaucaaacuaaaacgagugaga

SEQ ID NO: 28431 - RNA, 23 nt, Artificial Sequence
  Synthetic
uaucaaacuaaaacgagugagaa

SEQ ID NO: 28432 - RNA, 23 nt, Artificial Sequence
  Synthetic
aucaaacuaaaacgagugagaaa

SEQ ID NO: 28433 - RNA, 23 nt, Artificial Sequence
  Synthetic
ucaaacuaaaacgagugagaaaa

SEQ ID NO: 28434 - RNA, 23 nt, Artificial Sequence
  Synthetic
caaacuaaaacgagugagaaaaa

SEQ ID NO: 28435 - RNA, 23 nt, Artificial Sequence
  Synthetic
aaacuaaaacgagugagaaaaaa

SEQ ID NO: 28436 - RNA, 23 nt, Artificial Sequence
  Synthetic
aacuaaaacgagugagaaaaaaa

SEQ ID NO: 28437 - RNA, 23 nt, Artificial Sequence
  Synthetic
acuaaaacgagugagaaaaaaaa

SEQ ID NO: 28438 - RNA, 23 nt, Artificial Sequence
  Synthetic
cuaaaacgagugagaaaaaaaaa

SEQ ID NO: 28439 - RNA, 23 nt, Artificial Sequence
  Synthetic
uaaaacgagugagaaaaaaaaaa

SEQ ID NO: 28440 - RNA, 23 nt, Artificial Sequence
  Synthetic
aaaacgagugagaaaaaaaaaaa

SEQ ID NO: 28441 - RNA, 23 nt, Artificial Sequence
  Synthetic
aaacgagugagaaaaaaaaaaag

SEQ ID NO: 28442 - RNA, 23 nt, Artificial Sequence
  Synthetic
aacgagugagaaaaaaaaaaaga

SEQ ID NO: 28443 - RNA, 23 nt, Artificial Sequence
  Synthetic
acgagugagaaaaaaaaaaagaa

SEQ ID NO: 28444 - RNA, 23 nt, Artificial Sequence
  Synthetic
cgagugagaaaaaaaaaaagaaa

SEQ ID NO: 28445 - RNA, 23 nt, Artificial Sequence
  Synthetic
gagugagaaaaaaaaaaagaaac

SEQ ID NO: 28446 - RNA, 23 nt, Artificial Sequence
  Synthetic
agugagaaaaaaaaaaagaaacc

SEQ ID NO: 28447 - RNA, 23 nt, Artificial Sequence
  Synthetic
gugagaaaaaaaaaaagaaaccc

SEQ ID NO: 28448 - RNA, 23 nt, Artificial Sequence
  Synthetic
ugagaaaaaaaaaaagaaacccc

SEQ ID NO: 28449 - RNA, 23 nt, Artificial Sequence
  Synthetic
gagaaaaaaaaaaagaaacccca

SEQ ID NO: 28450 - RNA, 23 nt, Artificial Sequence
  Synthetic
agaaaaaaaaaaagaaaccccag

SEQ ID NO: 28451 - RNA, 23 nt, Artificial Sequence
  Synthetic
gaaaaaaaaaaagaaaccccaga

SEQ ID NO: 28452 - RNA, 23 nt, Artificial Sequence
  Synthetic
aaaaaaaaaaagaaaccccagaa

SEQ ID NO: 28453 - RNA, 23 nt, Artificial Sequence
  Synthetic
aaaaaaaaaagaaaccccagaau

SEQ ID NO: 28454 - RNA, 23 nt, Artificial Sequence
  Synthetic
aaaaaaaaagaaaccccagaaua

SEQ ID NO: 28455 - RNA, 23 nt, Artificial Sequence
  Synthetic
aaaaaaaagaaaccccagaauau

SEQ ID NO: 28456 - RNA, 23 nt, Artificial Sequence
  Synthetic
aaaaaaagaaaccccagaauaug

SEQ ID NO: 28457 - RNA, 23 nt, Artificial Sequence
  Synthetic
aaaaaagaaaccccagaauaugu

SEQ ID NO: 28458 - RNA, 23 nt, Artificial Sequence
  Synthetic
aaaaagaaaccccagaauauguu

SEQ ID NO: 28459 - RNA, 23 nt, Artificial Sequence
  Synthetic
aaaagaaaccccagaauauguua

SEQ ID NO: 28460 - RNA, 23 nt, Artificial Sequence
  Synthetic
aaagaaaccccagaauauguuac

SEQ ID NO: 28461 - RNA, 23 nt, Artificial Sequence
  Synthetic
aagaaaccccagaauauguuaca

SEQ ID NO: 28462 - RNA, 23 nt, Artificial Sequence
  Synthetic
agaaaccccagaauauguuacag

SEQ ID NO: 28463 - RNA, 23 nt, Artificial Sequence
  Synthetic
gaaaccccagaauauguuacagu

SEQ ID NO: 28464 - RNA, 23 nt, Artificial Sequence
  Synthetic
aaaccccagaauauguuacaguu

SEQ ID NO: 28465 - RNA, 23 nt, Artificial Sequence
  Synthetic
aaccccagaauauguuacaguug

SEQ ID NO: 28466 - RNA, 23 nt, Artificial Sequence
  Synthetic
accccagaauauguuacaguugu

SEQ ID NO: 28467 - RNA, 23 nt, Artificial Sequence
  Synthetic
ccccagaauauguuacaguuguu

SEQ ID NO: 28468 - RNA, 23 nt, Artificial Sequence
  Synthetic
cccagaauauguuacaguuguuu

SEQ ID NO: 28469 - RNA, 23 nt, Artificial Sequence
  Synthetic
ccagaauauguuacaguuguuuu

SEQ ID NO: 28470 - RNA, 23 nt, Artificial Sequence
  Synthetic
cagaauauguuacaguuguuuuu

SEQ ID NO: 28471 - RNA, 23 nt, Artificial Sequence
  Synthetic
agaauauguuacaguuguuuuua

SEQ ID NO: 28472 - RNA, 23 nt, Artificial Sequence
  Synthetic
gaauauguuacaguuguuuuuau

SEQ ID NO: 28473 - RNA, 23 nt, Artificial Sequence
  Synthetic
aauauguuacaguuguuuuuauu

SEQ ID NO: 28474 - RNA, 23 nt, Artificial Sequence
  Synthetic
auauguuacaguuguuuuuauuc

SEQ ID NO: 28475 - RNA, 23 nt, Artificial Sequence
  Synthetic
uauguuacaguuguuuuuauucc

SEQ ID NO: 28476 - RNA, 23 nt, Artificial Sequence
  Synthetic
auguuacaguuguuuuuauucca

SEQ ID NO: 28477 - RNA, 23 nt, Artificial Sequence
  Synthetic
uguuacaguuguuuuuauuccaa

SEQ ID NO: 28478 - RNA, 23 nt, Artificial Sequence
  Synthetic
guuacaguuguuuuuauuccaac

SEQ ID NO: 28479 - RNA, 23 nt, Artificial Sequence
  Synthetic
uuacaguuguuuuuauuccaacu

SEQ ID NO: 28480 - RNA, 23 nt, Artificial Sequence
  Synthetic
uacaguuguuuuuauuccaacug

SEQ ID NO: 28481 - RNA, 23 nt, Artificial Sequence
  Synthetic
acaguuguuuuuauuccaacuga

SEQ ID NO: 28482 - RNA, 23 nt, Artificial Sequence
  Synthetic
caguuguuuuuauuccaacugaa

SEQ ID NO: 28483 - RNA, 23 nt, Artificial Sequence
  Synthetic
aguuguuuuuauuccaacugaaa

SEQ ID NO: 28484 - RNA, 23 nt, Artificial Sequence
  Synthetic
guuguuuuuauuccaacugaaaa

SEQ ID NO: 28485 - RNA, 23 nt, Artificial Sequence
  Synthetic
uuguuuuuauuccaacugaaaau

SEQ ID NO: 28486 - RNA, 23 nt, Artificial Sequence
  Synthetic
uguuuuuauuccaacugaaaauu

SEQ ID NO: 28487 - RNA, 23 nt, Artificial Sequence
  Synthetic
guuuuuauuccaacugaaaauug

SEQ ID NO: 28488 - RNA, 23 nt, Artificial Sequence
  Synthetic
uuuuuauuccaacugaaaauuga

SEQ ID NO: 28489 - RNA, 23 nt, Artificial Sequence
  Synthetic
uuuuauuccaacugaaaauugag

SEQ ID NO: 28490 - RNA, 23 nt, Artificial Sequence
  Synthetic
uuuauuccaacugaaaauugagu

SEQ ID NO: 28491 - RNA, 23 nt, Artificial Sequence
  Synthetic
uuauuccaacugaaaauugagua

SEQ ID NO: 28492 - RNA, 23 nt, Artificial Sequence
  Synthetic
uauuccaacugaaaauugaguaa

SEQ ID NO: 28493 - RNA, 23 nt, Artificial Sequence
  Synthetic
auuccaacugaaaauugaguaag

SEQ ID NO: 28494 - RNA, 23 nt, Artificial Sequence
  Synthetic
uuccaacugaaaauugaguaagg

SEQ ID NO: 28495 - RNA, 23 nt, Artificial Sequence
  Synthetic
uccaacugaaaauugaguaaggg

SEQ ID NO: 28496 - RNA, 23 nt, Artificial Sequence
  Synthetic
ccaacugaaaauugaguaagggu

SEQ ID NO: 28497 - RNA, 23 nt, Artificial Sequence
  Synthetic
caacugaaaauugaguaagggua

SEQ ID NO: 28498 - RNA, 23 nt, Artificial Sequence
  Synthetic
aacugaaaauugaguaaggguaa

SEQ ID NO: 28499 - RNA, 23 nt, Artificial Sequence
  Synthetic
acugaaaauugaguaaggguaac

SEQ ID NO: 28500 - RNA, 23 nt, Artificial Sequence
  Synthetic
cugaaaauugaguaaggguaacu

SEQ ID NO: 28501 - RNA, 23 nt, Artificial Sequence
  Synthetic
ugaaaauugaguaaggguaacuc

SEQ ID NO: 28502 - RNA, 23 nt, Artificial Sequence
  Synthetic
gaaaauugaguaaggguaacucu

SEQ ID NO: 28503 - RNA, 23 nt, Artificial Sequence
  Synthetic
aaaauugaguaaggguaacucuu

SEQ ID NO: 28504 - RNA, 23 nt, Artificial Sequence
  Synthetic
aaauugaguaaggguaacucuuc

SEQ ID NO: 28505 - RNA, 23 nt, Artificial Sequence
  Synthetic
aauugaguaaggguaacucuuca

SEQ ID NO: 28506 - RNA, 23 nt, Artificial Sequence
  Synthetic
auugaguaaggguaacucuucac

SEQ ID NO: 28507 - RNA, 23 nt, Artificial Sequence
  Synthetic
uugaguaaggguaacucuucacu

SEQ ID NO: 28508 - RNA, 23 nt, Artificial Sequence
  Synthetic
ugaguaaggguaacucuucacuu

SEQ ID NO: 28509 - RNA, 23 nt, Artificial Sequence
  Synthetic
gaguaaggguaacucuucacuuu

SEQ ID NO: 28510 - RNA, 23 nt, Artificial Sequence
  Synthetic
aguaaggguaacucuucacuuua

SEQ ID NO: 28511 - RNA, 23 nt, Artificial Sequence
  Synthetic
guaaggguaacucuucacuuuaa

SEQ ID NO: 28512 - RNA, 23 nt, Artificial Sequence
  Synthetic
uaaggguaacucuucacuuuaac

SEQ ID NO: 28513 - RNA, 23 nt, Artificial Sequence
  Synthetic
aaggguaacucuucacuuuaacg

SEQ ID NO: 28514 - RNA, 23 nt, Artificial Sequence
  Synthetic
aggguaacucuucacuuuaacgu

SEQ ID NO: 28515 - RNA, 23 nt, Artificial Sequence
  Synthetic
ggguaacucuucacuuuaacgua

SEQ ID NO: 28516 - RNA, 23 nt, Artificial Sequence
  Synthetic
gguaacucuucacuuuaacguac

SEQ ID NO: 28517 - RNA, 23 nt, Artificial Sequence
  Synthetic
guaacucuucacuuuaacguacc

SEQ ID NO: 28518 - RNA, 23 nt, Artificial Sequence
  Synthetic
uaacucuucacuuuaacguaccu

SEQ ID NO: 28519 - RNA, 23 nt, Artificial Sequence
  Synthetic
aacucuucacuuuaacguaccua

SEQ ID NO: 28520 - RNA, 23 nt, Artificial Sequence
  Synthetic
acucuucacuuuaacguaccuag

SEQ ID NO: 28521 - RNA, 23 nt, Artificial Sequence
  Synthetic
cucuucacuuuaacguaccuaga

SEQ ID NO: 28522 - RNA, 23 nt, Artificial Sequence
  Synthetic
ucuucacuuuaacguaccuagaa

SEQ ID NO: 28523 - RNA, 23 nt, Artificial Sequence
  Synthetic
cuucacuuuaacguaccuagaaa

SEQ ID NO: 28524 - RNA, 23 nt, Artificial Sequence
  Synthetic
uucacuuuaacguaccuagaaau

SEQ ID NO: 28525 - RNA, 23 nt, Artificial Sequence
  Synthetic
ucacuuuaacguaccuagaaaug

SEQ ID NO: 28526 - RNA, 23 nt, Artificial Sequence
  Synthetic
cacuuuaacguaccuagaaauga

SEQ ID NO: 28527 - RNA, 23 nt, Artificial Sequence
  Synthetic
acuuuaacguaccuagaaaugau

SEQ ID NO: 28528 - RNA, 23 nt, Artificial Sequence
  Synthetic
cuuuaacguaccuagaaaugaua

SEQ ID NO: 28529 - RNA, 23 nt, Artificial Sequence
  Synthetic
uuuaacguaccuagaaaugauau

SEQ ID NO: 28530 - RNA, 23 nt, Artificial Sequence
  Synthetic
uuaacguaccuagaaaugauauc

SEQ ID NO: 28531 - RNA, 23 nt, Artificial Sequence
  Synthetic
uaacguaccuagaaaugauaucu

SEQ ID NO: 28532 - RNA, 23 nt, Artificial Sequence
  Synthetic
aacguaccuagaaaugauaucuc

SEQ ID NO: 28533 - RNA, 23 nt, Artificial Sequence
  Synthetic
acguaccuagaaaugauaucucc

SEQ ID NO: 28534 - RNA, 23 nt, Artificial Sequence
  Synthetic
cguaccuagaaaugauaucuccu

SEQ ID NO: 28535 - RNA, 23 nt, Artificial Sequence
  Synthetic
guaccuagaaaugauaucuccuu

SEQ ID NO: 28536 - RNA, 23 nt, Artificial Sequence
  Synthetic
uaccuagaaaugauaucuccuug

SEQ ID NO: 28537 - RNA, 23 nt, Artificial Sequence
  Synthetic
accuagaaaugauaucuccuugc

SEQ ID NO: 28538 - RNA, 23 nt, Artificial Sequence
  Synthetic
ccuagaaaugauaucuccuugca

SEQ ID NO: 28539 - RNA, 23 nt, Artificial Sequence
  Synthetic
cuagaaaugauaucuccuugcau

SEQ ID NO: 28540 - RNA, 23 nt, Artificial Sequence
  Synthetic
uagaaaugauaucuccuugcaua

SEQ ID NO: 28541 - RNA, 23 nt, Artificial Sequence
  Synthetic
agaaaugauaucuccuugcauaa

SEQ ID NO: 28542 - RNA, 23 nt, Artificial Sequence
  Synthetic
gaaaugauaucuccuugcauaau

SEQ ID NO: 28543 - RNA, 23 nt, Artificial Sequence
  Synthetic
aaaugauaucuccuugcauaauu

SEQ ID NO: 28544 - RNA, 23 nt, Artificial Sequence
  Synthetic
aaugauaucuccuugcauaauua

SEQ ID NO: 28545 - RNA, 23 nt, Artificial Sequence
  Synthetic
augauaucuccuugcauaauuag

SEQ ID NO: 28546 - RNA, 23 nt, Artificial Sequence
  Synthetic
ugauaucuccuugcauaauuagu

SEQ ID NO: 28547 - RNA, 23 nt, Artificial Sequence
  Synthetic
gauaucuccuugcauaauuaguc

SEQ ID NO: 28548 - RNA, 23 nt, Artificial Sequence
  Synthetic
auaucuccuugcauaauuaguca

SEQ ID NO: 28549 - RNA, 23 nt, Artificial Sequence
  Synthetic
uaucuccuugcauaauuagucau

SEQ ID NO: 28550 - RNA, 23 nt, Artificial Sequence
  Synthetic
aucuccuugcauaauuagucauu

SEQ ID NO: 28551 - RNA, 23 nt, Artificial Sequence
  Synthetic
ucuccuugcauaauuagucauuu

SEQ ID NO: 28552 - RNA, 23 nt, Artificial Sequence
  Synthetic
cuccuugcauaauuagucauuua

SEQ ID NO: 28553 - RNA, 23 nt, Artificial Sequence
  Synthetic
uccuugcauaauuagucauuuaa

SEQ ID NO: 28554 - RNA, 23 nt, Artificial Sequence
  Synthetic
ccuugcauaauuagucauuuaac

SEQ ID NO: 28555 - RNA, 23 nt, Artificial Sequence
  Synthetic
cuugcauaauuagucauuuaaca

SEQ ID NO: 28556 - RNA, 23 nt, Artificial Sequence
  Synthetic
uugcauaauuagucauuuaacag

SEQ ID NO: 28557 - RNA, 23 nt, Artificial Sequence
  Synthetic
ugcauaauuagucauuuaacaga

SEQ ID NO: 28558 - RNA, 23 nt, Artificial Sequence
  Synthetic
gcauaauuagucauuuaacagag

SEQ ID NO: 28559 - RNA, 23 nt, Artificial Sequence
  Synthetic
cauaauuagucauuuaacagagc

SEQ ID NO: 28560 - RNA, 23 nt, Artificial Sequence
  Synthetic
auaauuagucauuuaacagagcc

SEQ ID NO: 28561 - RNA, 23 nt, Artificial Sequence
  Synthetic
uaauuagucauuuaacagagcca

SEQ ID NO: 28562 - RNA, 23 nt, Artificial Sequence
  Synthetic
aauuagucauuuaacagagccag

SEQ ID NO: 28563 - RNA, 23 nt, Artificial Sequence
  Synthetic
auuagucauuuaacagagccagc

SEQ ID NO: 28564 - RNA, 23 nt, Artificial Sequence
  Synthetic
uuagucauuuaacagagccagca

SEQ ID NO: 28565 - RNA, 23 nt, Artificial Sequence
  Synthetic
uagucauuuaacagagccagcaa

SEQ ID NO: 28566 - RNA, 23 nt, Artificial Sequence
  Synthetic
agucauuuaacagagccagcaac

SEQ ID NO: 28567 - RNA, 23 nt, Artificial Sequence
  Synthetic
gucauuuaacagagccagcaacc

SEQ ID NO: 28568 - RNA, 23 nt, Artificial Sequence
  Synthetic
ucauuuaacagagccagcaacca

SEQ ID NO: 28569 - RNA, 23 nt, Artificial Sequence
  Synthetic
cauuuaacagagccagcaaccau

SEQ ID NO: 28570 - RNA, 23 nt, Artificial Sequence
  Synthetic
auuuaacagagccagcaaccauc

SEQ ID NO: 28571 - RNA, 23 nt, Artificial Sequence
  Synthetic
uuuaacagagccagcaaccaucc

SEQ ID NO: 28572 - RNA, 23 nt, Artificial Sequence
  Synthetic
uuaacagagccagcaaccaucca

SEQ ID NO: 28573 - RNA, 23 nt, Artificial Sequence
  Synthetic
uaacagagccagcaaccauccag

SEQ ID NO: 28574 - RNA, 23 nt, Artificial Sequence
  Synthetic
aacagagccagcaaccauccagg

SEQ ID NO: 28575 - RNA, 23 nt, Artificial Sequence
  Synthetic
acagagccagcaaccauccagga

SEQ ID NO: 28576 - RNA, 23 nt, Artificial Sequence
  Synthetic
cagagccagcaaccauccaggag

SEQ ID NO: 28577 - RNA, 23 nt, Artificial Sequence
  Synthetic
agagccagcaaccauccaggagc

SEQ ID NO: 28578 - RNA, 23 nt, Artificial Sequence
  Synthetic
gagccagcaaccauccaggagcu

SEQ ID NO: 28579 - RNA, 23 nt, Artificial Sequence
  Synthetic
agccagcaaccauccaggagcuu

SEQ ID NO: 28580 - RNA, 23 nt, Artificial Sequence
  Synthetic
gccagcaaccauccaggagcuug

SEQ ID NO: 28581 - RNA, 23 nt, Artificial Sequence
  Synthetic
ccagcaaccauccaggagcuugg

SEQ ID NO: 28582 - RNA, 23 nt, Artificial Sequence
  Synthetic
cagcaaccauccaggagcuuggc

SEQ ID NO: 28583 - RNA, 23 nt, Artificial Sequence
  Synthetic
agcaaccauccaggagcuuggcu

SEQ ID NO: 28584 - RNA, 23 nt, Artificial Sequence
  Synthetic
gcaaccauccaggagcuuggcuu

SEQ ID NO: 28585 - RNA, 23 nt, Artificial Sequence
  Synthetic
caaccauccaggagcuuggcuug

SEQ ID NO: 28586 - RNA, 23 nt, Artificial Sequence
  Synthetic
aaccauccaggagcuuggcuugg

SEQ ID NO: 28587 - RNA, 23 nt, Artificial Sequence
  Synthetic
accauccaggagcuuggcuuggu

SEQ ID NO: 28588 - RNA, 23 nt, Artificial Sequence
  Synthetic
ccauccaggagcuuggcuuggug

SEQ ID NO: 28589 - RNA, 23 nt, Artificial Sequence
  Synthetic
cauccaggagcuuggcuuggugu

SEQ ID NO: 28590 - RNA, 23 nt, Artificial Sequence
  Synthetic
auccaggagcuuggcuugguguc

SEQ ID NO: 28591 - RNA, 23 nt, Artificial Sequence
  Synthetic
uccaggagcuuggcuugguguca

SEQ ID NO: 28592 - RNA, 23 nt, Artificial Sequence
  Synthetic
ccaggagcuuggcuuggugucau

SEQ ID NO: 28593 - RNA, 23 nt, Artificial Sequence
  Synthetic
caggagcuuggcuuggugucaua

SEQ ID NO: 28594 - RNA, 23 nt, Artificial Sequence
  Synthetic
aggagcuuggcuuggugucauaa

SEQ ID NO: 28595 - RNA, 23 nt, Artificial Sequence
  Synthetic
ggagcuuggcuuggugucauaag

SEQ ID NO: 28596 - RNA, 23 nt, Artificial Sequence
  Synthetic
gagcuuggcuuggugucauaaga

SEQ ID NO: 28597 - RNA, 23 nt, Artificial Sequence
  Synthetic
agcuuggcuuggugucauaagac

SEQ ID NO: 28598 - RNA, 23 nt, Artificial Sequence
  Synthetic
gcuuggcuuggugucauaagaca

SEQ ID NO: 28599 - RNA, 23 nt, Artificial Sequence
  Synthetic
cuuggcuuggugucauaagacau

SEQ ID NO: 28600 - RNA, 23 nt, Artificial Sequence
  Synthetic
uuggcuuggugucauaagacaug

SEQ ID NO: 28601 - RNA, 23 nt, Artificial Sequence
  Synthetic
uggcuuggugucauaagacaugu

SEQ ID NO: 28602 - RNA, 23 nt, Artificial Sequence
  Synthetic
ggcuuggugucauaagacaugug

SEQ ID NO: 28603 - RNA, 23 nt, Artificial Sequence
  Synthetic
gcuuggugucauaagacaugugu

SEQ ID NO: 28604 - RNA, 23 nt, Artificial Sequence
  Synthetic
cuuggugucauaagacaugugua

SEQ ID NO: 28605 - RNA, 23 nt, Artificial Sequence
  Synthetic
uuggugucauaagacauguguaa

SEQ ID NO: 28606 - RNA, 23 nt, Artificial Sequence
  Synthetic
uggugucauaagacauguguaag

SEQ ID NO: 28607 - RNA, 23 nt, Artificial Sequence
  Synthetic
ggugucauaagacauguguaagu

SEQ ID NO: 28608 - RNA, 23 nt, Artificial Sequence
  Synthetic
gugucauaagacauguguaagua

SEQ ID NO: 28609 - RNA, 23 nt, Artificial Sequence
  Synthetic
ugucauaagacauguguaaguag

SEQ ID NO: 28610 - RNA, 23 nt, Artificial Sequence
  Synthetic
gucauaagacauguguaaguagc

SEQ ID NO: 28611 - RNA, 23 nt, Artificial Sequence
  Synthetic
ucauaagacauguguaaguagca

SEQ ID NO: 28612 - RNA, 23 nt, Artificial Sequence
  Synthetic
cauaagacauguguaaguagcaa

SEQ ID NO: 28613 - RNA, 23 nt, Artificial Sequence
  Synthetic
auaagacauguguaaguagcaaa

SEQ ID NO: 28614 - RNA, 23 nt, Artificial Sequence
  Synthetic
uaagacauguguaaguagcaaag

SEQ ID NO: 28615 - RNA, 23 nt, Artificial Sequence
  Synthetic
aagacauguguaaguagcaaagc

SEQ ID NO: 28616 - RNA, 23 nt, Artificial Sequence
  Synthetic
agacauguguaaguagcaaagca

SEQ ID NO: 28617 - RNA, 23 nt, Artificial Sequence
  Synthetic
gacauguguaaguagcaaagcac

SEQ ID NO: 28618 - RNA, 23 nt, Artificial Sequence
  Synthetic
acauguguaaguagcaaagcacu

SEQ ID NO: 28619 - RNA, 23 nt, Artificial Sequence
  Synthetic
cauguguaaguagcaaagcacug

SEQ ID NO: 28620 - RNA, 23 nt, Artificial Sequence
  Synthetic
auguguaaguagcaaagcacugu

SEQ ID NO: 28621 - RNA, 23 nt, Artificial Sequence
  Synthetic
uguguaaguagcaaagcacuguc

SEQ ID NO: 28622 - RNA, 23 nt, Artificial Sequence
  Synthetic
guguaaguagcaaagcacugucu

SEQ ID NO: 28623 - RNA, 23 nt, Artificial Sequence
  Synthetic
uguaaguagcaaagcacugucug

SEQ ID NO: 28624 - RNA, 23 nt, Artificial Sequence
  Synthetic
guaaguagcaaagcacugucugg

SEQ ID NO: 28625 - RNA, 23 nt, Artificial Sequence
  Synthetic
uaaguagcaaagcacugucuggu

SEQ ID NO: 28626 - RNA, 23 nt, Artificial Sequence
  Synthetic
aaguagcaaagcacugucugguu

SEQ ID NO: 28627 - RNA, 23 nt, Artificial Sequence
  Synthetic
aguagcaaagcacugucugguuu

SEQ ID NO: 28628 - RNA, 23 nt, Artificial Sequence
  Synthetic
guagcaaagcacugucugguuuu

SEQ ID NO: 28629 - RNA, 23 nt, Artificial Sequence
  Synthetic
uagcaaagcacugucugguuuug

SEQ ID NO: 28630 - RNA, 23 nt, Artificial Sequence
  Synthetic
agcaaagcacugucugguuuuga

SEQ ID NO: 28631 - RNA, 23 nt, Artificial Sequence
  Synthetic
gcaaagcacugucugguuuugaa

SEQ ID NO: 28632 - RNA, 23 nt, Artificial Sequence
  Synthetic
caaagcacugucugguuuugaaa

SEQ ID NO: 28633 - RNA, 23 nt, Artificial Sequence
  Synthetic
aaagcacugucugguuuugaaau

SEQ ID NO: 28634 - RNA, 23 nt, Artificial Sequence
  Synthetic
aagcacugucugguuuugaaauc

SEQ ID NO: 28635 - RNA, 23 nt, Artificial Sequence
  Synthetic
agcacugucugguuuugaaaucu

SEQ ID NO: 28636 - RNA, 23 nt, Artificial Sequence
  Synthetic
gcacugucugguuuugaaaucuc

SEQ ID NO: 28637 - RNA, 23 nt, Artificial Sequence
  Synthetic
cacugucugguuuugaaaucuca

SEQ ID NO: 28638 - RNA, 23 nt, Artificial Sequence
  Synthetic
acugucugguuuugaaaucucaa

SEQ ID NO: 28639 - RNA, 23 nt, Artificial Sequence
  Synthetic
cugucugguuuugaaaucucaaa

SEQ ID NO: 28640 - RNA, 23 nt, Artificial Sequence
  Synthetic
ugucugguuuugaaaucucaaaa

SEQ ID NO: 28641 - RNA, 23 nt, Artificial Sequence
  Synthetic
gucugguuuugaaaucucaaaac

SEQ ID NO: 28642 - RNA, 23 nt, Artificial Sequence
  Synthetic
ucugguuuugaaaucucaaaacc

SEQ ID NO: 28643 - RNA, 23 nt, Artificial Sequence
  Synthetic
cugguuuugaaaucucaaaacca

SEQ ID NO: 28644 - RNA, 23 nt, Artificial Sequence
  Synthetic
ugguuuugaaaucucaaaaccau

SEQ ID NO: 28645 - RNA, 23 nt, Artificial Sequence
  Synthetic
gguuuugaaaucucaaaaccaug

SEQ ID NO: 28646 - RNA, 23 nt, Artificial Sequence
  Synthetic
guuuugaaaucucaaaaccauga

SEQ ID NO: 28647 - RNA, 23 nt, Artificial Sequence
  Synthetic
uuuugaaaucucaaaaccaugag

SEQ ID NO: 28648 - RNA, 23 nt, Artificial Sequence
  Synthetic
uuugaaaucucaaaaccaugagu

SEQ ID NO: 28649 - RNA, 23 nt, Artificial Sequence
  Synthetic
uugaaaucucaaaaccaugagua

SEQ ID NO: 28650 - RNA, 23 nt, Artificial Sequence
  Synthetic
ugaaaucucaaaaccaugaguau

SEQ ID NO: 28651 - RNA, 23 nt, Artificial Sequence
  Synthetic
gaaaucucaaaaccaugaguauu

SEQ ID NO: 28652 - RNA, 23 nt, Artificial Sequence
  Synthetic
aaaucucaaaaccaugaguauug

SEQ ID NO: 28653 - RNA, 23 nt, Artificial Sequence
  Synthetic
aaucucaaaaccaugaguauuga

SEQ ID NO: 28654 - RNA, 23 nt, Artificial Sequence
  Synthetic
aucucaaaaccaugaguauugaa

SEQ ID NO: 28655 - RNA, 23 nt, Artificial Sequence
  Synthetic
ucucaaaaccaugaguauugaaa

SEQ ID NO: 28656 - RNA, 23 nt, Artificial Sequence
  Synthetic
cucaaaaccaugaguauugaaau

SEQ ID NO: 28657 - RNA, 23 nt, Artificial Sequence
  Synthetic
ucaaaaccaugaguauugaaaug

SEQ ID NO: 28658 - RNA, 23 nt, Artificial Sequence
  Synthetic
caaaaccaugaguauugaaaugu

SEQ ID NO: 28659 - RNA, 23 nt, Artificial Sequence
  Synthetic
aaaaccaugaguauugaaauguu

SEQ ID NO: 28660 - RNA, 23 nt, Artificial Sequence
  Synthetic
aaaccaugaguauugaaauguug

SEQ ID NO: 28661 - RNA, 23 nt, Artificial Sequence
  Synthetic
aaccaugaguauugaaauguugu

SEQ ID NO: 28662 - RNA, 23 nt, Artificial Sequence
  Synthetic
accaugaguauugaaauguugua

SEQ ID NO: 28663 - RNA, 23 nt, Artificial Sequence
  Synthetic
ccaugaguauugaaauguuguau

SEQ ID NO: 28664 - RNA, 23 nt, Artificial Sequence
  Synthetic
caugaguauugaaauguuguauu

SEQ ID NO: 28665 - RNA, 23 nt, Artificial Sequence
  Synthetic
augaguauugaaauguuguauuu

SEQ ID NO: 28666 - RNA, 23 nt, Artificial Sequence
  Synthetic
ugaguauugaaauguuguauuug

SEQ ID NO: 28667 - RNA, 23 nt, Artificial Sequence
  Synthetic
gaguauugaaauguuguauuuga

SEQ ID NO: 28668 - RNA, 23 nt, Artificial Sequence
  Synthetic
aguauugaaauguuguauuugag

SEQ ID NO: 28669 - RNA, 23 nt, Artificial Sequence
  Synthetic
guauugaaauguuguauuugagu

SEQ ID NO: 28670 - RNA, 23 nt, Artificial Sequence
  Synthetic
uauugaaauguuguauuugagug

SEQ ID NO: 28671 - RNA, 23 nt, Artificial Sequence
  Synthetic
auugaaauguuguauuugagugu

SEQ ID NO: 28672 - RNA, 23 nt, Artificial Sequence
  Synthetic
uugaaauguuguauuugaguguu

SEQ ID NO: 28673 - RNA, 23 nt, Artificial Sequence
  Synthetic
ugaaauguuguauuugaguguuu

SEQ ID NO: 28674 - RNA, 23 nt, Artificial Sequence
  Synthetic
gaaauguuguauuugaguguuua

SEQ ID NO: 28675 - RNA, 23 nt, Artificial Sequence
  Synthetic
aaauguuguauuugaguguuuaa

SEQ ID NO: 28676 - RNA, 23 nt, Artificial Sequence
  Synthetic
aauguuguauuugaguguuuaau

SEQ ID NO: 28677 - RNA, 23 nt, Artificial Sequence
  Synthetic
auguuguauuugaguguuuaaug

SEQ ID NO: 28678 - RNA, 23 nt, Artificial Sequence
  Synthetic
uguuguauuugaguguuuaauga

SEQ ID NO: 28679 - RNA, 23 nt, Artificial Sequence
  Synthetic
guuguauuugaguguuuaaugag

SEQ ID NO: 28680 - RNA, 23 nt, Artificial Sequence
  Synthetic
uuguauuugaguguuuaaugaga

SEQ ID NO: 28681 - RNA, 23 nt, Artificial Sequence
  Synthetic
uguauuugaguguuuaaugagaa

SEQ ID NO: 28682 - RNA, 23 nt, Artificial Sequence
  Synthetic
guauuugaguguuuaaugagaag

SEQ ID NO: 28683 - RNA, 23 nt, Artificial Sequence
  Synthetic
uauuugaguguuuaaugagaagu

SEQ ID NO: 28684 - RNA, 23 nt, Artificial Sequence
  Synthetic
auuugaguguuuaaugagaagug

SEQ ID NO: 28685 - RNA, 23 nt, Artificial Sequence
  Synthetic
uuugaguguuuaaugagaagugg

SEQ ID NO: 28686 - RNA, 23 nt, Artificial Sequence
  Synthetic
uugaguguuuaaugagaaguggu

SEQ ID NO: 28687 - RNA, 23 nt, Artificial Sequence
  Synthetic
ugaguguuuaaugagaagugguu

SEQ ID NO: 28688 - RNA, 23 nt, Artificial Sequence
  Synthetic
gaguguuuaaugagaagugguua

SEQ ID NO: 28689 - RNA, 23 nt, Artificial Sequence
  Synthetic
aguguuuaaugagaagugguuaa

SEQ ID NO: 28690 - RNA, 23 nt, Artificial Sequence
  Synthetic
guguuuaaugagaagugguuaau

SEQ ID NO: 28691 - RNA, 23 nt, Artificial Sequence
  Synthetic
uguuuaaugagaagugguuaauc

SEQ ID NO: 28692 - RNA, 23 nt, Artificial Sequence
  Synthetic
guuuaaugagaagugguuaauca

SEQ ID NO: 28693 - RNA, 23 nt, Artificial Sequence
  Synthetic
uuuaaugagaagugguuaaucau

SEQ ID NO: 28694 - RNA, 23 nt, Artificial Sequence
  Synthetic
uuaaugagaagugguuaaucauu

SEQ ID NO: 28695 - RNA, 23 nt, Artificial Sequence
  Synthetic
uaaugagaagugguuaaucauuu

SEQ ID NO: 28696 - RNA, 23 nt, Artificial Sequence
  Synthetic
aaugagaagugguuaaucauuua

SEQ ID NO: 28697 - RNA, 23 nt, Artificial Sequence
  Synthetic
augagaagugguuaaucauuuac

SEQ ID NO: 28698 - RNA, 23 nt, Artificial Sequence
  Synthetic
ugagaagugguuaaucauuuacu

SEQ ID NO: 28699 - RNA, 23 nt, Artificial Sequence
  Synthetic
gagaagugguuaaucauuuacuu

SEQ ID NO: 28700 - RNA, 23 nt, Artificial Sequence
  Synthetic
agaagugguuaaucauuuacuuc

SEQ ID NO: 28701 - RNA, 23 nt, Artificial Sequence
  Synthetic
gaagugguuaaucauuuacuucc

SEQ ID NO: 28702 - RNA, 23 nt, Artificial Sequence
  Synthetic
aagugguuaaucauuuacuuccu

SEQ ID NO: 28703 - RNA, 23 nt, Artificial Sequence
  Synthetic
agugguuaaucauuuacuuccuu

SEQ ID NO: 28704 - RNA, 23 nt, Artificial Sequence
  Synthetic
gugguuaaucauuuacuuccuuu

SEQ ID NO: 28705 - RNA, 23 nt, Artificial Sequence
  Synthetic
ugguuaaucauuuacuuccuuuu

SEQ ID NO: 28706 - RNA, 23 nt, Artificial Sequence
  Synthetic
gguuaaucauuuacuuccuuuuu

SEQ ID NO: 28707 - RNA, 23 nt, Artificial Sequence
  Synthetic
guuaaucauuuacuuccuuuuuu

SEQ ID NO: 28708 - RNA, 23 nt, Artificial Sequence
  Synthetic
uuaaucauuuacuuccuuuuuuc

SEQ ID NO: 28709 - RNA, 23 nt, Artificial Sequence
  Synthetic
uaaucauuuacuuccuuuuuuca

SEQ ID NO: 28710 - RNA, 23 nt, Artificial Sequence
  Synthetic
aaucauuuacuuccuuuuuucag

SEQ ID NO: 28711 - RNA, 23 nt, Artificial Sequence
  Synthetic
aucauuuacuuccuuuuuucagg

SEQ ID NO: 28712 - RNA, 23 nt, Artificial Sequence
  Synthetic
ucauuuacuuccuuuuuucagga

SEQ ID NO: 28713 - RNA, 23 nt, Artificial Sequence
  Synthetic
cauuuacuuccuuuuuucaggaa

SEQ ID NO: 28714 - RNA, 23 nt, Artificial Sequence
  Synthetic
auuuacuuccuuuuuucaggaaa

SEQ ID NO: 28715 - RNA, 23 nt, Artificial Sequence
  Synthetic
uuuacuuccuuuuuucaggaaag

SEQ ID NO: 28716 - RNA, 23 nt, Artificial Sequence
  Synthetic
uuacuuccuuuuuucaggaaagg

SEQ ID NO: 28717 - RNA, 23 nt, Artificial Sequence
  Synthetic
uacuuccuuuuuucaggaaaggg

SEQ ID NO: 28718 - RNA, 23 nt, Artificial Sequence
  Synthetic
acuuccuuuuuucaggaaagggg

SEQ ID NO: 28719 - RNA, 23 nt, Artificial Sequence
  Synthetic
cuuccuuuuuucaggaaagggga

SEQ ID NO: 28720 - RNA, 23 nt, Artificial Sequence
  Synthetic
uuccuuuuuucaggaaaggggaa

SEQ ID NO: 28721 - RNA, 23 nt, Artificial Sequence
  Synthetic
uccuuuuuucaggaaaggggaac

SEQ ID NO: 28722 - RNA, 23 nt, Artificial Sequence
  Synthetic
ccuuuuuucaggaaaggggaacu

SEQ ID NO: 28723 - RNA, 23 nt, Artificial Sequence
  Synthetic
cuuuuuucaggaaaggggaacuc

SEQ ID NO: 28724 - RNA, 23 nt, Artificial Sequence
  Synthetic
uuuuuucaggaaaggggaacucu

SEQ ID NO: 28725 - RNA, 23 nt, Artificial Sequence
  Synthetic
uuuuucaggaaaggggaacucuc

SEQ ID NO: 28726 - RNA, 23 nt, Artificial Sequence
  Synthetic
uuuucaggaaaggggaacucucu

SEQ ID NO: 28727 - RNA, 23 nt, Artificial Sequence
  Synthetic
uuucaggaaaggggaacucucug

SEQ ID NO: 28728 - RNA, 23 nt, Artificial Sequence
  Synthetic
uucaggaaaggggaacucucugu

SEQ ID NO: 28729 - RNA, 23 nt, Artificial Sequence
  Synthetic
ucaggaaaggggaacucucuguc

SEQ ID NO: 28730 - RNA, 23 nt, Artificial Sequence
  Synthetic
caggaaaggggaacucucugucu

SEQ ID NO: 28731 - RNA, 23 nt, Artificial Sequence
  Synthetic
aggaaaggggaacucucugucuu

SEQ ID NO: 28732 - RNA, 23 nt, Artificial Sequence
  Synthetic
ggaaaggggaacucucugucuuc

SEQ ID NO: 28733 - RNA, 23 nt, Artificial Sequence
  Synthetic
gaaaggggaacucucugucuucu

SEQ ID NO: 28734 - RNA, 23 nt, Artificial Sequence
  Synthetic
aaaggggaacucucugucuucua

SEQ ID NO: 28735 - RNA, 23 nt, Artificial Sequence
  Synthetic
aaggggaacucucugucuucuag

SEQ ID NO: 28736 - RNA, 23 nt, Artificial Sequence
  Synthetic
aggggaacucucugucuucuaga

SEQ ID NO: 28737 - RNA, 23 nt, Artificial Sequence
  Synthetic
ggggaacucucugucuucuagac

SEQ ID NO: 28738 - RNA, 23 nt, Artificial Sequence
  Synthetic
gggaacucucugucuucuagaca

SEQ ID NO: 28739 - RNA, 23 nt, Artificial Sequence
  Synthetic
ggaacucucugucuucuagacaa

SEQ ID NO: 28740 - RNA, 23 nt, Artificial Sequence
  Synthetic
gaacucucugucuucuagacaag

SEQ ID NO: 28741 - RNA, 23 nt, Artificial Sequence
  Synthetic
aacucucugucuucuagacaagg

SEQ ID NO: 28742 - RNA, 23 nt, Artificial Sequence
  Synthetic
acucucugucuucuagacaaggu

SEQ ID NO: 28743 - RNA, 23 nt, Artificial Sequence
  Synthetic
cucucugucuucuagacaagguc

SEQ ID NO: 28744 - RNA, 23 nt, Artificial Sequence
  Synthetic
ucucugucuucuagacaagguca

SEQ ID NO: 28745 - RNA, 23 nt, Artificial Sequence
  Synthetic
cucugucuucuagacaaggucac

SEQ ID NO: 28746 - RNA, 23 nt, Artificial Sequence
  Synthetic
ucugucuucuagacaaggucacc

SEQ ID NO: 28747 - RNA, 23 nt, Artificial Sequence
  Synthetic
cugucuucuagacaaggucacca

SEQ ID NO: 28748 - RNA, 23 nt, Artificial Sequence
  Synthetic
ugucuucuagacaaggucaccaa

SEQ ID NO: 28749 - RNA, 23 nt, Artificial Sequence
  Synthetic
gucuucuagacaaggucaccaac

SEQ ID NO: 28750 - RNA, 23 nt, Artificial Sequence
  Synthetic
ucuucuagacaaggucaccaaca

SEQ ID NO: 28751 - RNA, 23 nt, Artificial Sequence
  Synthetic
cuucuagacaaggucaccaacau

SEQ ID NO: 28752 - RNA, 23 nt, Artificial Sequence
  Synthetic
uucuagacaaggucaccaacauc

SEQ ID NO: 28753 - RNA, 23 nt, Artificial Sequence
  Synthetic
ucuagacaaggucaccaacaucu

SEQ ID NO: 28754 - RNA, 23 nt, Artificial Sequence
  Synthetic
cuagacaaggucaccaacaucua

SEQ ID NO: 28755 - RNA, 23 nt, Artificial Sequence
  Synthetic
uagacaaggucaccaacaucuaa

SEQ ID NO: 28756 - RNA, 23 nt, Artificial Sequence
  Synthetic
agacaaggucaccaacaucuaac

SEQ ID NO: 28757 - RNA, 23 nt, Artificial Sequence
  Synthetic
gacaaggucaccaacaucuaacc

SEQ ID NO: 28758 - RNA, 23 nt, Artificial Sequence
  Synthetic
acaaggucaccaacaucuaaccu

SEQ ID NO: 28759 - RNA, 23 nt, Artificial Sequence
  Synthetic
caaggucaccaacaucuaaccuu

SEQ ID NO: 28760 - RNA, 23 nt, Artificial Sequence
  Synthetic
aaggucaccaacaucuaaccuug

SEQ ID NO: 28761 - RNA, 23 nt, Artificial Sequence
  Synthetic
aggucaccaacaucuaaccuugg

SEQ ID NO: 28762 - RNA, 23 nt, Artificial Sequence
  Synthetic
ggucaccaacaucuaaccuuggg

SEQ ID NO: 28763 - RNA, 23 nt, Artificial Sequence
  Synthetic
gucaccaacaucuaaccuugggc

SEQ ID NO: 28764 - RNA, 23 nt, Artificial Sequence
  Synthetic
ucaccaacaucuaaccuugggcu

SEQ ID NO: 28765 - RNA, 23 nt, Artificial Sequence
  Synthetic
caccaacaucuaaccuugggcug

SEQ ID NO: 28766 - RNA, 23 nt, Artificial Sequence
  Synthetic
accaacaucuaaccuugggcugu

SEQ ID NO: 28767 - RNA, 23 nt, Artificial Sequence
  Synthetic
ccaacaucuaaccuugggcugug

SEQ ID NO: 28768 - RNA, 23 nt, Artificial Sequence
  Synthetic
caacaucuaaccuugggcugugu

SEQ ID NO: 28769 - RNA, 23 nt, Artificial Sequence
  Synthetic
aacaucuaaccuugggcuguguc

SEQ ID NO: 28770 - RNA, 23 nt, Artificial Sequence
  Synthetic
acaucuaaccuugggcugugucu

SEQ ID NO: 28771 - RNA, 23 nt, Artificial Sequence
  Synthetic
caucuaaccuugggcugugucuu

SEQ ID NO: 28772 - RNA, 23 nt, Artificial Sequence
  Synthetic
aucuaaccuugggcugugucuuc

SEQ ID NO: 28773 - RNA, 23 nt, Artificial Sequence
  Synthetic
ucuaaccuugggcugugucuucc

SEQ ID NO: 28774 - RNA, 23 nt, Artificial Sequence
  Synthetic
cuaaccuugggcugugucuuccc

SEQ ID NO: 28775 - RNA, 23 nt, Artificial Sequence
  Synthetic
uaaccuugggcugugucuuccca

SEQ ID NO: 28776 - RNA, 23 nt, Artificial Sequence
  Synthetic
aaccuugggcugugucuucccau

SEQ ID NO: 28777 - RNA, 23 nt, Artificial Sequence
  Synthetic
accuugggcugugucuucccaua

SEQ ID NO: 28778 - RNA, 23 nt, Artificial Sequence
  Synthetic
ccuugggcugugucuucccauac

SEQ ID NO: 28779 - RNA, 23 nt, Artificial Sequence
  Synthetic
cuugggcugugucuucccauaca

SEQ ID NO: 28780 - RNA, 23 nt, Artificial Sequence
  Synthetic
uugggcugugucuucccauacaa

SEQ ID NO: 28781 - RNA, 23 nt, Artificial Sequence
  Synthetic
ugggcugugucuucccauacaac

SEQ ID NO: 28782 - RNA, 23 nt, Artificial Sequence
  Synthetic
gggcugugucuucccauacaacc

SEQ ID NO: 28783 - RNA, 23 nt, Artificial Sequence
  Synthetic
ggcugugucuucccauacaaccc

SEQ ID NO: 28784 - RNA, 23 nt, Artificial Sequence
  Synthetic
gcugugucuucccauacaacccu

SEQ ID NO: 28785 - RNA, 23 nt, Artificial Sequence
  Synthetic
cugugucuucccauacaacccua

SEQ ID NO: 28786 - RNA, 23 nt, Artificial Sequence
  Synthetic
ugugucuucccauacaacccuau

SEQ ID NO: 28787 - RNA, 23 nt, Artificial Sequence
  Synthetic
gugucuucccauacaacccuauu

SEQ ID NO: 28788 - RNA, 23 nt, Artificial Sequence
  Synthetic
ugucuucccauacaacccuauuu

SEQ ID NO: 28789 - RNA, 23 nt, Artificial Sequence
  Synthetic
gucuucccauacaacccuauuua

SEQ ID NO: 28790 - RNA, 23 nt, Artificial Sequence
  Synthetic
ucuucccauacaacccuauuuac

SEQ ID NO: 28791 - RNA, 23 nt, Artificial Sequence
  Synthetic
cuucccauacaacccuauuuacg

SEQ ID NO: 28792 - RNA, 23 nt, Artificial Sequence
  Synthetic
uucccauacaacccuauuuacgu

SEQ ID NO: 28793 - RNA, 23 nt, Artificial Sequence
  Synthetic
ucccauacaacccuauuuacguc

SEQ ID NO: 28794 - RNA, 23 nt, Artificial Sequence
  Synthetic
cccauacaacccuauuuacguca

SEQ ID NO: 28795 - RNA, 23 nt, Artificial Sequence
  Synthetic
ccauacaacccuauuuacgucaa

SEQ ID NO: 28796 - RNA, 23 nt, Artificial Sequence
  Synthetic
cauacaacccuauuuacgucaac

SEQ ID NO: 28797 - RNA, 23 nt, Artificial Sequence
  Synthetic
auacaacccuauuuacgucaacc

SEQ ID NO: 28798 - RNA, 23 nt, Artificial Sequence
  Synthetic
uacaacccuauuuacgucaaccu

SEQ ID NO: 28799 - RNA, 23 nt, Artificial Sequence
  Synthetic
acaacccuauuuacgucaaccuu

SEQ ID NO: 28800 - RNA, 23 nt, Artificial Sequence
  Synthetic
caacccuauuuacgucaaccuuc

SEQ ID NO: 28801 - RNA, 23 nt, Artificial Sequence
  Synthetic
aacccuauuuacgucaaccuucc

SEQ ID NO: 28802 - RNA, 23 nt, Artificial Sequence
  Synthetic
acccuauuuacgucaaccuucca

SEQ ID NO: 28803 - RNA, 23 nt, Artificial Sequence
  Synthetic
cccuauuuacgucaaccuuccaa

SEQ ID NO: 28804 - RNA, 23 nt, Artificial Sequence
  Synthetic
ccuauuuacgucaaccuuccaau

SEQ ID NO: 28805 - RNA, 23 nt, Artificial Sequence
  Synthetic
cuauuuacgucaaccuuccaaug

SEQ ID NO: 28806 - RNA, 23 nt, Artificial Sequence
  Synthetic
uauuuacgucaaccuuccaauga

SEQ ID NO: 28807 - RNA, 23 nt, Artificial Sequence
  Synthetic
auuuacgucaaccuuccaaugac

SEQ ID NO: 28808 - RNA, 23 nt, Artificial Sequence
  Synthetic
uuuacgucaaccuuccaaugacu

SEQ ID NO: 28809 - RNA, 23 nt, Artificial Sequence
  Synthetic
uuacgucaaccuuccaaugacug

SEQ ID NO: 28810 - RNA, 23 nt, Artificial Sequence
  Synthetic
uacgucaaccuuccaaugacugc

SEQ ID NO: 28811 - RNA, 23 nt, Artificial Sequence
  Synthetic
acgucaaccuuccaaugacugcu

SEQ ID NO: 28812 - RNA, 23 nt, Artificial Sequence
  Synthetic
cgucaaccuuccaaugacugcuc

SEQ ID NO: 28813 - RNA, 23 nt, Artificial Sequence
  Synthetic
gucaaccuuccaaugacugcucc

SEQ ID NO: 28814 - RNA, 23 nt, Artificial Sequence
  Synthetic
ucaaccuuccaaugacugcuccu

SEQ ID NO: 28815 - RNA, 23 nt, Artificial Sequence
  Synthetic
caaccuuccaaugacugcuccug

SEQ ID NO: 28816 - RNA, 23 nt, Artificial Sequence
  Synthetic
aaccuuccaaugacugcuccugg

SEQ ID NO: 28817 - RNA, 23 nt, Artificial Sequence
  Synthetic
accuuccaaugacugcuccuggg

SEQ ID NO: 28818 - RNA, 23 nt, Artificial Sequence
  Synthetic
ccuuccaaugacugcuccugggg

SEQ ID NO: 28819 - RNA, 23 nt, Artificial Sequence
  Synthetic
cuuccaaugacugcuccugggga

SEQ ID NO: 28820 - RNA, 23 nt, Artificial Sequence
  Synthetic
uuccaaugacugcuccuggggac

SEQ ID NO: 28821 - RNA, 23 nt, Artificial Sequence
  Synthetic
uccaaugacugcuccuggggaca

SEQ ID NO: 28822 - RNA, 23 nt, Artificial Sequence
  Synthetic
ccaaugacugcuccuggggacag

SEQ ID NO: 28823 - RNA, 23 nt, Artificial Sequence
  Synthetic
caaugacugcuccuggggacaga

SEQ ID NO: 28824 - RNA, 23 nt, Artificial Sequence
  Synthetic
aaugacugcuccuggggacagag

SEQ ID NO: 28825 - RNA, 23 nt, Artificial Sequence
  Synthetic
augacugcuccuggggacagagu

SEQ ID NO: 28826 - RNA, 23 nt, Artificial Sequence
  Synthetic
ugacugcuccuggggacagagug

SEQ ID NO: 28827 - RNA, 23 nt, Artificial Sequence
  Synthetic
gacugcuccuggggacagagugg

SEQ ID NO: 28828 - RNA, 23 nt, Artificial Sequence
  Synthetic
acugcuccuggggacagaguggu

SEQ ID NO: 28829 - RNA, 23 nt, Artificial Sequence
  Synthetic
cugcuccuggggacagaguggug

SEQ ID NO: 28830 - RNA, 23 nt, Artificial Sequence
  Synthetic
ugcuccuggggacagagugguga

SEQ ID NO: 28831 - RNA, 23 nt, Artificial Sequence
  Synthetic
gcuccuggggacagaguggugaa

SEQ ID NO: 28832 - RNA, 23 nt, Artificial Sequence
  Synthetic
cuccuggggacagaguggugaaa

SEQ ID NO: 28833 - RNA, 23 nt, Artificial Sequence
  Synthetic
uccuggggacagaguggugaaau

SEQ ID NO: 28834 - RNA, 23 nt, Artificial Sequence
  Synthetic
ccuggggacagaguggugaaaug

SEQ ID NO: 28835 - RNA, 23 nt, Artificial Sequence
  Synthetic
cuggggacagaguggugaaaugg

SEQ ID NO: 28836 - RNA, 23 nt, Artificial Sequence
  Synthetic
uggggacagaguggugaaauggu

SEQ ID NO: 28837 - RNA, 23 nt, Artificial Sequence
  Synthetic
ggggacagaguggugaaauggua

SEQ ID NO: 28838 - RNA, 23 nt, Artificial Sequence
  Synthetic
gggacagaguggugaaaugguac

SEQ ID NO: 28839 - RNA, 23 nt, Artificial Sequence
  Synthetic
ggacagaguggugaaaugguacc

SEQ ID NO: 28840 - RNA, 23 nt, Artificial Sequence
  Synthetic
gacagaguggugaaaugguacca

SEQ ID NO: 28841 - RNA, 23 nt, Artificial Sequence
  Synthetic
acagaguggugaaaugguaccau

SEQ ID NO: 28842 - RNA, 23 nt, Artificial Sequence
  Synthetic
cagaguggugaaaugguaccaug

SEQ ID NO: 28843 - RNA, 23 nt, Artificial Sequence
  Synthetic
agaguggugaaaugguaccaugg

SEQ ID NO: 28844 - RNA, 23 nt, Artificial Sequence
  Synthetic
gaguggugaaaugguaccauggg

SEQ ID NO: 28845 - RNA, 23 nt, Artificial Sequence
  Synthetic
aguggugaaaugguaccaugggc

SEQ ID NO: 28846 - RNA, 23 nt, Artificial Sequence
  Synthetic
guggugaaaugguaccaugggca

SEQ ID NO: 28847 - RNA, 23 nt, Artificial Sequence
  Synthetic
uggugaaaugguaccaugggcau

SEQ ID NO: 28848 - RNA, 23 nt, Artificial Sequence
  Synthetic
ggugaaaugguaccaugggcauu

SEQ ID NO: 28849 - RNA, 23 nt, Artificial Sequence
  Synthetic
gugaaaugguaccaugggcauuc

SEQ ID NO: 28850 - RNA, 23 nt, Artificial Sequence
  Synthetic
ugaaaugguaccaugggcauucu

SEQ ID NO: 28851 - RNA, 23 nt, Artificial Sequence
  Synthetic
gaaaugguaccaugggcauucug

SEQ ID NO: 28852 - RNA, 23 nt, Artificial Sequence
  Synthetic
aaaugguaccaugggcauucuga

SEQ ID NO: 28853 - RNA, 23 nt, Artificial Sequence
  Synthetic
aaugguaccaugggcauucugac

SEQ ID NO: 28854 - RNA, 23 nt, Artificial Sequence
  Synthetic
augguaccaugggcauucugaca

SEQ ID NO: 28855 - RNA, 23 nt, Artificial Sequence
  Synthetic
ugguaccaugggcauucugacaa

SEQ ID NO: 28856 - RNA, 23 nt, Artificial Sequence
  Synthetic
gguaccaugggcauucugacaac

SEQ ID NO: 28857 - RNA, 23 nt, Artificial Sequence
  Synthetic
guaccaugggcauucugacaacc

SEQ ID NO: 28858 - RNA, 23 nt, Artificial Sequence
  Synthetic
uaccaugggcauucugacaacca

SEQ ID NO: 28859 - RNA, 23 nt, Artificial Sequence
  Synthetic
accaugggcauucugacaaccaa

SEQ ID NO: 28860 - RNA, 23 nt, Artificial Sequence
  Synthetic
ccaugggcauucugacaaccaac

SEQ ID NO: 28861 - RNA, 23 nt, Artificial Sequence
  Synthetic
caugggcauucugacaaccaacu

SEQ ID NO: 28862 - RNA, 23 nt, Artificial Sequence
  Synthetic
augggcauucugacaaccaacuc

SEQ ID NO: 28863 - RNA, 23 nt, Artificial Sequence
  Synthetic
ugggcauucugacaaccaacuca

SEQ ID NO: 28864 - RNA, 23 nt, Artificial Sequence
  Synthetic
gggcauucugacaaccaacucag

SEQ ID NO: 28865 - RNA, 23 nt, Artificial Sequence
  Synthetic
ggcauucugacaaccaacucaga

SEQ ID NO: 28866 - RNA, 23 nt, Artificial Sequence
  Synthetic
gcauucugacaaccaacucagag

SEQ ID NO: 28867 - RNA, 23 nt, Artificial Sequence
  Synthetic
cauucugacaaccaacucagaga

SEQ ID NO: 28868 - RNA, 23 nt, Artificial Sequence
  Synthetic
auucugacaaccaacucagagaa

SEQ ID NO: 28869 - RNA, 23 nt, Artificial Sequence
  Synthetic
uucugacaaccaacucagagaag

SEQ ID NO: 28870 - RNA, 23 nt, Artificial Sequence
  Synthetic
ucugacaaccaacucagagaaga

SEQ ID NO: 28871 - RNA, 23 nt, Artificial Sequence
  Synthetic
cugacaaccaacucagagaagag

SEQ ID NO: 28872 - RNA, 23 nt, Artificial Sequence
  Synthetic
ugacaaccaacucagagaagaga

SEQ ID NO: 28873 - RNA, 23 nt, Artificial Sequence
  Synthetic
gacaaccaacucagagaagagau

SEQ ID NO: 28874 - RNA, 23 nt, Artificial Sequence
  Synthetic
acaaccaacucagagaagagaug

SEQ ID NO: 28875 - RNA, 23 nt, Artificial Sequence
  Synthetic
caaccaacucagagaagagaugc

SEQ ID NO: 28876 - RNA, 23 nt, Artificial Sequence
  Synthetic
aaccaacucagagaagagaugcu

SEQ ID NO: 28877 - RNA, 23 nt, Artificial Sequence
  Synthetic
accaacucagagaagagaugcua

SEQ ID NO: 28878 - RNA, 23 nt, Artificial Sequence
  Synthetic
ccaacucagagaagagaugcuac

SEQ ID NO: 28879 - RNA, 23 nt, Artificial Sequence
  Synthetic
caacucagagaagagaugcuaca

SEQ ID NO: 28880 - RNA, 23 nt, Artificial Sequence
  Synthetic
aacucagagaagagaugcuacau

SEQ ID NO: 28881 - RNA, 23 nt, Artificial Sequence
  Synthetic
acucagagaagagaugcuacauc

SEQ ID NO: 28882 - RNA, 23 nt, Artificial Sequence
  Synthetic
cucagagaagagaugcuacaucc

SEQ ID NO: 28883 - RNA, 23 nt, Artificial Sequence
  Synthetic
ucagagaagagaugcuacauccu

SEQ ID NO: 28884 - RNA, 23 nt, Artificial Sequence
  Synthetic
cagagaagagaugcuacauccuu

SEQ ID NO: 28885 - RNA, 23 nt, Artificial Sequence
  Synthetic
agagaagagaugcuacauccuuu

SEQ ID NO: 28886 - RNA, 23 nt, Artificial Sequence
  Synthetic
gagaagagaugcuacauccuuug

SEQ ID NO: 28887 - RNA, 23 nt, Artificial Sequence
  Synthetic
agaagagaugcuacauccuuugc

SEQ ID NO: 28888 - RNA, 23 nt, Artificial Sequence
  Synthetic
gaagagaugcuacauccuuugcc

SEQ ID NO: 28889 - RNA, 23 nt, Artificial Sequence
  Synthetic
aagagaugcuacauccuuugccc

SEQ ID NO: 28890 - RNA, 23 nt, Artificial Sequence
  Synthetic
agagaugcuacauccuuugcccu

SEQ ID NO: 28891 - RNA, 23 nt, Artificial Sequence
  Synthetic
gagaugcuacauccuuugcccuc

SEQ ID NO: 28892 - RNA, 23 nt, Artificial Sequence
  Synthetic
agaugcuacauccuuugcccucu

SEQ ID NO: 28893 - RNA, 23 nt, Artificial Sequence
  Synthetic
gaugcuacauccuuugcccucuc

SEQ ID NO: 28894 - RNA, 23 nt, Artificial Sequence
  Synthetic
augcuacauccuuugcccucuca

SEQ ID NO: 28895 - RNA, 23 nt, Artificial Sequence
  Synthetic
ugcuacauccuuugcccucucag

SEQ ID NO: 28896 - RNA, 23 nt, Artificial Sequence
  Synthetic
gcuacauccuuugcccucucaga

SEQ ID NO: 28897 - RNA, 23 nt, Artificial Sequence
  Synthetic
cuacauccuuugcccucucagag

SEQ ID NO: 28898 - RNA, 23 nt, Artificial Sequence
  Synthetic
uacauccuuugcccucucagagg

SEQ ID NO: 28899 - RNA, 23 nt, Artificial Sequence
  Synthetic
acauccuuugcccucucagaggg

SEQ ID NO: 28900 - RNA, 23 nt, Artificial Sequence
  Synthetic
cauccuuugcccucucagagggu

SEQ ID NO: 28901 - RNA, 23 nt, Artificial Sequence
  Synthetic
auccuuugcccucucagaggguc

SEQ ID NO: 28902 - RNA, 23 nt, Artificial Sequence
  Synthetic
uccuuugcccucucagaggguca

SEQ ID NO: 28903 - RNA, 23 nt, Artificial Sequence
  Synthetic
ccuuugcccucucagagggucag

SEQ ID NO: 28904 - RNA, 23 nt, Artificial Sequence
  Synthetic
cuuugcccucucagagggucaga

SEQ ID NO: 28905 - RNA, 23 nt, Artificial Sequence
  Synthetic
uuugcccucucagagggucagaa

SEQ ID NO: 28906 - RNA, 23 nt, Artificial Sequence
  Synthetic
uugcccucucagagggucagaau

SEQ ID NO: 28907 - RNA, 23 nt, Artificial Sequence
  Synthetic
ugcccucucagagggucagaauu

SEQ ID NO: 28908 - RNA, 23 nt, Artificial Sequence
  Synthetic
gcccucucagagggucagaauug

SEQ ID NO: 28909 - RNA, 23 nt, Artificial Sequence
  Synthetic
cccucucagagggucagaauuga

SEQ ID NO: 28910 - RNA, 23 nt, Artificial Sequence
  Synthetic
ccucucagagggucagaauugag

SEQ ID NO: 28911 - RNA, 23 nt, Artificial Sequence
  Synthetic
cucucagagggucagaauugaga

SEQ ID NO: 28912 - RNA, 23 nt, Artificial Sequence
  Synthetic
ucucagagggucagaauugagaa

SEQ ID NO: 28913 - RNA, 23 nt, Artificial Sequence
  Synthetic
cucagagggucagaauugagaac

SEQ ID NO: 28914 - RNA, 23 nt, Artificial Sequence
  Synthetic
ucagagggucagaauugagaaca

SEQ ID NO: 28915 - RNA, 23 nt, Artificial Sequence
  Synthetic
cagagggucagaauugagaacau

SEQ ID NO: 28916 - RNA, 23 nt, Artificial Sequence
  Synthetic
agagggucagaauugagaacauc

SEQ ID NO: 28917 - RNA, 23 nt, Artificial Sequence
  Synthetic
gagggucagaauugagaacaucu

SEQ ID NO: 28918 - RNA, 23 nt, Artificial Sequence
  Synthetic
agggucagaauugagaacaucuc

SEQ ID NO: 28919 - RNA, 23 nt, Artificial Sequence
  Synthetic
gggucagaauugagaacaucucc

SEQ ID NO: 28920 - RNA, 23 nt, Artificial Sequence
  Synthetic
ggucagaauugagaacaucuccc

SEQ ID NO: 28921 - RNA, 23 nt, Artificial Sequence
  Synthetic
gucagaauugagaacaucuccca

SEQ ID NO: 28922 - RNA, 23 nt, Artificial Sequence
  Synthetic
ucagaauugagaacaucucccag

SEQ ID NO: 28923 - RNA, 23 nt, Artificial Sequence
  Synthetic
cagaauugagaacaucucccagu

SEQ ID NO: 28924 - RNA, 23 nt, Artificial Sequence
  Synthetic
agaauugagaacaucucccagua

SEQ ID NO: 28925 - RNA, 23 nt, Artificial Sequence
  Synthetic
gaauugagaacaucucccaguac

SEQ ID NO: 28926 - RNA, 23 nt, Artificial Sequence
  Synthetic
aauugagaacaucucccaguacc

SEQ ID NO: 28927 - RNA, 23 nt, Artificial Sequence
  Synthetic
auugagaacaucucccaguaccu

SEQ ID NO: 28928 - RNA, 23 nt, Artificial Sequence
  Synthetic
uugagaacaucucccaguaccua

SEQ ID NO: 28929 - RNA, 23 nt, Artificial Sequence
  Synthetic
ugagaacaucucccaguaccuag

SEQ ID NO: 28930 - RNA, 23 nt, Artificial Sequence
  Synthetic
gagaacaucucccaguaccuaga

SEQ ID NO: 28931 - RNA, 23 nt, Artificial Sequence
  Synthetic
agaacaucucccaguaccuagac

SEQ ID NO: 28932 - RNA, 23 nt, Artificial Sequence
  Synthetic
gaacaucucccaguaccuagaca

SEQ ID NO: 28933 - RNA, 23 nt, Artificial Sequence
  Synthetic
aacaucucccaguaccuagacau

SEQ ID NO: 28934 - RNA, 23 nt, Artificial Sequence
  Synthetic
acaucucccaguaccuagacaua

SEQ ID NO: 28935 - RNA, 23 nt, Artificial Sequence
  Synthetic
caucucccaguaccuagacauac

SEQ ID NO: 28936 - RNA, 23 nt, Artificial Sequence
  Synthetic
aucucccaguaccuagacauacu

SEQ ID NO: 28937 - RNA, 23 nt, Artificial Sequence
  Synthetic
ucucccaguaccuagacauacuc

SEQ ID NO: 28938 - RNA, 23 nt, Artificial Sequence
  Synthetic
cucccaguaccuagacauacucu

SEQ ID NO: 28939 - RNA, 23 nt, Artificial Sequence
  Synthetic
ucccaguaccuagacauacucug

SEQ ID NO: 28940 - RNA, 23 nt, Artificial Sequence
  Synthetic
cccaguaccuagacauacucugg

SEQ ID NO: 28941 - RNA, 23 nt, Artificial Sequence
  Synthetic
ccaguaccuagacauacucuggu

SEQ ID NO: 28942 - RNA, 23 nt, Artificial Sequence
  Synthetic
caguaccuagacauacucuggua

SEQ ID NO: 28943 - RNA, 23 nt, Artificial Sequence
  Synthetic
aguaccuagacauacucugguac

SEQ ID NO: 28944 - RNA, 23 nt, Artificial Sequence
  Synthetic
guaccuagacauacucugguaca

SEQ ID NO: 28945 - RNA, 23 nt, Artificial Sequence
  Synthetic
uaccuagacauacucugguacau

SEQ ID NO: 28946 - RNA, 23 nt, Artificial Sequence
  Synthetic
accuagacauacucugguacaua

SEQ ID NO: 28947 - RNA, 23 nt, Artificial Sequence
  Synthetic
ccuagacauacucugguacauau

SEQ ID NO: 28948 - RNA, 23 nt, Artificial Sequence
  Synthetic
cuagacauacucugguacauaug

SEQ ID NO: 28949 - RNA, 23 nt, Artificial Sequence
  Synthetic
uagacauacucugguacauauga

SEQ ID NO: 28950 - RNA, 23 nt, Artificial Sequence
  Synthetic
agacauacucugguacauaugaa

SEQ ID NO: 28951 - RNA, 23 nt, Artificial Sequence
  Synthetic
gacauacucugguacauaugaag

SEQ ID NO: 28952 - RNA, 23 nt, Artificial Sequence
  Synthetic
acauacucugguacauaugaagu

SEQ ID NO: 28953 - RNA, 23 nt, Artificial Sequence
  Synthetic
cauacucugguacauaugaaguu

SEQ ID NO: 28954 - RNA, 23 nt, Artificial Sequence
  Synthetic
auacucugguacauaugaaguuu

SEQ ID NO: 28955 - RNA, 23 nt, Artificial Sequence
  Synthetic
uacucugguacauaugaaguuug

SEQ ID NO: 28956 - RNA, 23 nt, Artificial Sequence
  Synthetic
acucugguacauaugaaguuugu

SEQ ID NO: 28957 - RNA, 23 nt, Artificial Sequence
  Synthetic
cucugguacauaugaaguuugug

SEQ ID NO: 28958 - RNA, 23 nt, Artificial Sequence
  Synthetic
ucugguacauaugaaguuuguga

SEQ ID NO: 28959 - RNA, 23 nt, Artificial Sequence
  Synthetic
cugguacauaugaaguuugugau

SEQ ID NO: 28960 - RNA, 23 nt, Artificial Sequence
  Synthetic
ugguacauaugaaguuugugauc

SEQ ID NO: 28961 - RNA, 23 nt, Artificial Sequence
  Synthetic
gguacauaugaaguuugugaucu

SEQ ID NO: 28962 - RNA, 23 nt, Artificial Sequence
  Synthetic
guacauaugaaguuugugaucua

SEQ ID NO: 28963 - RNA, 23 nt, Artificial Sequence
  Synthetic
uacauaugaaguuugugaucuau

SEQ ID NO: 28964 - RNA, 23 nt, Artificial Sequence
  Synthetic
acauaugaaguuugugaucuaug

SEQ ID NO: 28965 - RNA, 23 nt, Artificial Sequence
  Synthetic
cauaugaaguuugugaucuauga

SEQ ID NO: 28966 - RNA, 23 nt, Artificial Sequence
  Synthetic
auaugaaguuugugaucuaugaa

SEQ ID NO: 28967 - RNA, 23 nt, Artificial Sequence
  Synthetic
uaugaaguuugugaucuaugaau

SEQ ID NO: 28968 - RNA, 23 nt, Artificial Sequence
  Synthetic
augaaguuugugaucuaugaauu

SEQ ID NO: 28969 - RNA, 23 nt, Artificial Sequence
  Synthetic
ugaaguuugugaucuaugaauuu

SEQ ID NO: 28970 - RNA, 23 nt, Artificial Sequence
  Synthetic
gaaguuugugaucuaugaauuug

SEQ ID NO: 28971 - RNA, 23 nt, Artificial Sequence
  Synthetic
aaguuugugaucuaugaauuugg

SEQ ID NO: 28972 - RNA, 23 nt, Artificial Sequence
  Synthetic
aguuugugaucuaugaauuugga

SEQ ID NO: 28973 - RNA, 23 nt, Artificial Sequence
  Synthetic
guuugugaucuaugaauuuggac

SEQ ID NO: 28974 - RNA, 23 nt, Artificial Sequence
  Synthetic
uuugugaucuaugaauuuggacc

SEQ ID NO: 28975 - RNA, 23 nt, Artificial Sequence
  Synthetic
uugugaucuaugaauuuggacca

SEQ ID NO: 28976 - RNA, 23 nt, Artificial Sequence
  Synthetic
ugugaucuaugaauuuggaccac

SEQ ID NO: 28977 - RNA, 23 nt, Artificial Sequence
  Synthetic
gugaucuaugaauuuggaccaca

SEQ ID NO: 28978 - RNA, 23 nt, Artificial Sequence
  Synthetic
ugaucuaugaauuuggaccacag

SEQ ID NO: 28979 - RNA, 23 nt, Artificial Sequence
  Synthetic
gaucuaugaauuuggaccacaga

SEQ ID NO: 28980 - RNA, 23 nt, Artificial Sequence
  Synthetic
aucuaugaauuuggaccacagaa

SEQ ID NO: 28981 - RNA, 23 nt, Artificial Sequence
  Synthetic
ucuaugaauuuggaccacagaau

SEQ ID NO: 28982 - RNA, 23 nt, Artificial Sequence
  Synthetic
cuaugaauuuggaccacagaauc

SEQ ID NO: 28983 - RNA, 23 nt, Artificial Sequence
  Synthetic
uaugaauuuggaccacagaaucc

SEQ ID NO: 28984 - RNA, 23 nt, Artificial Sequence
  Synthetic
augaauuuggaccacagaaucca

SEQ ID NO: 28985 - RNA, 23 nt, Artificial Sequence
  Synthetic
ugaauuuggaccacagaauccac

SEQ ID NO: 28986 - RNA, 23 nt, Artificial Sequence
  Synthetic
gaauuuggaccacagaauccacc

SEQ ID NO: 28987 - RNA, 23 nt, Artificial Sequence
  Synthetic
aauuuggaccacagaauccacca

SEQ ID NO: 28988 - RNA, 23 nt, Artificial Sequence
  Synthetic
auuuggaccacagaauccaccac

SEQ ID NO: 28989 - RNA, 23 nt, Artificial Sequence
  Synthetic
uuuggaccacagaauccaccacu

SEQ ID NO: 28990 - RNA, 23 nt, Artificial Sequence
  Synthetic
uuggaccacagaauccaccacua

SEQ ID NO: 28991 - RNA, 23 nt, Artificial Sequence
  Synthetic
uggaccacagaauccaccacuac

SEQ ID NO: 28992 - RNA, 23 nt, Artificial Sequence
  Synthetic
ggaccacagaauccaccacuaca

SEQ ID NO: 28993 - RNA, 23 nt, Artificial Sequence
  Synthetic
gaccacagaauccaccacuacau

SEQ ID NO: 28994 - RNA, 23 nt, Artificial Sequence
  Synthetic
accacagaauccaccacuacauc

SEQ ID NO: 28995 - RNA, 23 nt, Artificial Sequence
  Synthetic
ccacagaauccaccacuacaucu

SEQ ID NO: 28996 - RNA, 23 nt, Artificial Sequence
  Synthetic
cacagaauccaccacuacaucua

SEQ ID NO: 28997 - RNA, 23 nt, Artificial Sequence
  Synthetic
acagaauccaccacuacaucuag

SEQ ID NO: 28998 - RNA, 23 nt, Artificial Sequence
  Synthetic
cagaauccaccacuacaucuagc

SEQ ID NO: 28999 - RNA, 23 nt, Artificial Sequence
  Synthetic
agaauccaccacuacaucuagcu

SEQ ID NO: 29000 - RNA, 23 nt, Artificial Sequence
  Synthetic
gaauccaccacuacaucuagcuc

SEQ ID NO: 29001 - RNA, 23 nt, Artificial Sequence
  Synthetic
aauccaccacuacaucuagcucu

SEQ ID NO: 29002 - RNA, 23 nt, Artificial Sequence
  Synthetic
auccaccacuacaucuagcucuu

SEQ ID NO: 29003 - RNA, 23 nt, Artificial Sequence
  Synthetic
uccaccacuacaucuagcucuua

SEQ ID NO: 29004 - RNA, 23 nt, Artificial Sequence
  Synthetic
ccaccacuacaucuagcucuuac

SEQ ID NO: 29005 - RNA, 23 nt, Artificial Sequence
  Synthetic
caccacuacaucuagcucuuacu

SEQ ID NO: 29006 - RNA, 23 nt, Artificial Sequence
  Synthetic
accacuacaucuagcucuuacuu

SEQ ID NO: 29007 - RNA, 23 nt, Artificial Sequence
  Synthetic
ccacuacaucuagcucuuacuuc

SEQ ID NO: 29008 - RNA, 23 nt, Artificial Sequence
  Synthetic
cacuacaucuagcucuuacuucu

SEQ ID NO: 29009 - RNA, 23 nt, Artificial Sequence
  Synthetic
acuacaucuagcucuuacuucuc

SEQ ID NO: 29010 - RNA, 23 nt, Artificial Sequence
  Synthetic
cuacaucuagcucuuacuucucu

SEQ ID NO: 29011 - RNA, 23 nt, Artificial Sequence
  Synthetic
uacaucuagcucuuacuucucuc

SEQ ID NO: 29012 - RNA, 23 nt, Artificial Sequence
  Synthetic
acaucuagcucuuacuucucucc

SEQ ID NO: 29013 - RNA, 23 nt, Artificial Sequence
  Synthetic
caucuagcucuuacuucucucca

SEQ ID NO: 29014 - RNA, 23 nt, Artificial Sequence
  Synthetic
aucuagcucuuacuucucuccaa

SEQ ID NO: 29015 - RNA, 23 nt, Artificial Sequence
  Synthetic
ucuagcucuuacuucucuccaau

SEQ ID NO: 29016 - RNA, 23 nt, Artificial Sequence
  Synthetic
cuagcucuuacuucucuccaaug

SEQ ID NO: 29017 - RNA, 23 nt, Artificial Sequence
  Synthetic
uagcucuuacuucucuccaaugc

SEQ ID NO: 29018 - RNA, 23 nt, Artificial Sequence
  Synthetic
agcucuuacuucucuccaaugcc

SEQ ID NO: 29019 - RNA, 23 nt, Artificial Sequence
  Synthetic
gcucuuacuucucuccaaugccc

SEQ ID NO: 29020 - RNA, 23 nt, Artificial Sequence
  Synthetic
cucuuacuucucuccaaugcccu

SEQ ID NO: 29021 - RNA, 23 nt, Artificial Sequence
  Synthetic
ucuuacuucucuccaaugcccug

SEQ ID NO: 29022 - RNA, 23 nt, Artificial Sequence
  Synthetic
cuuacuucucuccaaugcccugc

SEQ ID NO: 29023 - RNA, 23 nt, Artificial Sequence
  Synthetic
uuacuucucuccaaugcccugcu

SEQ ID NO: 29024 - RNA, 23 nt, Artificial Sequence
  Synthetic
uacuucucuccaaugcccugcug

SEQ ID NO: 29025 - RNA, 23 nt, Artificial Sequence
  Synthetic
acuucucuccaaugcccugcugg

SEQ ID NO: 29026 - RNA, 23 nt, Artificial Sequence
  Synthetic
cuucucuccaaugcccugcuggu

SEQ ID NO: 29027 - RNA, 23 nt, Artificial Sequence
  Synthetic
uucucuccaaugcccugcugguu

SEQ ID NO: 29028 - RNA, 23 nt, Artificial Sequence
  Synthetic
ucucuccaaugcccugcugguuc

SEQ ID NO: 29029 - RNA, 23 nt, Artificial Sequence
  Synthetic
cucuccaaugcccugcugguuca

SEQ ID NO: 29030 - RNA, 23 nt, Artificial Sequence
  Synthetic
ucuccaaugcccugcugguucag

SEQ ID NO: 29031 - RNA, 23 nt, Artificial Sequence
  Synthetic
cuccaaugcccugcugguucagu

SEQ ID NO: 29032 - RNA, 23 nt, Artificial Sequence
  Synthetic
uccaaugcccugcugguucaguc

SEQ ID NO: 29033 - RNA, 23 nt, Artificial Sequence
  Synthetic
ccaaugcccugcugguucaguca

SEQ ID NO: 29034 - RNA, 23 nt, Artificial Sequence
  Synthetic
caaugcccugcugguucagucaa

SEQ ID NO: 29035 - RNA, 23 nt, Artificial Sequence
  Synthetic
aaugcccugcugguucagucaac

SEQ ID NO: 29036 - RNA, 23 nt, Artificial Sequence
  Synthetic
augcccugcugguucagucaaca

SEQ ID NO: 29037 - RNA, 23 nt, Artificial Sequence
  Synthetic
ugcccugcugguucagucaacag

SEQ ID NO: 29038 - RNA, 23 nt, Artificial Sequence
  Synthetic
gcccugcugguucagucaacagu

SEQ ID NO: 29039 - RNA, 23 nt, Artificial Sequence
  Synthetic
cccugcugguucagucaacagua

SEQ ID NO: 29040 - RNA, 23 nt, Artificial Sequence
  Synthetic
ccugcugguucagucaacaguaa

SEQ ID NO: 29041 - RNA, 23 nt, Artificial Sequence
  Synthetic
cugcugguucagucaacaguaag

SEQ ID NO: 29042 - RNA, 23 nt, Artificial Sequence
  Synthetic
ugcugguucagucaacaguaagu

SEQ ID NO: 29043 - RNA, 23 nt, Artificial Sequence
  Synthetic
gcugguucagucaacaguaaguc

SEQ ID NO: 29044 - RNA, 23 nt, Artificial Sequence
  Synthetic
cugguucagucaacaguaaguca

SEQ ID NO: 29045 - RNA, 23 nt, Artificial Sequence
  Synthetic
ugguucagucaacaguaagucaa

SEQ ID NO: 29046 - RNA, 23 nt, Artificial Sequence
  Synthetic
gguucagucaacaguaagucaac

SEQ ID NO: 29047 - RNA, 23 nt, Artificial Sequence
  Synthetic
guucagucaacaguaagucaaca

SEQ ID NO: 29048 - RNA, 23 nt, Artificial Sequence
  Synthetic
uucagucaacaguaagucaacag

SEQ ID NO: 29049 - RNA, 23 nt, Artificial Sequence
  Synthetic
ucagucaacaguaagucaacaga

SEQ ID NO: 29050 - RNA, 23 nt, Artificial Sequence
  Synthetic
cagucaacaguaagucaacagac

SEQ ID NO: 29051 - RNA, 23 nt, Artificial Sequence
  Synthetic
agucaacaguaagucaacagaca

SEQ ID NO: 29052 - RNA, 23 nt, Artificial Sequence
  Synthetic
gucaacaguaagucaacagacag

SEQ ID NO: 29053 - RNA, 23 nt, Artificial Sequence
  Synthetic
ucaacaguaagucaacagacaga

SEQ ID NO: 29054 - RNA, 23 nt, Artificial Sequence
  Synthetic
caacaguaagucaacagacagac

SEQ ID NO: 29055 - RNA, 23 nt, Artificial Sequence
  Synthetic
aacaguaagucaacagacagaca

SEQ ID NO: 29056 - RNA, 23 nt, Artificial Sequence
  Synthetic
acaguaagucaacagacagacau

SEQ ID NO: 29057 - RNA, 23 nt, Artificial Sequence
  Synthetic
caguaagucaacagacagacaug

SEQ ID NO: 29058 - RNA, 23 nt, Artificial Sequence
  Synthetic
aguaagucaacagacagacaugu

SEQ ID NO: 29059 - RNA, 23 nt, Artificial Sequence
  Synthetic
guaagucaacagacagacaugua

SEQ ID NO: 29060 - RNA, 23 nt, Artificial Sequence
  Synthetic
uaagucaacagacagacauguaa

SEQ ID NO: 29061 - RNA, 23 nt, Artificial Sequence
  Synthetic
aagucaacagacagacauguaag

SEQ ID NO: 29062 - RNA, 23 nt, Artificial Sequence
  Synthetic
agucaacagacagacauguaaga

SEQ ID NO: 29063 - RNA, 23 nt, Artificial Sequence
  Synthetic
gucaacagacagacauguaagag

SEQ ID NO: 29064 - RNA, 23 nt, Artificial Sequence
  Synthetic
ucaacagacagacauguaagagc

SEQ ID NO: 29065 - RNA, 23 nt, Artificial Sequence
  Synthetic
caacagacagacauguaagagcu

SEQ ID NO: 29066 - RNA, 23 nt, Artificial Sequence
  Synthetic
aacagacagacauguaagagcua

SEQ ID NO: 29067 - RNA, 23 nt, Artificial Sequence
  Synthetic
acagacagacauguaagagcuaa

SEQ ID NO: 29068 - RNA, 23 nt, Artificial Sequence
  Synthetic
cagacagacauguaagagcuaau

SEQ ID NO: 29069 - RNA, 23 nt, Artificial Sequence
  Synthetic
agacagacauguaagagcuaaug

SEQ ID NO: 29070 - RNA, 23 nt, Artificial Sequence
  Synthetic
gacagacauguaagagcuaaugu

SEQ ID NO: 29071 - RNA, 23 nt, Artificial Sequence
  Synthetic
acagacauguaagagcuaaugua

SEQ ID NO: 29072 - RNA, 23 nt, Artificial Sequence
  Synthetic
cagacauguaagagcuaauguaa

SEQ ID NO: 29073 - RNA, 23 nt, Artificial Sequence
  Synthetic
agacauguaagagcuaauguaag

SEQ ID NO: 29074 - RNA, 23 nt, Artificial Sequence
  Synthetic
gacauguaagagcuaauguaaga

SEQ ID NO: 29075 - RNA, 23 nt, Artificial Sequence
  Synthetic
acauguaagagcuaauguaagau

SEQ ID NO: 29076 - RNA, 23 nt, Artificial Sequence
  Synthetic
cauguaagagcuaauguaagaug

SEQ ID NO: 29077 - RNA, 23 nt, Artificial Sequence
  Synthetic
auguaagagcuaauguaagaugc

SEQ ID NO: 29078 - RNA, 23 nt, Artificial Sequence
  Synthetic
uguaagagcuaauguaagaugcu

SEQ ID NO: 29079 - RNA, 23 nt, Artificial Sequence
  Synthetic
guaagagcuaauguaagaugcua

SEQ ID NO: 29080 - RNA, 23 nt, Artificial Sequence
  Synthetic
uaagagcuaauguaagaugcuag

SEQ ID NO: 29081 - RNA, 23 nt, Artificial Sequence
  Synthetic
aagagcuaauguaagaugcuagg

SEQ ID NO: 29082 - RNA, 23 nt, Artificial Sequence
  Synthetic
agagcuaauguaagaugcuaggc

SEQ ID NO: 29083 - RNA, 23 nt, Artificial Sequence
  Synthetic
gagcuaauguaagaugcuaggca

SEQ ID NO: 29084 - RNA, 23 nt, Artificial Sequence
  Synthetic
agcuaauguaagaugcuaggcag

SEQ ID NO: 29085 - RNA, 23 nt, Artificial Sequence
  Synthetic
gcuaauguaagaugcuaggcaga

SEQ ID NO: 29086 - RNA, 23 nt, Artificial Sequence
  Synthetic
cuaauguaagaugcuaggcagaa

SEQ ID NO: 29087 - RNA, 23 nt, Artificial Sequence
  Synthetic
uaauguaagaugcuaggcagaau

SEQ ID NO: 29088 - RNA, 23 nt, Artificial Sequence
  Synthetic
aauguaagaugcuaggcagaaug

SEQ ID NO: 29089 - RNA, 23 nt, Artificial Sequence
  Synthetic
auguaagaugcuaggcagaaugc

SEQ ID NO: 29090 - RNA, 23 nt, Artificial Sequence
  Synthetic
uguaagaugcuaggcagaaugca

SEQ ID NO: 29091 - RNA, 23 nt, Artificial Sequence
  Synthetic
guaagaugcuaggcagaaugcaa

SEQ ID NO: 29092 - RNA, 23 nt, Artificial Sequence
  Synthetic
uaagaugcuaggcagaaugcaag

SEQ ID NO: 29093 - RNA, 23 nt, Artificial Sequence
  Synthetic
aagaugcuaggcagaaugcaaga

SEQ ID NO: 29094 - RNA, 23 nt, Artificial Sequence
  Synthetic
agaugcuaggcagaaugcaagau

SEQ ID NO: 29095 - RNA, 23 nt, Artificial Sequence
  Synthetic
gaugcuaggcagaaugcaagaug

SEQ ID NO: 29096 - RNA, 23 nt, Artificial Sequence
  Synthetic
augcuaggcagaaugcaagaugu

SEQ ID NO: 29097 - RNA, 23 nt, Artificial Sequence
  Synthetic
ugcuaggcagaaugcaagaugua

SEQ ID NO: 29098 - RNA, 23 nt, Artificial Sequence
  Synthetic
gcuaggcagaaugcaagauguaa

SEQ ID NO: 29099 - RNA, 23 nt, Artificial Sequence
  Synthetic
cuaggcagaaugcaagauguaag

SEQ ID NO: 29100 - RNA, 23 nt, Artificial Sequence
  Synthetic
uaggcagaaugcaagauguaaga

SEQ ID NO: 29101 - RNA, 23 nt, Artificial Sequence
  Synthetic
aggcagaaugcaagauguaagau

SEQ ID NO: 29102 - RNA, 23 nt, Artificial Sequence
  Synthetic
ggcagaaugcaagauguaagaug

SEQ ID NO: 29103 - RNA, 23 nt, Artificial Sequence
  Synthetic
gcagaaugcaagauguaagaugu

SEQ ID NO: 29104 - RNA, 23 nt, Artificial Sequence
  Synthetic
cagaaugcaagauguaagaugua

SEQ ID NO: 29105 - RNA, 23 nt, Artificial Sequence
  Synthetic
agaaugcaagauguaagauguaa

SEQ ID NO: 29106 - RNA, 23 nt, Artificial Sequence
  Synthetic
gaaugcaagauguaagauguaag

SEQ ID NO: 29107 - RNA, 23 nt, Artificial Sequence
  Synthetic
aaugcaagauguaagauguaaga

SEQ ID NO: 29108 - RNA, 23 nt, Artificial Sequence
  Synthetic
augcaagauguaagauguaagau

SEQ ID NO: 29109 - RNA, 23 nt, Artificial Sequence
  Synthetic
ugcaagauguaagauguaagaug

SEQ ID NO: 29110 - RNA, 23 nt, Artificial Sequence
  Synthetic
gcaagauguaagauguaagaugu

SEQ ID NO: 29111 - RNA, 23 nt, Artificial Sequence
  Synthetic
caagauguaagauguaagaugua

SEQ ID NO: 29112 - RNA, 23 nt, Artificial Sequence
  Synthetic
aagauguaagauguaagauguaa

SEQ ID NO: 29113 - RNA, 23 nt, Artificial Sequence
  Synthetic
agauguaagauguaagauguaag

SEQ ID NO: 29114 - RNA, 23 nt, Artificial Sequence
  Synthetic
gauguaagauguaagauguaaga

SEQ ID NO: 29115 - RNA, 23 nt, Artificial Sequence
  Synthetic
auguaagauguaagauguaagau

SEQ ID NO: 29116 - RNA, 23 nt, Artificial Sequence
  Synthetic
uguaagauguaagauguaagaug

SEQ ID NO: 29117 - RNA, 23 nt, Artificial Sequence
  Synthetic
guaagauguaagauguaagaugu

SEQ ID NO: 29118 - RNA, 23 nt, Artificial Sequence
  Synthetic
uaagauguaagauguaagaugua

SEQ ID NO: 29119 - RNA, 23 nt, Artificial Sequence
  Synthetic
aagauguaagauguaagauguaa

SEQ ID NO: 29120 - RNA, 23 nt, Artificial Sequence
  Synthetic
agauguaagauguaagauguaag

SEQ ID NO: 29121 - RNA, 23 nt, Artificial Sequence
  Synthetic
gauguaagauguaagauguaagc

SEQ ID NO: 29122 - RNA, 23 nt, Artificial Sequence
  Synthetic
auguaagauguaagauguaagca

SEQ ID NO: 29123 - RNA, 23 nt, Artificial Sequence
  Synthetic
uguaagauguaagauguaagcau

SEQ ID NO: 29124 - RNA, 23 nt, Artificial Sequence
  Synthetic
guaagauguaagauguaagcaug

SEQ ID NO: 29125 - RNA, 23 nt, Artificial Sequence
  Synthetic
uaagauguaagauguaagcaugu

SEQ ID NO: 29126 - RNA, 23 nt, Artificial Sequence
  Synthetic
aagauguaagauguaagcaugua

SEQ ID NO: 29127 - RNA, 23 nt, Artificial Sequence
  Synthetic
agauguaagauguaagcauguaa

SEQ ID NO: 29128 - RNA, 23 nt, Artificial Sequence
  Synthetic
gauguaagauguaagcauguaag

SEQ ID NO: 29129 - RNA, 23 nt, Artificial Sequence
  Synthetic
auguaagauguaagcauguaaga

SEQ ID NO: 29130 - RNA, 23 nt, Artificial Sequence
  Synthetic
uguaagauguaagcauguaagau

SEQ ID NO: 29131 - RNA, 23 nt, Artificial Sequence
  Synthetic
guaagauguaagcauguaagaug

SEQ ID NO: 29132 - RNA, 23 nt, Artificial Sequence
  Synthetic
uaagauguaagcauguaagaugc

SEQ ID NO: 29133 - RNA, 23 nt, Artificial Sequence
  Synthetic
aagauguaagcauguaagaugcu

SEQ ID NO: 29134 - RNA, 23 nt, Artificial Sequence
  Synthetic
agauguaagcauguaagaugcua

SEQ ID NO: 29135 - RNA, 23 nt, Artificial Sequence
  Synthetic
gauguaagcauguaagaugcuag

SEQ ID NO: 29136 - RNA, 23 nt, Artificial Sequence
  Synthetic
auguaagcauguaagaugcuagg

SEQ ID NO: 29137 - RNA, 23 nt, Artificial Sequence
  Synthetic
uguaagcauguaagaugcuaggc

SEQ ID NO: 29138 - RNA, 23 nt, Artificial Sequence
  Synthetic
guaagcauguaagaugcuaggca

SEQ ID NO: 29139 - RNA, 23 nt, Artificial Sequence
  Synthetic
uaagcauguaagaugcuaggcag

SEQ ID NO: 29140 - RNA, 23 nt, Artificial Sequence
  Synthetic
aagcauguaagaugcuaggcaga

SEQ ID NO: 29141 - RNA, 23 nt, Artificial Sequence
  Synthetic
agcauguaagaugcuaggcagaa

SEQ ID NO: 29142 - RNA, 23 nt, Artificial Sequence
  Synthetic
gcauguaagaugcuaggcagaau

SEQ ID NO: 29143 - RNA, 23 nt, Artificial Sequence
  Synthetic
cauguaagaugcuaggcagaauc

SEQ ID NO: 29144 - RNA, 23 nt, Artificial Sequence
  Synthetic
auguaagaugcuaggcagaaucc

SEQ ID NO: 29145 - RNA, 23 nt, Artificial Sequence
  Synthetic
uguaagaugcuaggcagaaucca

SEQ ID NO: 29146 - RNA, 23 nt, Artificial Sequence
  Synthetic
guaagaugcuaggcagaauccag

SEQ ID NO: 29147 - RNA, 23 nt, Artificial Sequence
  Synthetic
uaagaugcuaggcagaauccaga

SEQ ID NO: 29148 - RNA, 23 nt, Artificial Sequence
  Synthetic
aagaugcuaggcagaauccagag

SEQ ID NO: 29149 - RNA, 23 nt, Artificial Sequence
  Synthetic
agaugcuaggcagaauccagaga

SEQ ID NO: 29150 - RNA, 23 nt, Artificial Sequence
  Synthetic
gaugcuaggcagaauccagagac

SEQ ID NO: 29151 - RNA, 23 nt, Artificial Sequence
  Synthetic
augcuaggcagaauccagagaca

SEQ ID NO: 29152 - RNA, 23 nt, Artificial Sequence
  Synthetic
ugcuaggcagaauccagagacaa

SEQ ID NO: 29153 - RNA, 23 nt, Artificial Sequence
  Synthetic
gcuaggcagaauccagagacaaa

SEQ ID NO: 29154 - RNA, 23 nt, Artificial Sequence
  Synthetic
cuaggcagaauccagagacaaag

SEQ ID NO: 29155 - RNA, 23 nt, Artificial Sequence
  Synthetic
uaggcagaauccagagacaaagu

SEQ ID NO: 29156 - RNA, 23 nt, Artificial Sequence
  Synthetic
aggcagaauccagagacaaaguu

SEQ ID NO: 29157 - RNA, 23 nt, Artificial Sequence
  Synthetic
ggcagaauccagagacaaaguug

SEQ ID NO: 29158 - RNA, 23 nt, Artificial Sequence
  Synthetic
gcagaauccagagacaaaguugg

SEQ ID NO: 29159 - RNA, 23 nt, Artificial Sequence
  Synthetic
cagaauccagagacaaaguugga

SEQ ID NO: 29160 - RNA, 23 nt, Artificial Sequence
  Synthetic
agaauccagagacaaaguuggaa

SEQ ID NO: 29161 - RNA, 23 nt, Artificial Sequence
  Synthetic
gaauccagagacaaaguuggaag

SEQ ID NO: 29162 - RNA, 23 nt, Artificial Sequence
  Synthetic
aauccagagacaaaguuggaaga

SEQ ID NO: 29163 - RNA, 23 nt, Artificial Sequence
  Synthetic
auccagagacaaaguuggaagau

SEQ ID NO: 29164 - RNA, 23 nt, Artificial Sequence
  Synthetic
uccagagacaaaguuggaagaug

SEQ ID NO: 29165 - RNA, 23 nt, Artificial Sequence
  Synthetic
ccagagacaaaguuggaagaugu

SEQ ID NO: 29166 - RNA, 23 nt, Artificial Sequence
  Synthetic
cagagacaaaguuggaagauguc

SEQ ID NO: 29167 - RNA, 23 nt, Artificial Sequence
  Synthetic
agagacaaaguuggaagauguca

SEQ ID NO: 29168 - RNA, 23 nt, Artificial Sequence
  Synthetic
gagacaaaguuggaagaugucac

SEQ ID NO: 29169 - RNA, 23 nt, Artificial Sequence
  Synthetic
agacaaaguuggaagaugucacc

SEQ ID NO: 29170 - RNA, 23 nt, Artificial Sequence
  Synthetic
gacaaaguuggaagaugucaccc

SEQ ID NO: 29171 - RNA, 23 nt, Artificial Sequence
  Synthetic
acaaaguuggaagaugucacccu

SEQ ID NO: 29172 - RNA, 23 nt, Artificial Sequence
  Synthetic
caaaguuggaagaugucacccug

SEQ ID NO: 29173 - RNA, 23 nt, Artificial Sequence
  Synthetic
aaaguuggaagaugucacccugu

SEQ ID NO: 29174 - RNA, 23 nt, Artificial Sequence
  Synthetic
aaguuggaagaugucacccugug

SEQ ID NO: 29175 - RNA, 23 nt, Artificial Sequence
  Synthetic
aguuggaagaugucacccugugu

SEQ ID NO: 29176 - RNA, 23 nt, Artificial Sequence
  Synthetic
guuggaagaugucacccugugua

SEQ ID NO: 29177 - RNA, 23 nt, Artificial Sequence
  Synthetic
uuggaagaugucacccuguguaa

SEQ ID NO: 29178 - RNA, 23 nt, Artificial Sequence
  Synthetic
uggaagaugucacccuguguaac

SEQ ID NO: 29179 - RNA, 23 nt, Artificial Sequence
  Synthetic
ggaagaugucacccuguguaaca

SEQ ID NO: 29180 - RNA, 23 nt, Artificial Sequence
  Synthetic
gaagaugucacccuguguaacag

SEQ ID NO: 29181 - RNA, 23 nt, Artificial Sequence
  Synthetic
aagaugucacccuguguaacaga

SEQ ID NO: 29182 - RNA, 23 nt, Artificial Sequence
  Synthetic
agaugucacccuguguaacagaa

SEQ ID NO: 29183 - RNA, 23 nt, Artificial Sequence
  Synthetic
gaugucacccuguguaacagaag

SEQ ID NO: 29184 - RNA, 23 nt, Artificial Sequence
  Synthetic
augucacccuguguaacagaagu

SEQ ID NO: 29185 - RNA, 23 nt, Artificial Sequence
  Synthetic
ugucacccuguguaacagaaguu

SEQ ID NO: 29186 - RNA, 23 nt, Artificial Sequence
  Synthetic
gucacccuguguaacagaaguuu

SEQ ID NO: 29187 - RNA, 23 nt, Artificial Sequence
  Synthetic
ucacccuguguaacagaaguuuc

SEQ ID NO: 29188 - RNA, 23 nt, Artificial Sequence
  Synthetic
cacccuguguaacagaaguuucu

SEQ ID NO: 29189 - RNA, 23 nt, Artificial Sequence
  Synthetic
acccuguguaacagaaguuucua

SEQ ID NO: 29190 - RNA, 23 nt, Artificial Sequence
  Synthetic
cccuguguaacagaaguuucuag

SEQ ID NO: 29191 - RNA, 23 nt, Artificial Sequence
  Synthetic
ccuguguaacagaaguuucuagg

SEQ ID NO: 29192 - RNA, 23 nt, Artificial Sequence
  Synthetic
cuguguaacagaaguuucuagga

SEQ ID NO: 29193 - RNA, 23 nt, Artificial Sequence
  Synthetic
uguguaacagaaguuucuaggac

SEQ ID NO: 29194 - RNA, 23 nt, Artificial Sequence
  Synthetic
guguaacagaaguuucuaggacu

SEQ ID NO: 29195 - RNA, 23 nt, Artificial Sequence
  Synthetic
uguaacagaaguuucuaggacuc

SEQ ID NO: 29196 - RNA, 23 nt, Artificial Sequence
  Synthetic
guaacagaaguuucuaggacucu

SEQ ID NO: 29197 - RNA, 23 nt, Artificial Sequence
  Synthetic
uaacagaaguuucuaggacucug

SEQ ID NO: 29198 - RNA, 23 nt, Artificial Sequence
  Synthetic
aacagaaguuucuaggacucugc

SEQ ID NO: 29199 - RNA, 23 nt, Artificial Sequence
  Synthetic
acagaaguuucuaggacucugca

SEQ ID NO: 29200 - RNA, 23 nt, Artificial Sequence
  Synthetic
cagaaguuucuaggacucugcac

SEQ ID NO: 29201 - RNA, 23 nt, Artificial Sequence
  Synthetic
agaaguuucuaggacucugcaca

SEQ ID NO: 29202 - RNA, 23 nt, Artificial Sequence
  Synthetic
gaaguuucuaggacucugcacac

SEQ ID NO: 29203 - RNA, 23 nt, Artificial Sequence
  Synthetic
aaguuucuaggacucugcacacu

SEQ ID NO: 29204 - RNA, 23 nt, Artificial Sequence
  Synthetic
aguuucuaggacucugcacacua

SEQ ID NO: 29205 - RNA, 23 nt, Artificial Sequence
  Synthetic
guuucuaggacucugcacacuau

SEQ ID NO: 29206 - RNA, 23 nt, Artificial Sequence
  Synthetic
uuucuaggacucugcacacuaug

SEQ ID NO: 29207 - RNA, 23 nt, Artificial Sequence
  Synthetic
uucuaggacucugcacacuaugc

SEQ ID NO: 29208 - RNA, 23 nt, Artificial Sequence
  Synthetic
ucuaggacucugcacacuaugca

SEQ ID NO: 29209 - RNA, 23 nt, Artificial Sequence
  Synthetic
cuaggacucugcacacuaugcau

SEQ ID NO: 29210 - RNA, 23 nt, Artificial Sequence
  Synthetic
uaggacucugcacacuaugcaua

SEQ ID NO: 29211 - RNA, 23 nt, Artificial Sequence
  Synthetic
aggacucugcacacuaugcauau

SEQ ID NO: 29212 - RNA, 23 nt, Artificial Sequence
  Synthetic
ggacucugcacacuaugcauauu

SEQ ID NO: 29213 - RNA, 23 nt, Artificial Sequence
  Synthetic
gacucugcacacuaugcauauua

SEQ ID NO: 29214 - RNA, 23 nt, Artificial Sequence
  Synthetic
acucugcacacuaugcauauuaa

SEQ ID NO: 29215 - RNA, 23 nt, Artificial Sequence
  Synthetic
cucugcacacuaugcauauuaau

SEQ ID NO: 29216 - RNA, 23 nt, Artificial Sequence
  Synthetic
ucugcacacuaugcauauuaaua

SEQ ID NO: 29217 - RNA, 23 nt, Artificial Sequence
  Synthetic
cugcacacuaugcauauuaauaa

SEQ ID NO: 29218 - RNA, 23 nt, Artificial Sequence
  Synthetic
ugcacacuaugcauauuaauaac

SEQ ID NO: 29219 - RNA, 23 nt, Artificial Sequence
  Synthetic
gcacacuaugcauauuaauaacg

SEQ ID NO: 29220 - RNA, 23 nt, Artificial Sequence
  Synthetic
cacacuaugcauauuaauaacgu

SEQ ID NO: 29221 - RNA, 23 nt, Artificial Sequence
  Synthetic
acacuaugcauauuaauaacgua

SEQ ID NO: 29222 - RNA, 23 nt, Artificial Sequence
  Synthetic
cacuaugcauauuaauaacguau

SEQ ID NO: 29223 - RNA, 23 nt, Artificial Sequence
  Synthetic
acuaugcauauuaauaacguauu

SEQ ID NO: 29224 - RNA, 23 nt, Artificial Sequence
  Synthetic
cuaugcauauuaauaacguauuu

SEQ ID NO: 29225 - RNA, 23 nt, Artificial Sequence
  Synthetic
uaugcauauuaauaacguauuua

SEQ ID NO: 29226 - RNA, 23 nt, Artificial Sequence
  Synthetic
augcauauuaauaacguauuuaa

SEQ ID NO: 29227 - RNA, 23 nt, Artificial Sequence
  Synthetic
ugcauauuaauaacguauuuaaa

SEQ ID NO: 29228 - RNA, 23 nt, Artificial Sequence
  Synthetic
gcauauuaauaacguauuuaaag

SEQ ID NO: 29229 - RNA, 23 nt, Artificial Sequence
  Synthetic
cauauuaauaacguauuuaaaga

SEQ ID NO: 29230 - RNA, 23 nt, Artificial Sequence
  Synthetic
auauuaauaacguauuuaaagag

SEQ ID NO: 29231 - RNA, 23 nt, Artificial Sequence
  Synthetic
uauuaauaacguauuuaaagagg

SEQ ID NO: 29232 - RNA, 23 nt, Artificial Sequence
  Synthetic
auuaauaacguauuuaaagaggg

SEQ ID NO: 29233 - RNA, 23 nt, Artificial Sequence
  Synthetic
uuaauaacguauuuaaagaggga

SEQ ID NO: 29234 - RNA, 23 nt, Artificial Sequence
  Synthetic
uaauaacguauuuaaagagggaa

SEQ ID NO: 29235 - RNA, 23 nt, Artificial Sequence
  Synthetic
aauaacguauuuaaagagggaac

SEQ ID NO: 29236 - RNA, 23 nt, Artificial Sequence
  Synthetic
auaacguauuuaaagagggaacu

SEQ ID NO: 29237 - RNA, 23 nt, Artificial Sequence
  Synthetic
uaacguauuuaaagagggaacuu

SEQ ID NO: 29238 - RNA, 23 nt, Artificial Sequence
  Synthetic
aacguauuuaaagagggaacuug

SEQ ID NO: 29239 - RNA, 23 nt, Artificial Sequence
  Synthetic
acguauuuaaagagggaacuuga

SEQ ID NO: 29240 - RNA, 23 nt, Artificial Sequence
  Synthetic
cguauuuaaagagggaacuugaa

SEQ ID NO: 29241 - RNA, 23 nt, Artificial Sequence
  Synthetic
guauuuaaagagggaacuugaag

SEQ ID NO: 29242 - RNA, 23 nt, Artificial Sequence
  Synthetic
uauuuaaagagggaacuugaaga

SEQ ID NO: 29243 - RNA, 23 nt, Artificial Sequence
  Synthetic
auuuaaagagggaacuugaagac

SEQ ID NO: 29244 - RNA, 23 nt, Artificial Sequence
  Synthetic
uuuaaagagggaacuugaagaca

SEQ ID NO: 29245 - RNA, 23 nt, Artificial Sequence
  Synthetic
uuaaagagggaacuugaagacag

SEQ ID NO: 29246 - RNA, 23 nt, Artificial Sequence
  Synthetic
uaaagagggaacuugaagacagu

SEQ ID NO: 29247 - RNA, 23 nt, Artificial Sequence
  Synthetic
aaagagggaacuugaagacaguu

SEQ ID NO: 29248 - RNA, 23 nt, Artificial Sequence
  Synthetic
aagagggaacuugaagacaguuu

SEQ ID NO: 29249 - RNA, 23 nt, Artificial Sequence
  Synthetic
agagggaacuugaagacaguuua

SEQ ID NO: 29250 - RNA, 23 nt, Artificial Sequence
  Synthetic
gagggaacuugaagacaguuuag

SEQ ID NO: 29251 - RNA, 23 nt, Artificial Sequence
  Synthetic
agggaacuugaagacaguuuagg

SEQ ID NO: 29252 - RNA, 23 nt, Artificial Sequence
  Synthetic
gggaacuugaagacaguuuaggc

SEQ ID NO: 29253 - RNA, 23 nt, Artificial Sequence
  Synthetic
ggaacuugaagacaguuuaggca

SEQ ID NO: 29254 - RNA, 23 nt, Artificial Sequence
  Synthetic
gaacuugaagacaguuuaggcag

SEQ ID NO: 29255 - RNA, 23 nt, Artificial Sequence
  Synthetic
aacuugaagacaguuuaggcagg

SEQ ID NO: 29256 - RNA, 23 nt, Artificial Sequence
  Synthetic
acuugaagacaguuuaggcagga

SEQ ID NO: 29257 - RNA, 23 nt, Artificial Sequence
  Synthetic
cuugaagacaguuuaggcaggag

SEQ ID NO: 29258 - RNA, 23 nt, Artificial Sequence
  Synthetic
uugaagacaguuuaggcaggaga

SEQ ID NO: 29259 - RNA, 23 nt, Artificial Sequence
  Synthetic
ugaagacaguuuaggcaggagau

SEQ ID NO: 29260 - RNA, 23 nt, Artificial Sequence
  Synthetic
gaagacaguuuaggcaggagauu

SEQ ID NO: 29261 - RNA, 23 nt, Artificial Sequence
  Synthetic
aagacaguuuaggcaggagauua

SEQ ID NO: 29262 - RNA, 23 nt, Artificial Sequence
  Synthetic
agacaguuuaggcaggagauuaa

SEQ ID NO: 29263 - RNA, 23 nt, Artificial Sequence
  Synthetic
gacaguuuaggcaggagauuaag

SEQ ID NO: 29264 - RNA, 23 nt, Artificial Sequence
  Synthetic
acaguuuaggcaggagauuaagg

SEQ ID NO: 29265 - RNA, 23 nt, Artificial Sequence
  Synthetic
caguuuaggcaggagauuaagga

SEQ ID NO: 29266 - RNA, 23 nt, Artificial Sequence
  Synthetic
aguuuaggcaggagauuaaggag

SEQ ID NO: 29267 - RNA, 23 nt, Artificial Sequence
  Synthetic
guuuaggcaggagauuaaggaga

SEQ ID NO: 29268 - RNA, 23 nt, Artificial Sequence
  Synthetic
uuuaggcaggagauuaaggagac

SEQ ID NO: 29269 - RNA, 23 nt, Artificial Sequence
  Synthetic
uuaggcaggagauuaaggagacc

SEQ ID NO: 29270 - RNA, 23 nt, Artificial Sequence
  Synthetic
uaggcaggagauuaaggagaccu

SEQ ID NO: 29271 - RNA, 23 nt, Artificial Sequence
  Synthetic
aggcaggagauuaaggagaccuc

SEQ ID NO: 29272 - RNA, 23 nt, Artificial Sequence
  Synthetic
ggcaggagauuaaggagaccucu

SEQ ID NO: 29273 - RNA, 23 nt, Artificial Sequence
  Synthetic
gcaggagauuaaggagaccucuc

SEQ ID NO: 29274 - RNA, 23 nt, Artificial Sequence
  Synthetic
caggagauuaaggagaccucuca

SEQ ID NO: 29275 - RNA, 23 nt, Artificial Sequence
  Synthetic
aggagauuaaggagaccucucau

SEQ ID NO: 29276 - RNA, 23 nt, Artificial Sequence
  Synthetic
ggagauuaaggagaccucucaug

SEQ ID NO: 29277 - RNA, 23 nt, Artificial Sequence
  Synthetic
gagauuaaggagaccucucaugu

SEQ ID NO: 29278 - RNA, 23 nt, Artificial Sequence
  Synthetic
agauuaaggagaccucucaugug

SEQ ID NO: 29279 - RNA, 23 nt, Artificial Sequence
  Synthetic
gauuaaggagaccucucaugugu

SEQ ID NO: 29280 - RNA, 23 nt, Artificial Sequence
  Synthetic
auuaaggagaccucucauguguu

SEQ ID NO: 29281 - RNA, 23 nt, Artificial Sequence
  Synthetic
uuaaggagaccucucauguguuu

SEQ ID NO: 29282 - RNA, 23 nt, Artificial Sequence
  Synthetic
uaaggagaccucucauguguuuu

SEQ ID NO: 29283 - RNA, 23 nt, Artificial Sequence
  Synthetic
aaggagaccucucauguguuuuc

SEQ ID NO: 29284 - RNA, 23 nt, Artificial Sequence
  Synthetic
aggagaccucucauguguuuuca

SEQ ID NO: 29285 - RNA, 23 nt, Artificial Sequence
  Synthetic
ggagaccucucauguguuuucau

SEQ ID NO: 29286 - RNA, 23 nt, Artificial Sequence
  Synthetic
gagaccucucauguguuuucaug

SEQ ID NO: 29287 - RNA, 23 nt, Artificial Sequence
  Synthetic
agaccucucauguguuuucaugu

SEQ ID NO: 29288 - RNA, 23 nt, Artificial Sequence
  Synthetic
gaccucucauguguuuucaugug

SEQ ID NO: 29289 - RNA, 23 nt, Artificial Sequence
  Synthetic
accucucauguguuuucaugugu

SEQ ID NO: 29290 - RNA, 23 nt, Artificial Sequence
  Synthetic
ccucucauguguuuucauguguu

SEQ ID NO: 29291 - RNA, 23 nt, Artificial Sequence
  Synthetic
cucucauguguuuucauguguug

SEQ ID NO: 29292 - RNA, 23 nt, Artificial Sequence
  Synthetic
ucucauguguuuucauguguugu

SEQ ID NO: 29293 - RNA, 23 nt, Artificial Sequence
  Synthetic
cucauguguuuucauguguuguc

SEQ ID NO: 29294 - RNA, 23 nt, Artificial Sequence
  Synthetic
ucauguguuuucauguguuguca

SEQ ID NO: 29295 - RNA, 23 nt, Artificial Sequence
  Synthetic
cauguguuuucauguguugucau

SEQ ID NO: 29296 - RNA, 23 nt, Artificial Sequence
  Synthetic
auguguuuucauguguugucaua

SEQ ID NO: 29297 - RNA, 23 nt, Artificial Sequence
  Synthetic
uguguuuucauguguugucauag

SEQ ID NO: 29298 - RNA, 23 nt, Artificial Sequence
  Synthetic
guguuuucauguguugucauagc

SEQ ID NO: 29299 - RNA, 23 nt, Artificial Sequence
  Synthetic
uguuuucauguguugucauagcc

SEQ ID NO: 29300 - RNA, 23 nt, Artificial Sequence
  Synthetic
guuuucauguguugucauagccc

SEQ ID NO: 29301 - RNA, 23 nt, Artificial Sequence
  Synthetic
uuuucauguguugucauagcccc

SEQ ID NO: 29302 - RNA, 23 nt, Artificial Sequence
  Synthetic
uuucauguguugucauagcccca

SEQ ID NO: 29303 - RNA, 23 nt, Artificial Sequence
  Synthetic
uucauguguugucauagccccau

SEQ ID NO: 29304 - RNA, 23 nt, Artificial Sequence
  Synthetic
ucauguguugucauagccccaug

SEQ ID NO: 29305 - RNA, 23 nt, Artificial Sequence
  Synthetic
cauguguugucauagccccaugu

SEQ ID NO: 29306 - RNA, 23 nt, Artificial Sequence
  Synthetic
auguguugucauagccccauguu

SEQ ID NO: 29307 - RNA, 23 nt, Artificial Sequence
  Synthetic
uguguugucauagccccauguuu

SEQ ID NO: 29308 - RNA, 23 nt, Artificial Sequence
  Synthetic
guguugucauagccccauguuug

SEQ ID NO: 29309 - RNA, 23 nt, Artificial Sequence
  Synthetic
uguugucauagccccauguuugg

SEQ ID NO: 29310 - RNA, 23 nt, Artificial Sequence
  Synthetic
guugucauagccccauguuugga

SEQ ID NO: 29311 - RNA, 23 nt, Artificial Sequence
  Synthetic
uugucauagccccauguuuggaa

SEQ ID NO: 29312 - RNA, 23 nt, Artificial Sequence
  Synthetic
ugucauagccccauguuuggaaa

SEQ ID NO: 29313 - RNA, 23 nt, Artificial Sequence
  Synthetic
gucauagccccauguuuggaaau

SEQ ID NO: 29314 - RNA, 23 nt, Artificial Sequence
  Synthetic
ucauagccccauguuuggaaaug

SEQ ID NO: 29315 - RNA, 23 nt, Artificial Sequence
  Synthetic
cauagccccauguuuggaaauga

SEQ ID NO: 29316 - RNA, 23 nt, Artificial Sequence
  Synthetic
auagccccauguuuggaaaugac

SEQ ID NO: 29317 - RNA, 23 nt, Artificial Sequence
  Synthetic
uagccccauguuuggaaaugaca

SEQ ID NO: 29318 - RNA, 23 nt, Artificial Sequence
  Synthetic
agccccauguuuggaaaugacaa

SEQ ID NO: 29319 - RNA, 23 nt, Artificial Sequence
  Synthetic
gccccauguuuggaaaugacaau

SEQ ID NO: 29320 - RNA, 23 nt, Artificial Sequence
  Synthetic
ccccauguuuggaaaugacaaua

SEQ ID NO: 29321 - RNA, 23 nt, Artificial Sequence
  Synthetic
cccauguuuggaaaugacaauau

SEQ ID NO: 29322 - RNA, 23 nt, Artificial Sequence
  Synthetic
ccauguuuggaaaugacaauaug

SEQ ID NO: 29323 - RNA, 23 nt, Artificial Sequence
  Synthetic
cauguuuggaaaugacaauaugu

SEQ ID NO: 29324 - RNA, 23 nt, Artificial Sequence
  Synthetic
auguuuggaaaugacaauaugug

SEQ ID NO: 29325 - RNA, 23 nt, Artificial Sequence
  Synthetic
uguuuggaaaugacaauauguga

SEQ ID NO: 29326 - RNA, 23 nt, Artificial Sequence
  Synthetic
guuuggaaaugacaauaugugac

SEQ ID NO: 29327 - RNA, 23 nt, Artificial Sequence
  Synthetic
uuuggaaaugacaauaugugaca

SEQ ID NO: 29328 - RNA, 23 nt, Artificial Sequence
  Synthetic
uuggaaaugacaauaugugacac

SEQ ID NO: 29329 - RNA, 23 nt, Artificial Sequence
  Synthetic
uggaaaugacaauaugugacaca

SEQ ID NO: 29330 - RNA, 23 nt, Artificial Sequence
  Synthetic
ggaaaugacaauaugugacacaa

SEQ ID NO: 29331 - RNA, 23 nt, Artificial Sequence
  Synthetic
gaaaugacaauaugugacacaag

SEQ ID NO: 29332 - RNA, 23 nt, Artificial Sequence
  Synthetic
aaaugacaauaugugacacaaga

SEQ ID NO: 29333 - RNA, 23 nt, Artificial Sequence
  Synthetic
aaugacaauaugugacacaagag

SEQ ID NO: 29334 - RNA, 23 nt, Artificial Sequence
  Synthetic
augacaauaugugacacaagagu

SEQ ID NO: 29335 - RNA, 23 nt, Artificial Sequence
  Synthetic
ugacaauaugugacacaagagug

SEQ ID NO: 29336 - RNA, 23 nt, Artificial Sequence
  Synthetic
gacaauaugugacacaagagugu

SEQ ID NO: 29337 - RNA, 23 nt, Artificial Sequence
  Synthetic
acaauaugugacacaagaguguc

SEQ ID NO: 29338 - RNA, 23 nt, Artificial Sequence
  Synthetic
caauaugugacacaagaguguca

SEQ ID NO: 29339 - RNA, 23 nt, Artificial Sequence
  Synthetic
aauaugugacacaagagugucaa

SEQ ID NO: 29340 - RNA, 23 nt, Artificial Sequence
  Synthetic
auaugugacacaagagugucaaa

SEQ ID NO: 29341 - RNA, 23 nt, Artificial Sequence
  Synthetic
uaugugacacaagagugucaaaa

SEQ ID NO: 29342 - RNA, 23 nt, Artificial Sequence
  Synthetic
augugacacaagagugucaaaau

SEQ ID NO: 29343 - RNA, 23 nt, Artificial Sequence
  Synthetic
ugugacacaagagugucaaaaug

SEQ ID NO: 29344 - RNA, 23 nt, Artificial Sequence
  Synthetic
gugacacaagagugucaaaauga

SEQ ID NO: 29345 - RNA, 23 nt, Artificial Sequence
  Synthetic
ugacacaagagugucaaaaugaa

SEQ ID NO: 29346 - RNA, 23 nt, Artificial Sequence
  Synthetic
gacacaagagugucaaaaugaag

SEQ ID NO: 29347 - RNA, 23 nt, Artificial Sequence
  Synthetic
acacaagagugucaaaaugaaga

SEQ ID NO: 29348 - RNA, 23 nt, Artificial Sequence
  Synthetic
cacaagagugucaaaaugaagac

SEQ ID NO: 29349 - RNA, 23 nt, Artificial Sequence
  Synthetic
acaagagugucaaaaugaagaca

SEQ ID NO: 29350 - RNA, 23 nt, Artificial Sequence
  Synthetic
caagagugucaaaaugaagacac

SEQ ID NO: 29351 - RNA, 23 nt, Artificial Sequence
  Synthetic
aagagugucaaaaugaagacacc

SEQ ID NO: 29352 - RNA, 23 nt, Artificial Sequence
  Synthetic
agagugucaaaaugaagacacca

SEQ ID NO: 29353 - RNA, 23 nt, Artificial Sequence
  Synthetic
gagugucaaaaugaagacaccag

SEQ ID NO: 29354 - RNA, 23 nt, Artificial Sequence
  Synthetic
agugucaaaaugaagacaccaga

SEQ ID NO: 29355 - RNA, 23 nt, Artificial Sequence
  Synthetic
gugucaaaaugaagacaccagag

SEQ ID NO: 29356 - RNA, 23 nt, Artificial Sequence
  Synthetic
ugucaaaaugaagacaccagagg

SEQ ID NO: 29357 - RNA, 23 nt, Artificial Sequence
  Synthetic
gucaaaaugaagacaccagagga

SEQ ID NO: 29358 - RNA, 23 nt, Artificial Sequence
  Synthetic
ucaaaaugaagacaccagaggau

SEQ ID NO: 29359 - RNA, 23 nt, Artificial Sequence
  Synthetic
caaaaugaagacaccagaggaug

SEQ ID NO: 29360 - RNA, 23 nt, Artificial Sequence
  Synthetic
aaaaugaagacaccagaggauga

SEQ ID NO: 29361 - RNA, 23 nt, Artificial Sequence
  Synthetic
aaaugaagacaccagaggaugac

SEQ ID NO: 29362 - RNA, 23 nt, Artificial Sequence
  Synthetic
aaugaagacaccagaggaugaca

SEQ ID NO: 29363 - RNA, 23 nt, Artificial Sequence
  Synthetic
augaagacaccagaggaugacaa

SEQ ID NO: 29364 - RNA, 23 nt, Artificial Sequence
  Synthetic
ugaagacaccagaggaugacaac

SEQ ID NO: 29365 - RNA, 23 nt, Artificial Sequence
  Synthetic
gaagacaccagaggaugacaaca

SEQ ID NO: 29366 - RNA, 23 nt, Artificial Sequence
  Synthetic
aagacaccagaggaugacaacag

SEQ ID NO: 29367 - RNA, 23 nt, Artificial Sequence
  Synthetic
agacaccagaggaugacaacagu

SEQ ID NO: 29368 - RNA, 23 nt, Artificial Sequence
  Synthetic
gacaccagaggaugacaacaguc

SEQ ID NO: 29369 - RNA, 23 nt, Artificial Sequence
  Synthetic
acaccagaggaugacaacaguca

SEQ ID NO: 29370 - RNA, 23 nt, Artificial Sequence
  Synthetic
caccagaggaugacaacagucaa

SEQ ID NO: 29371 - RNA, 23 nt, Artificial Sequence
  Synthetic
accagaggaugacaacagucaau

SEQ ID NO: 29372 - RNA, 23 nt, Artificial Sequence
  Synthetic
ccagaggaugacaacagucaauc

SEQ ID NO: 29373 - RNA, 23 nt, Artificial Sequence
  Synthetic
cagaggaugacaacagucaauca

SEQ ID NO: 29374 - RNA, 23 nt, Artificial Sequence
  Synthetic
agaggaugacaacagucaaucaa

SEQ ID NO: 29375 - RNA, 23 nt, Artificial Sequence
  Synthetic
gaggaugacaacagucaaucaaa

SEQ ID NO: 29376 - RNA, 23 nt, Artificial Sequence
  Synthetic
aggaugacaacagucaaucaaag

SEQ ID NO: 29377 - RNA, 23 nt, Artificial Sequence
  Synthetic
ggaugacaacagucaaucaaagc

SEQ ID NO: 29378 - RNA, 23 nt, Artificial Sequence
  Synthetic
gaugacaacagucaaucaaagcc

SEQ ID NO: 29379 - RNA, 23 nt, Artificial Sequence
  Synthetic
augacaacagucaaucaaagccc

SEQ ID NO: 29380 - RNA, 23 nt, Artificial Sequence
  Synthetic
ugacaacagucaaucaaagccca

SEQ ID NO: 29381 - RNA, 23 nt, Artificial Sequence
  Synthetic
gacaacagucaaucaaagcccag

SEQ ID NO: 29382 - RNA, 23 nt, Artificial Sequence
  Synthetic
acaacagucaaucaaagcccagu

SEQ ID NO: 29383 - RNA, 23 nt, Artificial Sequence
  Synthetic
caacagucaaucaaagcccagua

SEQ ID NO: 29384 - RNA, 23 nt, Artificial Sequence
  Synthetic
aacagucaaucaaagcccaguag

SEQ ID NO: 29385 - RNA, 23 nt, Artificial Sequence
  Synthetic
acagucaaucaaagcccaguaga

SEQ ID NO: 29386 - RNA, 23 nt, Artificial Sequence
  Synthetic
cagucaaucaaagcccaguagaa

SEQ ID NO: 29387 - RNA, 23 nt, Artificial Sequence
  Synthetic
agucaaucaaagcccaguagaau

SEQ ID NO: 29388 - RNA, 23 nt, Artificial Sequence
  Synthetic
gucaaucaaagcccaguagaauc

SEQ ID NO: 29389 - RNA, 23 nt, Artificial Sequence
  Synthetic
ucaaucaaagcccaguagaaucu

SEQ ID NO: 29390 - RNA, 23 nt, Artificial Sequence
  Synthetic
caaucaaagcccaguagaaucua

SEQ ID NO: 29391 - RNA, 23 nt, Artificial Sequence
  Synthetic
aaucaaagcccaguagaaucuag

SEQ ID NO: 29392 - RNA, 23 nt, Artificial Sequence
  Synthetic
aucaaagcccaguagaaucuagg

SEQ ID NO: 29393 - RNA, 23 nt, Artificial Sequence
  Synthetic
ucaaagcccaguagaaucuagga

SEQ ID NO: 29394 - RNA, 23 nt, Artificial Sequence
  Synthetic
caaagcccaguagaaucuaggaa

SEQ ID NO: 29395 - RNA, 23 nt, Artificial Sequence
  Synthetic
aaagcccaguagaaucuaggaac

SEQ ID NO: 29396 - RNA, 23 nt, Artificial Sequence
  Synthetic
aagcccaguagaaucuaggaacu

SEQ ID NO: 29397 - RNA, 23 nt, Artificial Sequence
  Synthetic
agcccaguagaaucuaggaacug

SEQ ID NO: 29398 - RNA, 23 nt, Artificial Sequence
  Synthetic
gcccaguagaaucuaggaacugg

SEQ ID NO: 29399 - RNA, 23 nt, Artificial Sequence
  Synthetic
cccaguagaaucuaggaacugga

SEQ ID NO: 29400 - RNA, 23 nt, Artificial Sequence
  Synthetic
ccaguagaaucuaggaacuggaa

SEQ ID NO: 29401 - RNA, 23 nt, Artificial Sequence
  Synthetic
caguagaaucuaggaacuggaag

SEQ ID NO: 29402 - RNA, 23 nt, Artificial Sequence
  Synthetic
aguagaaucuaggaacuggaagc

SEQ ID NO: 29403 - RNA, 23 nt, Artificial Sequence
  Synthetic
guagaaucuaggaacuggaagca

SEQ ID NO: 29404 - RNA, 23 nt, Artificial Sequence
  Synthetic
uagaaucuaggaacuggaagcaa

SEQ ID NO: 29405 - RNA, 23 nt, Artificial Sequence
  Synthetic
agaaucuaggaacuggaagcaag

SEQ ID NO: 29406 - RNA, 23 nt, Artificial Sequence
  Synthetic
gaaucuaggaacuggaagcaagg

SEQ ID NO: 29407 - RNA, 23 nt, Artificial Sequence
  Synthetic
aaucuaggaacuggaagcaagga

SEQ ID NO: 29408 - RNA, 23 nt, Artificial Sequence
  Synthetic
aucuaggaacuggaagcaaggaa

SEQ ID NO: 29409 - RNA, 23 nt, Artificial Sequence
  Synthetic
ucuaggaacuggaagcaaggaag

SEQ ID NO: 29410 - RNA, 23 nt, Artificial Sequence
  Synthetic
cuaggaacuggaagcaaggaagg

SEQ ID NO: 29411 - RNA, 23 nt, Artificial Sequence
  Synthetic
uaggaacuggaagcaaggaaggu

SEQ ID NO: 29412 - RNA, 23 nt, Artificial Sequence
  Synthetic
aggaacuggaagcaaggaaggug

SEQ ID NO: 29413 - RNA, 23 nt, Artificial Sequence
  Synthetic
ggaacuggaagcaaggaagguga

SEQ ID NO: 29414 - RNA, 23 nt, Artificial Sequence
  Synthetic
gaacuggaagcaaggaaggugag

SEQ ID NO: 29415 - RNA, 23 nt, Artificial Sequence
  Synthetic
aacuggaagcaaggaaggugaga

SEQ ID NO: 29416 - RNA, 23 nt, Artificial Sequence
  Synthetic
acuggaagcaaggaaggugagaa

SEQ ID NO: 29417 - RNA, 23 nt, Artificial Sequence
  Synthetic
cuggaagcaaggaaggugagaau

SEQ ID NO: 29418 - RNA, 23 nt, Artificial Sequence
  Synthetic
uggaagcaaggaaggugagaauu

SEQ ID NO: 29419 - RNA, 23 nt, Artificial Sequence
  Synthetic
ggaagcaaggaaggugagaauuu

SEQ ID NO: 29420 - RNA, 23 nt, Artificial Sequence
  Synthetic
gaagcaaggaaggugagaauuug

SEQ ID NO: 29421 - RNA, 23 nt, Artificial Sequence
  Synthetic
aagcaaggaaggugagaauuugu

SEQ ID NO: 29422 - RNA, 23 nt, Artificial Sequence
  Synthetic
agcaaggaaggugagaauuuguc

SEQ ID NO: 29423 - RNA, 23 nt, Artificial Sequence
  Synthetic
gcaaggaaggugagaauuuguca

SEQ ID NO: 29424 - RNA, 23 nt, Artificial Sequence
  Synthetic
caaggaaggugagaauuugucag

SEQ ID NO: 29425 - RNA, 23 nt, Artificial Sequence
  Synthetic
aaggaaggugagaauuugucagu

SEQ ID NO: 29426 - RNA, 23 nt, Artificial Sequence
  Synthetic
aggaaggugagaauuugucagug

SEQ ID NO: 29427 - RNA, 23 nt, Artificial Sequence
  Synthetic
ggaaggugagaauuugucagugu

SEQ ID NO: 29428 - RNA, 23 nt, Artificial Sequence
  Synthetic
gaaggugagaauuugucagugug

SEQ ID NO: 29429 - RNA, 23 nt, Artificial Sequence
  Synthetic
aaggugagaauuugucagugugg

SEQ ID NO: 29430 - RNA, 23 nt, Artificial Sequence
  Synthetic
aggugagaauuugucaguguggc

SEQ ID NO: 29431 - RNA, 23 nt, Artificial Sequence
  Synthetic
ggugagaauuugucaguguggcu

SEQ ID NO: 29432 - RNA, 23 nt, Artificial Sequence
  Synthetic
gugagaauuugucaguguggcuu

SEQ ID NO: 29433 - RNA, 23 nt, Artificial Sequence
  Synthetic
ugagaauuugucaguguggcuuc

SEQ ID NO: 29434 - RNA, 23 nt, Artificial Sequence
  Synthetic
gagaauuugucaguguggcuuca

SEQ ID NO: 29435 - RNA, 23 nt, Artificial Sequence
  Synthetic
agaauuugucaguguggcuucau

SEQ ID NO: 29436 - RNA, 23 nt, Artificial Sequence
  Synthetic
gaauuugucaguguggcuucauc

SEQ ID NO: 29437 - RNA, 23 nt, Artificial Sequence
  Synthetic
aauuugucaguguggcuucauca

SEQ ID NO: 29438 - RNA, 23 nt, Artificial Sequence
  Synthetic
auuugucaguguggcuucaucac

SEQ ID NO: 29439 - RNA, 23 nt, Artificial Sequence
  Synthetic
uuugucaguguggcuucaucacu

SEQ ID NO: 29440 - RNA, 23 nt, Artificial Sequence
  Synthetic
uugucaguguggcuucaucacua

SEQ ID NO: 29441 - RNA, 23 nt, Artificial Sequence
  Synthetic
ugucaguguggcuucaucacuac

SEQ ID NO: 29442 - RNA, 23 nt, Artificial Sequence
  Synthetic
gucaguguggcuucaucacuacc

SEQ ID NO: 29443 - RNA, 23 nt, Artificial Sequence
  Synthetic
ucaguguggcuucaucacuaccu

SEQ ID NO: 29444 - RNA, 23 nt, Artificial Sequence
  Synthetic
caguguggcuucaucacuaccua

SEQ ID NO: 29445 - RNA, 23 nt, Artificial Sequence
  Synthetic
aguguggcuucaucacuaccuau

SEQ ID NO: 29446 - RNA, 23 nt, Artificial Sequence
  Synthetic
guguggcuucaucacuaccuauu

SEQ ID NO: 29447 - RNA, 23 nt, Artificial Sequence
  Synthetic
uguggcuucaucacuaccuauug

SEQ ID NO: 29448 - RNA, 23 nt, Artificial Sequence
  Synthetic
guggcuucaucacuaccuauugg

SEQ ID NO: 29449 - RNA, 23 nt, Artificial Sequence
  Synthetic
uggcuucaucacuaccuauuggu

SEQ ID NO: 29450 - RNA, 23 nt, Artificial Sequence
  Synthetic
ggcuucaucacuaccuauuggug

SEQ ID NO: 29451 - RNA, 23 nt, Artificial Sequence
  Synthetic
gcuucaucacuaccuauuggugg

SEQ ID NO: 29452 - RNA, 23 nt, Artificial Sequence
  Synthetic
cuucaucacuaccuauuggugga

SEQ ID NO: 29453 - RNA, 23 nt, Artificial Sequence
  Synthetic
uucaucacuaccuauugguggaa

SEQ ID NO: 29454 - RNA, 23 nt, Artificial Sequence
  Synthetic
ucaucacuaccuauugguggaag

SEQ ID NO: 29455 - RNA, 23 nt, Artificial Sequence
  Synthetic
caucacuaccuauugguggaaga

SEQ ID NO: 29456 - RNA, 23 nt, Artificial Sequence
  Synthetic
aucacuaccuauugguggaagac

SEQ ID NO: 29457 - RNA, 23 nt, Artificial Sequence
  Synthetic
ucacuaccuauugguggaagaca

SEQ ID NO: 29458 - RNA, 23 nt, Artificial Sequence
  Synthetic
cacuaccuauugguggaagacac

SEQ ID NO: 29459 - RNA, 23 nt, Artificial Sequence
  Synthetic
acuaccuauugguggaagacaca

SEQ ID NO: 29460 - RNA, 23 nt, Artificial Sequence
  Synthetic
cuaccuauugguggaagacacau

SEQ ID NO: 29461 - RNA, 23 nt, Artificial Sequence
  Synthetic
uaccuauugguggaagacacaua

SEQ ID NO: 29462 - RNA, 23 nt, Artificial Sequence
  Synthetic
accuauugguggaagacacauac

SEQ ID NO: 29463 - RNA, 23 nt, Artificial Sequence
  Synthetic
ccuauugguggaagacacauacc

SEQ ID NO: 29464 - RNA, 23 nt, Artificial Sequence
  Synthetic
cuauugguggaagacacauaccu

SEQ ID NO: 29465 - RNA, 23 nt, Artificial Sequence
  Synthetic
uauugguggaagacacauaccug

SEQ ID NO: 29466 - RNA, 23 nt, Artificial Sequence
  Synthetic
auugguggaagacacauaccuga

SEQ ID NO: 29467 - RNA, 23 nt, Artificial Sequence
  Synthetic
uugguggaagacacauaccugau

SEQ ID NO: 29468 - RNA, 23 nt, Artificial Sequence
  Synthetic
ugguggaagacacauaccugaua

SEQ ID NO: 29469 - RNA, 23 nt, Artificial Sequence
  Synthetic
gguggaagacacauaccugauaa

SEQ ID NO: 29470 - RNA, 23 nt, Artificial Sequence
  Synthetic
guggaagacacauaccugauaac

SEQ ID NO: 29471 - RNA, 23 nt, Artificial Sequence
  Synthetic
uggaagacacauaccugauaacu

SEQ ID NO: 29472 - RNA, 23 nt, Artificial Sequence
  Synthetic
ggaagacacauaccugauaacua

SEQ ID NO: 29473 - RNA, 23 nt, Artificial Sequence
  Synthetic
gaagacacauaccugauaacuac

SEQ ID NO: 29474 - RNA, 23 nt, Artificial Sequence
  Synthetic
aagacacauaccugauaacuacu

SEQ ID NO: 29475 - RNA, 23 nt, Artificial Sequence
  Synthetic
agacacauaccugauaacuacuu

SEQ ID NO: 29476 - RNA, 23 nt, Artificial Sequence
  Synthetic
gacacauaccugauaacuacuuu

SEQ ID NO: 29477 - RNA, 23 nt, Artificial Sequence
  Synthetic
acacauaccugauaacuacuuug

SEQ ID NO: 29478 - RNA, 23 nt, Artificial Sequence
  Synthetic
cacauaccugauaacuacuuugc

SEQ ID NO: 29479 - RNA, 23 nt, Artificial Sequence
  Synthetic
acauaccugauaacuacuuugcu

SEQ ID NO: 29480 - RNA, 23 nt, Artificial Sequence
  Synthetic
cauaccugauaacuacuuugcua

SEQ ID NO: 29481 - RNA, 23 nt, Artificial Sequence
  Synthetic
auaccugauaacuacuuugcuag

SEQ ID NO: 29482 - RNA, 23 nt, Artificial Sequence
  Synthetic
uaccugauaacuacuuugcuagu

SEQ ID NO: 29483 - RNA, 23 nt, Artificial Sequence
  Synthetic
accugauaacuacuuugcuaguu

SEQ ID NO: 29484 - RNA, 23 nt, Artificial Sequence
  Synthetic
ccugauaacuacuuugcuaguuc

SEQ ID NO: 29485 - RNA, 23 nt, Artificial Sequence
  Synthetic
cugauaacuacuuugcuaguucu

SEQ ID NO: 29486 - RNA, 23 nt, Artificial Sequence
  Synthetic
ugauaacuacuuugcuaguucuu

SEQ ID NO: 29487 - RNA, 23 nt, Artificial Sequence
  Synthetic
gauaacuacuuugcuaguucuua

SEQ ID NO: 29488 - RNA, 23 nt, Artificial Sequence
  Synthetic
auaacuacuuugcuaguucuuag

SEQ ID NO: 29489 - RNA, 23 nt, Artificial Sequence
  Synthetic
uaacuacuuugcuaguucuuagc

SEQ ID NO: 29490 - RNA, 23 nt, Artificial Sequence
  Synthetic
aacuacuuugcuaguucuuagca

SEQ ID NO: 29491 - RNA, 23 nt, Artificial Sequence
  Synthetic
acuacuuugcuaguucuuagcac

SEQ ID NO: 29492 - RNA, 23 nt, Artificial Sequence
  Synthetic
cuacuuugcuaguucuuagcaca

SEQ ID NO: 29493 - RNA, 23 nt, Artificial Sequence
  Synthetic
uacuuugcuaguucuuagcacau

SEQ ID NO: 29494 - RNA, 23 nt, Artificial Sequence
  Synthetic
acuuugcuaguucuuagcacauc

SEQ ID NO: 29495 - RNA, 23 nt, Artificial Sequence
  Synthetic
cuuugcuaguucuuagcacauca

SEQ ID NO: 29496 - RNA, 23 nt, Artificial Sequence
  Synthetic
uuugcuaguucuuagcacaucag

SEQ ID NO: 29497 - RNA, 23 nt, Artificial Sequence
  Synthetic
uugcuaguucuuagcacaucagg

SEQ ID NO: 29498 - RNA, 23 nt, Artificial Sequence
  Synthetic
ugcuaguucuuagcacaucaggg

SEQ ID NO: 29499 - RNA, 23 nt, Artificial Sequence
  Synthetic
gcuaguucuuagcacaucagggc

SEQ ID NO: 29500 - RNA, 23 nt, Artificial Sequence
  Synthetic
cuaguucuuagcacaucagggcc

SEQ ID NO: 29501 - RNA, 23 nt, Artificial Sequence
  Synthetic
uaguucuuagcacaucagggcca

SEQ ID NO: 29502 - RNA, 23 nt, Artificial Sequence
  Synthetic
aguucuuagcacaucagggccau

SEQ ID NO: 29503 - RNA, 23 nt, Artificial Sequence
  Synthetic
guucuuagcacaucagggccauu

SEQ ID NO: 29504 - RNA, 23 nt, Artificial Sequence
  Synthetic
uucuuagcacaucagggccauuu

SEQ ID NO: 29505 - RNA, 23 nt, Artificial Sequence
  Synthetic
ucuuagcacaucagggccauuuu

SEQ ID NO: 29506 - RNA, 23 nt, Artificial Sequence
  Synthetic
cuuagcacaucagggccauuuuc

SEQ ID NO: 29507 - RNA, 23 nt, Artificial Sequence
  Synthetic
uuagcacaucagggccauuuucu

SEQ ID NO: 29508 - RNA, 23 nt, Artificial Sequence
  Synthetic
uagcacaucagggccauuuucug

SEQ ID NO: 29509 - RNA, 23 nt, Artificial Sequence
  Synthetic
agcacaucagggccauuuucugg

SEQ ID NO: 29510 - RNA, 23 nt, Artificial Sequence
  Synthetic
gcacaucagggccauuuucugga

SEQ ID NO: 29511 - RNA, 23 nt, Artificial Sequence
  Synthetic
cacaucagggccauuuucuggag

SEQ ID NO: 29512 - RNA, 23 nt, Artificial Sequence
  Synthetic
acaucagggccauuuucuggagg

SEQ ID NO: 29513 - RNA, 23 nt, Artificial Sequence
  Synthetic
caucagggccauuuucuggaggc

SEQ ID NO: 29514 - RNA, 23 nt, Artificial Sequence
  Synthetic
aucagggccauuuucuggaggca

SEQ ID NO: 29515 - RNA, 23 nt, Artificial Sequence
  Synthetic
ucagggccauuuucuggaggcau

SEQ ID NO: 29516 - RNA, 23 nt, Artificial Sequence
  Synthetic
cagggccauuuucuggaggcaua

SEQ ID NO: 29517 - RNA, 23 nt, Artificial Sequence
  Synthetic
agggccauuuucuggaggcauaa

SEQ ID NO: 29518 - RNA, 23 nt, Artificial Sequence
  Synthetic
gggccauuuucuggaggcauaau

SEQ ID NO: 29519 - RNA, 23 nt, Artificial Sequence
  Synthetic
ggccauuuucuggaggcauaaug

SEQ ID NO: 29520 - RNA, 23 nt, Artificial Sequence
  Synthetic
gccauuuucuggaggcauaaugu

SEQ ID NO: 29521 - RNA, 23 nt, Artificial Sequence
  Synthetic
ccauuuucuggaggcauaaugua

SEQ ID NO: 29522 - RNA, 23 nt, Artificial Sequence
  Synthetic
cauuuucuggaggcauaauguaa

SEQ ID NO: 29523 - RNA, 23 nt, Artificial Sequence
  Synthetic
auuuucuggaggcauaauguaau

SEQ ID NO: 29524 - RNA, 23 nt, Artificial Sequence
  Synthetic
uuuucuggaggcauaauguaauc

SEQ ID NO: 29525 - RNA, 23 nt, Artificial Sequence
  Synthetic
uuucuggaggcauaauguaaucu

SEQ ID NO: 29526 - RNA, 23 nt, Artificial Sequence
  Synthetic
uucuggaggcauaauguaaucua

SEQ ID NO: 29527 - RNA, 23 nt, Artificial Sequence
  Synthetic
ucuggaggcauaauguaaucuac

SEQ ID NO: 29528 - RNA, 23 nt, Artificial Sequence
  Synthetic
cuggaggcauaauguaaucuaca

SEQ ID NO: 29529 - RNA, 23 nt, Artificial Sequence
  Synthetic
uggaggcauaauguaaucuacag

SEQ ID NO: 29530 - RNA, 23 nt, Artificial Sequence
  Synthetic
ggaggcauaauguaaucuacaga

SEQ ID NO: 29531 - RNA, 23 nt, Artificial Sequence
  Synthetic
gaggcauaauguaaucuacagaa

SEQ ID NO: 29532 - RNA, 23 nt, Artificial Sequence
  Synthetic
aggcauaauguaaucuacagaaa

SEQ ID NO: 29533 - RNA, 23 nt, Artificial Sequence
  Synthetic
ggcauaauguaaucuacagaaac

SEQ ID NO: 29534 - RNA, 23 nt, Artificial Sequence
  Synthetic
gcauaauguaaucuacagaaaca

SEQ ID NO: 29535 - RNA, 23 nt, Artificial Sequence
  Synthetic
cauaauguaaucuacagaaacag

SEQ ID NO: 29536 - RNA, 23 nt, Artificial Sequence
  Synthetic
auaauguaaucuacagaaacagc

SEQ ID NO: 29537 - RNA, 23 nt, Artificial Sequence
  Synthetic
uaauguaaucuacagaaacagcu

SEQ ID NO: 29538 - RNA, 23 nt, Artificial Sequence
  Synthetic
aauguaaucuacagaaacagcuc

SEQ ID NO: 29539 - RNA, 23 nt, Artificial Sequence
  Synthetic
auguaaucuacagaaacagcucu

SEQ ID NO: 29540 - RNA, 23 nt, Artificial Sequence
  Synthetic
uguaaucuacagaaacagcucuc

SEQ ID NO: 29541 - RNA, 23 nt, Artificial Sequence
  Synthetic
guaaucuacagaaacagcucuca

SEQ ID NO: 29542 - RNA, 23 nt, Artificial Sequence
  Synthetic
uaaucuacagaaacagcucucaa

SEQ ID NO: 29543 - RNA, 23 nt, Artificial Sequence
  Synthetic
aaucuacagaaacagcucucaag

SEQ ID NO: 29544 - RNA, 23 nt, Artificial Sequence
  Synthetic
aucuacagaaacagcucucaagc

SEQ ID NO: 29545 - RNA, 23 nt, Artificial Sequence
  Synthetic
ucuacagaaacagcucucaagcc

SEQ ID NO: 29546 - RNA, 23 nt, Artificial Sequence
  Synthetic
cuacagaaacagcucucaagccu

SEQ ID NO: 29547 - RNA, 23 nt, Artificial Sequence
  Synthetic
uacagaaacagcucucaagccug

SEQ ID NO: 29548 - RNA, 23 nt, Artificial Sequence
  Synthetic
acagaaacagcucucaagccuga

SEQ ID NO: 29549 - RNA, 23 nt, Artificial Sequence
  Synthetic
cagaaacagcucucaagccugac

SEQ ID NO: 29550 - RNA, 23 nt, Artificial Sequence
  Synthetic
agaaacagcucucaagccugacc

SEQ ID NO: 29551 - RNA, 23 nt, Artificial Sequence
  Synthetic
gaaacagcucucaagccugaccu

SEQ ID NO: 29552 - RNA, 23 nt, Artificial Sequence
  Synthetic
aaacagcucucaagccugaccuu

SEQ ID NO: 29553 - RNA, 23 nt, Artificial Sequence
  Synthetic
aacagcucucaagccugaccuuu

SEQ ID NO: 29554 - RNA, 23 nt, Artificial Sequence
  Synthetic
acagcucucaagccugaccuuug

SEQ ID NO: 29555 - RNA, 23 nt, Artificial Sequence
  Synthetic
cagcucucaagccugaccuuugc

SEQ ID NO: 29556 - RNA, 23 nt, Artificial Sequence
  Synthetic
agcucucaagccugaccuuugcu

SEQ ID NO: 29557 - RNA, 23 nt, Artificial Sequence
  Synthetic
gcucucaagccugaccuuugcuc

SEQ ID NO: 29558 - RNA, 23 nt, Artificial Sequence
  Synthetic
cucucaagccugaccuuugcucu

SEQ ID NO: 29559 - RNA, 23 nt, Artificial Sequence
  Synthetic
ucucaagccugaccuuugcucua

SEQ ID NO: 29560 - RNA, 23 nt, Artificial Sequence
  Synthetic
cucaagccugaccuuugcucuac

SEQ ID NO: 29561 - RNA, 23 nt, Artificial Sequence
  Synthetic
ucaagccugaccuuugcucuaca

SEQ ID NO: 29562 - RNA, 23 nt, Artificial Sequence
  Synthetic
caagccugaccuuugcucuacag

SEQ ID NO: 29563 - RNA, 23 nt, Artificial Sequence
  Synthetic
aagccugaccuuugcucuacaga

SEQ ID NO: 29564 - RNA, 23 nt, Artificial Sequence
  Synthetic
agccugaccuuugcucuacagau

SEQ ID NO: 29565 - RNA, 23 nt, Artificial Sequence
  Synthetic
gccugaccuuugcucuacagaua

SEQ ID NO: 29566 - RNA, 23 nt, Artificial Sequence
  Synthetic
ccugaccuuugcucuacagauag

SEQ ID NO: 29567 - RNA, 23 nt, Artificial Sequence
  Synthetic
cugaccuuugcucuacagauagc

SEQ ID NO: 29568 - RNA, 23 nt, Artificial Sequence
  Synthetic
ugaccuuugcucuacagauagcc

SEQ ID NO: 29569 - RNA, 23 nt, Artificial Sequence
  Synthetic
gaccuuugcucuacagauagccu

SEQ ID NO: 29570 - RNA, 23 nt, Artificial Sequence
  Synthetic
accuuugcucuacagauagccuc

SEQ ID NO: 29571 - RNA, 23 nt, Artificial Sequence
  Synthetic
ccuuugcucuacagauagccuca

SEQ ID NO: 29572 - RNA, 23 nt, Artificial Sequence
  Synthetic
cuuugcucuacagauagccucag

SEQ ID NO: 29573 - RNA, 23 nt, Artificial Sequence
  Synthetic
uuugcucuacagauagccucagu

SEQ ID NO: 29574 - RNA, 23 nt, Artificial Sequence
  Synthetic
uugcucuacagauagccucagua

SEQ ID NO: 29575 - RNA, 23 nt, Artificial Sequence
  Synthetic
ugcucuacagauagccucaguau

SEQ ID NO: 29576 - RNA, 23 nt, Artificial Sequence
  Synthetic
gcucuacagauagccucaguauu

SEQ ID NO: 29577 - RNA, 23 nt, Artificial Sequence
  Synthetic
cucuacagauagccucaguauuc

SEQ ID NO: 29578 - RNA, 23 nt, Artificial Sequence
  Synthetic
ucuacagauagccucaguauuca

SEQ ID NO: 29579 - RNA, 23 nt, Artificial Sequence
  Synthetic
cuacagauagccucaguauucac

SEQ ID NO: 29580 - RNA, 23 nt, Artificial Sequence
  Synthetic
uacagauagccucaguauucacc

SEQ ID NO: 29581 - RNA, 23 nt, Artificial Sequence
  Synthetic
acagauagccucaguauucaccu

SEQ ID NO: 29582 - RNA, 23 nt, Artificial Sequence
  Synthetic
cagauagccucaguauucaccuc

SEQ ID NO: 29583 - RNA, 23 nt, Artificial Sequence
  Synthetic
agauagccucaguauucaccucu

SEQ ID NO: 29584 - RNA, 23 nt, Artificial Sequence
  Synthetic
gauagccucaguauucaccucug

SEQ ID NO: 29585 - RNA, 23 nt, Artificial Sequence
  Synthetic
auagccucaguauucaccucuga

SEQ ID NO: 29586 - RNA, 23 nt, Artificial Sequence
  Synthetic
uagccucaguauucaccucugau

SEQ ID NO: 29587 - RNA, 23 nt, Artificial Sequence
  Synthetic
agccucaguauucaccucugauu

SEQ ID NO: 29588 - RNA, 23 nt, Artificial Sequence
  Synthetic
gccucaguauucaccucugauua

SEQ ID NO: 29589 - RNA, 23 nt, Artificial Sequence
  Synthetic
ccucaguauucaccucugauuau

SEQ ID NO: 29590 - RNA, 23 nt, Artificial Sequence
  Synthetic
cucaguauucaccucugauuaug

SEQ ID NO: 29591 - RNA, 23 nt, Artificial Sequence
  Synthetic
ucaguauucaccucugauuaugu

SEQ ID NO: 29592 - RNA, 23 nt, Artificial Sequence
  Synthetic
caguauucaccucugauuaugug

SEQ ID NO: 29593 - RNA, 23 nt, Artificial Sequence
  Synthetic
aguauucaccucugauuaugugu

SEQ ID NO: 29594 - RNA, 23 nt, Artificial Sequence
  Synthetic
guauucaccucugauuauguguc

SEQ ID NO: 29595 - RNA, 23 nt, Artificial Sequence
  Synthetic
uauucaccucugauuaugugucc

SEQ ID NO: 29596 - RNA, 23 nt, Artificial Sequence
  Synthetic
auucaccucugauuaugugucca

SEQ ID NO: 29597 - RNA, 23 nt, Artificial Sequence
  Synthetic
uucaccucugauuauguguccag

SEQ ID NO: 29598 - RNA, 23 nt, Artificial Sequence
  Synthetic
ucaccucugauuauguguccaga

SEQ ID NO: 29599 - RNA, 23 nt, Artificial Sequence
  Synthetic
caccucugauuauguguccagau

SEQ ID NO: 29600 - RNA, 23 nt, Artificial Sequence
  Synthetic
accucugauuauguguccagauu

SEQ ID NO: 29601 - RNA, 23 nt, Artificial Sequence
  Synthetic
ccucugauuauguguccagauug

SEQ ID NO: 29602 - RNA, 23 nt, Artificial Sequence
  Synthetic
cucugauuauguguccagauugc

SEQ ID NO: 29603 - RNA, 23 nt, Artificial Sequence
  Synthetic
ucugauuauguguccagauugca

SEQ ID NO: 29604 - RNA, 23 nt, Artificial Sequence
  Synthetic
cugauuauguguccagauugcag

SEQ ID NO: 29605 - RNA, 23 nt, Artificial Sequence
  Synthetic
ugauuauguguccagauugcagu

SEQ ID NO: 29606 - RNA, 23 nt, Artificial Sequence
  Synthetic
gauuauguguccagauugcaguu

SEQ ID NO: 29607 - RNA, 23 nt, Artificial Sequence
  Synthetic
auuauguguccagauugcaguuu

SEQ ID NO: 29608 - RNA, 23 nt, Artificial Sequence
  Synthetic
uuauguguccagauugcaguuuc

SEQ ID NO: 29609 - RNA, 23 nt, Artificial Sequence
  Synthetic
uauguguccagauugcaguuuca

SEQ ID NO: 29610 - RNA, 23 nt, Artificial Sequence
  Synthetic
auguguccagauugcaguuucau

SEQ ID NO: 29611 - RNA, 23 nt, Artificial Sequence
  Synthetic
uguguccagauugcaguuucauu

SEQ ID NO: 29612 - RNA, 23 nt, Artificial Sequence
  Synthetic
guguccagauugcaguuucauuc

SEQ ID NO: 29613 - RNA, 23 nt, Artificial Sequence
  Synthetic
uguccagauugcaguuucauucc

SEQ ID NO: 29614 - RNA, 23 nt, Artificial Sequence
  Synthetic
guccagauugcaguuucauuccu

SEQ ID NO: 29615 - RNA, 23 nt, Artificial Sequence
  Synthetic
uccagauugcaguuucauuccug

SEQ ID NO: 29616 - RNA, 23 nt, Artificial Sequence
  Synthetic
ccagauugcaguuucauuccugu

SEQ ID NO: 29617 - RNA, 23 nt, Artificial Sequence
  Synthetic
cagauugcaguuucauuccuguu

SEQ ID NO: 29618 - RNA, 23 nt, Artificial Sequence
  Synthetic
agauugcaguuucauuccuguug

SEQ ID NO: 29619 - RNA, 23 nt, Artificial Sequence
  Synthetic
gauugcaguuucauuccuguuga

SEQ ID NO: 29620 - RNA, 23 nt, Artificial Sequence
  Synthetic
auugcaguuucauuccuguugau

SEQ ID NO: 29621 - RNA, 23 nt, Artificial Sequence
  Synthetic
uugcaguuucauuccuguugaua

SEQ ID NO: 29622 - RNA, 23 nt, Artificial Sequence
  Synthetic
ugcaguuucauuccuguugauac

SEQ ID NO: 29623 - RNA, 23 nt, Artificial Sequence
  Synthetic
gcaguuucauuccuguugauacg

SEQ ID NO: 29624 - RNA, 23 nt, Artificial Sequence
  Synthetic
caguuucauuccuguugauacgc

SEQ ID NO: 29625 - RNA, 23 nt, Artificial Sequence
  Synthetic
aguuucauuccuguugauacgcc

SEQ ID NO: 29626 - RNA, 23 nt, Artificial Sequence
  Synthetic
guuucauuccuguugauacgccu

SEQ ID NO: 29627 - RNA, 23 nt, Artificial Sequence
  Synthetic
uuucauuccuguugauacgccug

SEQ ID NO: 29628 - RNA, 23 nt, Artificial Sequence
  Synthetic
uucauuccuguugauacgccugg

SEQ ID NO: 29629 - RNA, 23 nt, Artificial Sequence
  Synthetic
ucauuccuguugauacgccuggc

SEQ ID NO: 29630 - RNA, 23 nt, Artificial Sequence
  Synthetic
cauuccuguugauacgccuggcu

SEQ ID NO: 29631 - RNA, 23 nt, Artificial Sequence
  Synthetic
auuccuguugauacgccuggcuu

SEQ ID NO: 29632 - RNA, 23 nt, Artificial Sequence
  Synthetic
uuccuguugauacgccuggcuug

SEQ ID NO: 29633 - RNA, 23 nt, Artificial Sequence
  Synthetic
uccuguugauacgccuggcuugg

SEQ ID NO: 29634 - RNA, 23 nt, Artificial Sequence
  Synthetic
ccuguugauacgccuggcuuggg

SEQ ID NO: 29635 - RNA, 23 nt, Artificial Sequence
  Synthetic
cuguugauacgccuggcuugggu

SEQ ID NO: 29636 - RNA, 23 nt, Artificial Sequence
  Synthetic
uguugauacgccuggcuugggug

SEQ ID NO: 29637 - RNA, 23 nt, Artificial Sequence
  Synthetic
guugauacgccuggcuugggugg

SEQ ID NO: 29638 - RNA, 23 nt, Artificial Sequence
  Synthetic
uugauacgccuggcuuggguggg

SEQ ID NO: 29639 - RNA, 23 nt, Artificial Sequence
  Synthetic
ugauacgccuggcuugggugggg

SEQ ID NO: 29640 - RNA, 23 nt, Artificial Sequence
  Synthetic
gauacgccuggcuugggugggga

SEQ ID NO: 29641 - RNA, 23 nt, Artificial Sequence
  Synthetic
auacgccuggcuuggguggggac

SEQ ID NO: 29642 - RNA, 23 nt, Artificial Sequence
  Synthetic
uacgccuggcuuggguggggacc

SEQ ID NO: 29643 - RNA, 23 nt, Artificial Sequence
  Synthetic
acgccuggcuuggguggggaccu

SEQ ID NO: 29644 - RNA, 23 nt, Artificial Sequence
  Synthetic
cgccuggcuuggguggggaccuu

SEQ ID NO: 29645 - RNA, 23 nt, Artificial Sequence
  Synthetic
gccuggcuuggguggggaccuuc

SEQ ID NO: 29646 - RNA, 23 nt, Artificial Sequence
  Synthetic
ccuggcuuggguggggaccuucc

SEQ ID NO: 29647 - RNA, 23 nt, Artificial Sequence
  Synthetic
cuggcuuggguggggaccuuccu

SEQ ID NO: 29648 - RNA, 23 nt, Artificial Sequence
  Synthetic
uggcuuggguggggaccuuccuu

SEQ ID NO: 29649 - RNA, 23 nt, Artificial Sequence
  Synthetic
ggcuuggguggggaccuuccuuc

SEQ ID NO: 29650 - RNA, 23 nt, Artificial Sequence
  Synthetic
gcuuggguggggaccuuccuucc

SEQ ID NO: 29651 - RNA, 23 nt, Artificial Sequence
  Synthetic
cuuggguggggaccuuccuucca

SEQ ID NO: 29652 - RNA, 23 nt, Artificial Sequence
  Synthetic
uuggguggggaccuuccuuccag

SEQ ID NO: 29653 - RNA, 23 nt, Artificial Sequence
  Synthetic
uggguggggaccuuccuuccaga

SEQ ID NO: 29654 - RNA, 23 nt, Artificial Sequence
  Synthetic
ggguggggaccuuccuuccagau

SEQ ID NO: 29655 - RNA, 23 nt, Artificial Sequence
  Synthetic
gguggggaccuuccuuccagauc

SEQ ID NO: 29656 - RNA, 23 nt, Artificial Sequence
  Synthetic
guggggaccuuccuuccagaucc

SEQ ID NO: 29657 - RNA, 23 nt, Artificial Sequence
  Synthetic
uggggaccuuccuuccagauccu

SEQ ID NO: 29658 - RNA, 23 nt, Artificial Sequence
  Synthetic
ggggaccuuccuuccagauccuc

SEQ ID NO: 29659 - RNA, 23 nt, Artificial Sequence
  Synthetic
gggaccuuccuuccagauccucu

SEQ ID NO: 29660 - RNA, 23 nt, Artificial Sequence
  Synthetic
ggaccuuccuuccagauccucua

SEQ ID NO: 29661 - RNA, 23 nt, Artificial Sequence
  Synthetic
gaccuuccuuccagauccucuaa

SEQ ID NO: 29662 - RNA, 23 nt, Artificial Sequence
  Synthetic
accuuccuuccagauccucuaag

SEQ ID NO: 29663 - RNA, 23 nt, Artificial Sequence
  Synthetic
ccuuccuuccagauccucuaagu

SEQ ID NO: 29664 - RNA, 23 nt, Artificial Sequence
  Synthetic
cuuccuuccagauccucuaaguu

SEQ ID NO: 29665 - RNA, 23 nt, Artificial Sequence
  Synthetic
uuccuuccagauccucuaaguuc

SEQ ID NO: 29666 - RNA, 23 nt, Artificial Sequence
  Synthetic
uccuuccagauccucuaaguucu

SEQ ID NO: 29667 - RNA, 23 nt, Artificial Sequence
  Synthetic
ccuuccagauccucuaaguucuc

SEQ ID NO: 29668 - RNA, 23 nt, Artificial Sequence
  Synthetic
cuuccagauccucuaaguucucu

SEQ ID NO: 29669 - RNA, 23 nt, Artificial Sequence
  Synthetic
uuccagauccucuaaguucucuu

SEQ ID NO: 29670 - RNA, 23 nt, Artificial Sequence
  Synthetic
uccagauccucuaaguucucuuu

SEQ ID NO: 29671 - RNA, 23 nt, Artificial Sequence
  Synthetic
ccagauccucuaaguucucuuuc

SEQ ID NO: 29672 - RNA, 23 nt, Artificial Sequence
  Synthetic
cagauccucuaaguucucuuuca

SEQ ID NO: 29673 - RNA, 23 nt, Artificial Sequence
  Synthetic
agauccucuaaguucucuuucau

SEQ ID NO: 29674 - RNA, 23 nt, Artificial Sequence
  Synthetic
gauccucuaaguucucuuucaua

SEQ ID NO: 29675 - RNA, 23 nt, Artificial Sequence
  Synthetic
auccucuaaguucucuuucauau

SEQ ID NO: 29676 - RNA, 23 nt, Artificial Sequence
  Synthetic
uccucuaaguucucuuucauaug

SEQ ID NO: 29677 - RNA, 23 nt, Artificial Sequence
  Synthetic
ccucuaaguucucuuucauaugc

SEQ ID NO: 29678 - RNA, 23 nt, Artificial Sequence
  Synthetic
cucuaaguucucuuucauaugca

SEQ ID NO: 29679 - RNA, 23 nt, Artificial Sequence
  Synthetic
ucuaaguucucuuucauaugcau

SEQ ID NO: 29680 - RNA, 23 nt, Artificial Sequence
  Synthetic
cuaaguucucuuucauaugcauc

SEQ ID NO: 29681 - RNA, 23 nt, Artificial Sequence
  Synthetic
uaaguucucuuucauaugcaucu

SEQ ID NO: 29682 - RNA, 23 nt, Artificial Sequence
  Synthetic
aaguucucuuucauaugcaucuc

SEQ ID NO: 29683 - RNA, 23 nt, Artificial Sequence
  Synthetic
aguucucuuucauaugcaucuca

SEQ ID NO: 29684 - RNA, 23 nt, Artificial Sequence
  Synthetic
guucucuuucauaugcaucucau

SEQ ID NO: 29685 - RNA, 23 nt, Artificial Sequence
  Synthetic
uucucuuucauaugcaucucauu

SEQ ID NO: 29686 - RNA, 23 nt, Artificial Sequence
  Synthetic
ucucuuucauaugcaucucauuc

SEQ ID NO: 29687 - RNA, 23 nt, Artificial Sequence
  Synthetic
cucuuucauaugcaucucauucc

SEQ ID NO: 29688 - RNA, 23 nt, Artificial Sequence
  Synthetic
ucuuucauaugcaucucauucca

SEQ ID NO: 29689 - RNA, 23 nt, Artificial Sequence
  Synthetic
cuuucauaugcaucucauuccag

SEQ ID NO: 29690 - RNA, 23 nt, Artificial Sequence
  Synthetic
uuucauaugcaucucauuccagg

SEQ ID NO: 29691 - RNA, 23 nt, Artificial Sequence
  Synthetic
uucauaugcaucucauuccaggg

SEQ ID NO: 29692 - RNA, 23 nt, Artificial Sequence
  Synthetic
ucauaugcaucucauuccaggga

SEQ ID NO: 29693 - RNA, 23 nt, Artificial Sequence
  Synthetic
cauaugcaucucauuccagggag

SEQ ID NO: 29694 - RNA, 23 nt, Artificial Sequence
  Synthetic
auaugcaucucauuccagggaga

SEQ ID NO: 29695 - RNA, 23 nt, Artificial Sequence
  Synthetic
uaugcaucucauuccagggagaa

SEQ ID NO: 29696 - RNA, 23 nt, Artificial Sequence
  Synthetic
augcaucucauuccagggagaag

SEQ ID NO: 29697 - RNA, 23 nt, Artificial Sequence
  Synthetic
ugcaucucauuccagggagaagg

SEQ ID NO: 29698 - RNA, 23 nt, Artificial Sequence
  Synthetic
gcaucucauuccagggagaaggg

SEQ ID NO: 29699 - RNA, 23 nt, Artificial Sequence
  Synthetic
caucucauuccagggagaagggg

SEQ ID NO: 29700 - RNA, 23 nt, Artificial Sequence
  Synthetic
aucucauuccagggagaagggga

SEQ ID NO: 29701 - RNA, 23 nt, Artificial Sequence
  Synthetic
ucucauuccagggagaaggggag

SEQ ID NO: 29702 - RNA, 23 nt, Artificial Sequence
  Synthetic
cucauuccagggagaaggggaga

SEQ ID NO: 29703 - RNA, 23 nt, Artificial Sequence
  Synthetic
ucauuccagggagaaggggagag

SEQ ID NO: 29704 - RNA, 23 nt, Artificial Sequence
  Synthetic
cauuccagggagaaggggagagu

SEQ ID NO: 29705 - RNA, 23 nt, Artificial Sequence
  Synthetic
auuccagggagaaggggagaguu

SEQ ID NO: 29706 - RNA, 23 nt, Artificial Sequence
  Synthetic
uuccagggagaaggggagaguuc

SEQ ID NO: 29707 - RNA, 23 nt, Artificial Sequence
  Synthetic
uccagggagaaggggagaguucu

SEQ ID NO: 29708 - RNA, 23 nt, Artificial Sequence
  Synthetic
ccagggagaaggggagaguucua

SEQ ID NO: 29709 - RNA, 23 nt, Artificial Sequence
  Synthetic
cagggagaaggggagaguucuaa

SEQ ID NO: 29710 - RNA, 23 nt, Artificial Sequence
  Synthetic
agggagaaggggagaguucuaag

SEQ ID NO: 29711 - RNA, 23 nt, Artificial Sequence
  Synthetic
gggagaaggggagaguucuaagu

SEQ ID NO: 29712 - RNA, 23 nt, Artificial Sequence
  Synthetic
ggagaaggggagaguucuaaguc

SEQ ID NO: 29713 - RNA, 23 nt, Artificial Sequence
  Synthetic
gagaaggggagaguucuaagucc

SEQ ID NO: 29714 - RNA, 23 nt, Artificial Sequence
  Synthetic
agaaggggagaguucuaaguccc

SEQ ID NO: 29715 - RNA, 23 nt, Artificial Sequence
  Synthetic
gaaggggagaguucuaaguccca

SEQ ID NO: 29716 - RNA, 23 nt, Artificial Sequence
  Synthetic
aaggggagaguucuaagucccaa

SEQ ID NO: 29717 - RNA, 23 nt, Artificial Sequence
  Synthetic
aggggagaguucuaagucccaag

SEQ ID NO: 29718 - RNA, 23 nt, Artificial Sequence
  Synthetic
ggggagaguucuaagucccaagu

SEQ ID NO: 29719 - RNA, 23 nt, Artificial Sequence
  Synthetic
gggagaguucuaagucccaaguu

SEQ ID NO: 29720 - RNA, 23 nt, Artificial Sequence
  Synthetic
ggagaguucuaagucccaaguuc

SEQ ID NO: 29721 - RNA, 23 nt, Artificial Sequence
  Synthetic
gagaguucuaagucccaaguucu

SEQ ID NO: 29722 - RNA, 23 nt, Artificial Sequence
  Synthetic
agaguucuaagucccaaguucua

SEQ ID NO: 29723 - RNA, 23 nt, Artificial Sequence
  Synthetic
gaguucuaagucccaaguucuaa

SEQ ID NO: 29724 - RNA, 23 nt, Artificial Sequence
  Synthetic
aguucuaagucccaaguucuaag

SEQ ID NO: 29725 - RNA, 23 nt, Artificial Sequence
  Synthetic
guucuaagucccaaguucuaaga

SEQ ID NO: 29726 - RNA, 23 nt, Artificial Sequence
  Synthetic
uucuaagucccaaguucuaagac

SEQ ID NO: 29727 - RNA, 23 nt, Artificial Sequence
  Synthetic
ucuaagucccaaguucuaagaca

SEQ ID NO: 29728 - RNA, 23 nt, Artificial Sequence
  Synthetic
cuaagucccaaguucuaagacac

SEQ ID NO: 29729 - RNA, 23 nt, Artificial Sequence
  Synthetic
uaagucccaaguucuaagacaca

SEQ ID NO: 29730 - RNA, 23 nt, Artificial Sequence
  Synthetic
aagucccaaguucuaagacacau

SEQ ID NO: 29731 - RNA, 23 nt, Artificial Sequence
  Synthetic
agucccaaguucuaagacacaua

SEQ ID NO: 29732 - RNA, 23 nt, Artificial Sequence
  Synthetic
gucccaaguucuaagacacauac

SEQ ID NO: 29733 - RNA, 23 nt, Artificial Sequence
  Synthetic
ucccaaguucuaagacacauaca

SEQ ID NO: 29734 - RNA, 23 nt, Artificial Sequence
  Synthetic
cccaaguucuaagacacauacag

SEQ ID NO: 29735 - RNA, 23 nt, Artificial Sequence
  Synthetic
ccaaguucuaagacacauacagg

SEQ ID NO: 29736 - RNA, 23 nt, Artificial Sequence
  Synthetic
caaguucuaagacacauacaggu

SEQ ID NO: 29737 - RNA, 23 nt, Artificial Sequence
  Synthetic
aaguucuaagacacauacaggua

SEQ ID NO: 29738 - RNA, 23 nt, Artificial Sequence
  Synthetic
aguucuaagacacauacagguac

SEQ ID NO: 29739 - RNA, 23 nt, Artificial Sequence
  Synthetic
guucuaagacacauacagguaca

SEQ ID NO: 29740 - RNA, 23 nt, Artificial Sequence
  Synthetic
uucuaagacacauacagguacac

SEQ ID NO: 29741 - RNA, 23 nt, Artificial Sequence
  Synthetic
ucuaagacacauacagguacaca

SEQ ID NO: 29742 - RNA, 23 nt, Artificial Sequence
  Synthetic
cuaagacacauacagguacacac

SEQ ID NO: 29743 - RNA, 23 nt, Artificial Sequence
  Synthetic
uaagacacauacagguacacacc

SEQ ID NO: 29744 - RNA, 23 nt, Artificial Sequence
  Synthetic
aagacacauacagguacacaccc

SEQ ID NO: 29745 - RNA, 23 nt, Artificial Sequence
  Synthetic
agacacauacagguacacaccca

SEQ ID NO: 29746 - RNA, 23 nt, Artificial Sequence
  Synthetic
gacacauacagguacacacccac

SEQ ID NO: 29747 - RNA, 23 nt, Artificial Sequence
  Synthetic
acacauacagguacacacccaca

SEQ ID NO: 29748 - RNA, 23 nt, Artificial Sequence
  Synthetic
cacauacagguacacacccacac

SEQ ID NO: 29749 - RNA, 23 nt, Artificial Sequence
  Synthetic
acauacagguacacacccacaca

SEQ ID NO: 29750 - RNA, 23 nt, Artificial Sequence
  Synthetic
cauacagguacacacccacacau

SEQ ID NO: 29751 - RNA, 23 nt, Artificial Sequence
  Synthetic
auacagguacacacccacacaua

SEQ ID NO: 29752 - RNA, 23 nt, Artificial Sequence
  Synthetic
uacagguacacacccacacauac

SEQ ID NO: 29753 - RNA, 23 nt, Artificial Sequence
  Synthetic
acagguacacacccacacauaca

SEQ ID NO: 29754 - RNA, 23 nt, Artificial Sequence
  Synthetic
cagguacacacccacacauacaa

SEQ ID NO: 29755 - RNA, 23 nt, Artificial Sequence
  Synthetic
agguacacacccacacauacaag

SEQ ID NO: 29756 - RNA, 23 nt, Artificial Sequence
  Synthetic
gguacacacccacacauacaagc

SEQ ID NO: 29757 - RNA, 23 nt, Artificial Sequence
  Synthetic
guacacacccacacauacaagca

SEQ ID NO: 29758 - RNA, 23 nt, Artificial Sequence
  Synthetic
uacacacccacacauacaagcac

SEQ ID NO: 29759 - RNA, 23 nt, Artificial Sequence
  Synthetic
acacacccacacauacaagcacc

SEQ ID NO: 29760 - RNA, 23 nt, Artificial Sequence
  Synthetic
cacacccacacauacaagcaccc

SEQ ID NO: 29761 - RNA, 23 nt, Artificial Sequence
  Synthetic
acacccacacauacaagcaccca

SEQ ID NO: 29762 - RNA, 23 nt, Artificial Sequence
  Synthetic
cacccacacauacaagcacccac

SEQ ID NO: 29763 - RNA, 23 nt, Artificial Sequence
  Synthetic
acccacacauacaagcacccacc

SEQ ID NO: 29764 - RNA, 23 nt, Artificial Sequence
  Synthetic
cccacacauacaagcacccaccc

SEQ ID NO: 29765 - RNA, 23 nt, Artificial Sequence
  Synthetic
ccacacauacaagcacccacccu

SEQ ID NO: 29766 - RNA, 23 nt, Artificial Sequence
  Synthetic
cacacauacaagcacccacccuc

SEQ ID NO: 29767 - RNA, 23 nt, Artificial Sequence
  Synthetic
acacauacaagcacccacccuca

SEQ ID NO: 29768 - RNA, 23 nt, Artificial Sequence
  Synthetic
cacauacaagcacccacccucac

SEQ ID NO: 29769 - RNA, 23 nt, Artificial Sequence
  Synthetic
acauacaagcacccacccucacu

SEQ ID NO: 29770 - RNA, 23 nt, Artificial Sequence
  Synthetic
cauacaagcacccacccucacuu

SEQ ID NO: 29771 - RNA, 23 nt, Artificial Sequence
  Synthetic
auacaagcacccacccucacuuu

SEQ ID NO: 29772 - RNA, 23 nt, Artificial Sequence
  Synthetic
uacaagcacccacccucacuuua

SEQ ID NO: 29773 - RNA, 23 nt, Artificial Sequence
  Synthetic
acaagcacccacccucacuuuau

SEQ ID NO: 29774 - RNA, 23 nt, Artificial Sequence
  Synthetic
caagcacccacccucacuuuaug

SEQ ID NO: 29775 - RNA, 23 nt, Artificial Sequence
  Synthetic
aagcacccacccucacuuuaugg

SEQ ID NO: 29776 - RNA, 23 nt, Artificial Sequence
  Synthetic
agcacccacccucacuuuaugga

SEQ ID NO: 29777 - RNA, 23 nt, Artificial Sequence
  Synthetic
gcacccacccucacuuuauggaa

SEQ ID NO: 29778 - RNA, 23 nt, Artificial Sequence
  Synthetic
cacccacccucacuuuauggaaa

SEQ ID NO: 29779 - RNA, 23 nt, Artificial Sequence
  Synthetic
acccacccucacuuuauggaaag

SEQ ID NO: 29780 - RNA, 23 nt, Artificial Sequence
  Synthetic
cccacccucacuuuauggaaagc

SEQ ID NO: 29781 - RNA, 23 nt, Artificial Sequence
  Synthetic
ccacccucacuuuauggaaagca

SEQ ID NO: 29782 - RNA, 23 nt, Artificial Sequence
  Synthetic
cacccucacuuuauggaaagcau

SEQ ID NO: 29783 - RNA, 23 nt, Artificial Sequence
  Synthetic
acccucacuuuauggaaagcauc

SEQ ID NO: 29784 - RNA, 23 nt, Artificial Sequence
  Synthetic
cccucacuuuauggaaagcaucc

SEQ ID NO: 29785 - RNA, 23 nt, Artificial Sequence
  Synthetic
ccucacuuuauggaaagcaucca

SEQ ID NO: 29786 - RNA, 23 nt, Artificial Sequence
  Synthetic
cucacuuuauggaaagcauccag

SEQ ID NO: 29787 - RNA, 23 nt, Artificial Sequence
  Synthetic
ucacuuuauggaaagcauccagu

SEQ ID NO: 29788 - RNA, 23 nt, Artificial Sequence
  Synthetic
cacuuuauggaaagcauccagug

SEQ ID NO: 29789 - RNA, 23 nt, Artificial Sequence
  Synthetic
acuuuauggaaagcauccagugg

SEQ ID NO: 29790 - RNA, 23 nt, Artificial Sequence
  Synthetic
cuuuauggaaagcauccaguggg

SEQ ID NO: 29791 - RNA, 23 nt, Artificial Sequence
  Synthetic
uuuauggaaagcauccagugggg

SEQ ID NO: 29792 - RNA, 23 nt, Artificial Sequence
  Synthetic
uuauggaaagcauccagugggga

SEQ ID NO: 29793 - RNA, 23 nt, Artificial Sequence
  Synthetic
uauggaaagcauccaguggggag

SEQ ID NO: 29794 - RNA, 23 nt, Artificial Sequence
  Synthetic
auggaaagcauccaguggggaga

SEQ ID NO: 29795 - RNA, 23 nt, Artificial Sequence
  Synthetic
uggaaagcauccaguggggagac

SEQ ID NO: 29796 - RNA, 23 nt, Artificial Sequence
  Synthetic
ggaaagcauccaguggggagacu

SEQ ID NO: 29797 - RNA, 23 nt, Artificial Sequence
  Synthetic
gaaagcauccaguggggagacuc

SEQ ID NO: 29798 - RNA, 23 nt, Artificial Sequence
  Synthetic
aaagcauccaguggggagacuca

SEQ ID NO: 29799 - RNA, 23 nt, Artificial Sequence
  Synthetic
aagcauccaguggggagacucau

SEQ ID NO: 29800 - RNA, 23 nt, Artificial Sequence
  Synthetic
agcauccaguggggagacucaug

SEQ ID NO: 29801 - RNA, 23 nt, Artificial Sequence
  Synthetic
gcauccaguggggagacucauga

SEQ ID NO: 29802 - RNA, 23 nt, Artificial Sequence
  Synthetic
cauccaguggggagacucaugaa

SEQ ID NO: 29803 - RNA, 23 nt, Artificial Sequence
  Synthetic
auccaguggggagacucaugaac

SEQ ID NO: 29804 - RNA, 23 nt, Artificial Sequence
  Synthetic
uccaguggggagacucaugaaca

SEQ ID NO: 29805 - RNA, 23 nt, Artificial Sequence
  Synthetic
ccaguggggagacucaugaacau

SEQ ID NO: 29806 - RNA, 23 nt, Artificial Sequence
  Synthetic
caguggggagacucaugaacauc

SEQ ID NO: 29807 - RNA, 23 nt, Artificial Sequence
  Synthetic
aguggggagacucaugaacauca

SEQ ID NO: 29808 - RNA, 23 nt, Artificial Sequence
  Synthetic
guggggagacucaugaacaucag

SEQ ID NO: 29809 - RNA, 23 nt, Artificial Sequence
  Synthetic
uggggagacucaugaacaucagu

SEQ ID NO: 29810 - RNA, 23 nt, Artificial Sequence
  Synthetic
ggggagacucaugaacaucaguc

SEQ ID NO: 29811 - RNA, 23 nt, Artificial Sequence
  Synthetic
gggagacucaugaacaucaguca

SEQ ID NO: 29812 - RNA, 23 nt, Artificial Sequence
  Synthetic
ggagacucaugaacaucagucau

SEQ ID NO: 29813 - RNA, 23 nt, Artificial Sequence
  Synthetic
gagacucaugaacaucagucauu

SEQ ID NO: 29814 - RNA, 23 nt, Artificial Sequence
  Synthetic
agacucaugaacaucagucauuc

SEQ ID NO: 29815 - RNA, 23 nt, Artificial Sequence
  Synthetic
gacucaugaacaucagucauucu

SEQ ID NO: 29816 - RNA, 23 nt, Artificial Sequence
  Synthetic
acucaugaacaucagucauucug

SEQ ID NO: 29817 - RNA, 23 nt, Artificial Sequence
  Synthetic
cucaugaacaucagucauucuga

SEQ ID NO: 29818 - RNA, 23 nt, Artificial Sequence
  Synthetic
ucaugaacaucagucauucugag

SEQ ID NO: 29819 - RNA, 23 nt, Artificial Sequence
  Synthetic
caugaacaucagucauucugagg

SEQ ID NO: 29820 - RNA, 23 nt, Artificial Sequence
  Synthetic
augaacaucagucauucugaggc

SEQ ID NO: 29821 - RNA, 23 nt, Artificial Sequence
  Synthetic
ugaacaucagucauucugaggcc

SEQ ID NO: 29822 - RNA, 23 nt, Artificial Sequence
  Synthetic
gaacaucagucauucugaggcca

SEQ ID NO: 29823 - RNA, 23 nt, Artificial Sequence
  Synthetic
aacaucagucauucugaggccac

SEQ ID NO: 29824 - RNA, 23 nt, Artificial Sequence
  Synthetic
acaucagucauucugaggccaca

SEQ ID NO: 29825 - RNA, 23 nt, Artificial Sequence
  Synthetic
caucagucauucugaggccacau

SEQ ID NO: 29826 - RNA, 23 nt, Artificial Sequence
  Synthetic
aucagucauucugaggccacauc

SEQ ID NO: 29827 - RNA, 23 nt, Artificial Sequence
  Synthetic
ucagucauucugaggccacaucc

SEQ ID NO: 29828 - RNA, 23 nt, Artificial Sequence
  Synthetic
cagucauucugaggccacauccu

SEQ ID NO: 29829 - RNA, 23 nt, Artificial Sequence
  Synthetic
agucauucugaggccacauccuu

SEQ ID NO: 29830 - RNA, 23 nt, Artificial Sequence
  Synthetic
gucauucugaggccacauccuuc

SEQ ID NO: 29831 - RNA, 23 nt, Artificial Sequence
  Synthetic
ucauucugaggccacauccuucu

SEQ ID NO: 29832 - RNA, 23 nt, Artificial Sequence
  Synthetic
cauucugaggccacauccuucua

SEQ ID NO: 29833 - RNA, 23 nt, Artificial Sequence
  Synthetic
auucugaggccacauccuucuac

SEQ ID NO: 29834 - RNA, 23 nt, Artificial Sequence
  Synthetic
uucugaggccacauccuucuacu

SEQ ID NO: 29835 - RNA, 23 nt, Artificial Sequence
  Synthetic
ucugaggccacauccuucuacua

SEQ ID NO: 29836 - RNA, 23 nt, Artificial Sequence
  Synthetic
cugaggccacauccuucuacuaa

SEQ ID NO: 29837 - RNA, 23 nt, Artificial Sequence
  Synthetic
ugaggccacauccuucuacuaaa

SEQ ID NO: 29838 - RNA, 23 nt, Artificial Sequence
  Synthetic
gaggccacauccuucuacuaaac

SEQ ID NO: 29839 - RNA, 23 nt, Artificial Sequence
  Synthetic
aggccacauccuucuacuaaacu

SEQ ID NO: 29840 - RNA, 23 nt, Artificial Sequence
  Synthetic
ggccacauccuucuacuaaacua

SEQ ID NO: 29841 - RNA, 23 nt, Artificial Sequence
  Synthetic
gccacauccuucuacuaaacuaa

SEQ ID NO: 29842 - RNA, 23 nt, Artificial Sequence
  Synthetic
ccacauccuucuacuaaacuaau

SEQ ID NO: 29843 - RNA, 23 nt, Artificial Sequence
  Synthetic
cacauccuucuacuaaacuaauc

SEQ ID NO: 29844 - RNA, 23 nt, Artificial Sequence
  Synthetic
acauccuucuacuaaacuaauca

SEQ ID NO: 29845 - RNA, 23 nt, Artificial Sequence
  Synthetic
cauccuucuacuaaacuaaucau

SEQ ID NO: 29846 - RNA, 23 nt, Artificial Sequence
  Synthetic
auccuucuacuaaacuaaucauu

SEQ ID NO: 29847 - RNA, 23 nt, Artificial Sequence
  Synthetic
uccuucuacuaaacuaaucauuc

SEQ ID NO: 29848 - RNA, 23 nt, Artificial Sequence
  Synthetic
ccuucuacuaaacuaaucauucc

SEQ ID NO: 29849 - RNA, 23 nt, Artificial Sequence
  Synthetic
cuucuacuaaacuaaucauuccg

SEQ ID NO: 29850 - RNA, 23 nt, Artificial Sequence
  Synthetic
uucuacuaaacuaaucauuccgc

SEQ ID NO: 29851 - RNA, 23 nt, Artificial Sequence
  Synthetic
ucuacuaaacuaaucauuccgca

SEQ ID NO: 29852 - RNA, 23 nt, Artificial Sequence
  Synthetic
cuacuaaacuaaucauuccgcag

SEQ ID NO: 29853 - RNA, 23 nt, Artificial Sequence
  Synthetic
uacuaaacuaaucauuccgcaga

SEQ ID NO: 29854 - RNA, 23 nt, Artificial Sequence
  Synthetic
acuaaacuaaucauuccgcagac

SEQ ID NO: 29855 - RNA, 23 nt, Artificial Sequence
  Synthetic
cuaaacuaaucauuccgcagacu

SEQ ID NO: 29856 - RNA, 23 nt, Artificial Sequence
  Synthetic
uaaacuaaucauuccgcagacuu

SEQ ID NO: 29857 - RNA, 23 nt, Artificial Sequence
  Synthetic
aaacuaaucauuccgcagacuug

SEQ ID NO: 29858 - RNA, 23 nt, Artificial Sequence
  Synthetic
aacuaaucauuccgcagacuugg

SEQ ID NO: 29859 - RNA, 23 nt, Artificial Sequence
  Synthetic
acuaaucauuccgcagacuugga

SEQ ID NO: 29860 - RNA, 23 nt, Artificial Sequence
  Synthetic
cuaaucauuccgcagacuuggau

SEQ ID NO: 29861 - RNA, 23 nt, Artificial Sequence
  Synthetic
uaaucauuccgcagacuuggaug

SEQ ID NO: 29862 - RNA, 23 nt, Artificial Sequence
  Synthetic
aaucauuccgcagacuuggaugc

SEQ ID NO: 29863 - RNA, 23 nt, Artificial Sequence
  Synthetic
aucauuccgcagacuuggaugca

SEQ ID NO: 29864 - RNA, 23 nt, Artificial Sequence
  Synthetic
ucauuccgcagacuuggaugcac

SEQ ID NO: 29865 - RNA, 23 nt, Artificial Sequence
  Synthetic
cauuccgcagacuuggaugcacc

SEQ ID NO: 29866 - RNA, 23 nt, Artificial Sequence
  Synthetic
auuccgcagacuuggaugcaccc

SEQ ID NO: 29867 - RNA, 23 nt, Artificial Sequence
  Synthetic
uuccgcagacuuggaugcacccc

SEQ ID NO: 29868 - RNA, 23 nt, Artificial Sequence
  Synthetic
uccgcagacuuggaugcaccccg

SEQ ID NO: 29869 - RNA, 23 nt, Artificial Sequence
  Synthetic
ccgcagacuuggaugcaccccgc

SEQ ID NO: 29870 - RNA, 23 nt, Artificial Sequence
  Synthetic
cgcagacuuggaugcaccccgcu

SEQ ID NO: 29871 - RNA, 23 nt, Artificial Sequence
  Synthetic
gcagacuuggaugcaccccgcuu

SEQ ID NO: 29872 - RNA, 23 nt, Artificial Sequence
  Synthetic
cagacuuggaugcaccccgcuuc

SEQ ID NO: 29873 - RNA, 23 nt, Artificial Sequence
  Synthetic
agacuuggaugcaccccgcuucc

SEQ ID NO: 29874 - RNA, 23 nt, Artificial Sequence
  Synthetic
gacuuggaugcaccccgcuucca

SEQ ID NO: 29875 - RNA, 23 nt, Artificial Sequence
  Synthetic
acuuggaugcaccccgcuuccac

SEQ ID NO: 29876 - RNA, 23 nt, Artificial Sequence
  Synthetic
cuuggaugcaccccgcuuccaca

SEQ ID NO: 29877 - RNA, 23 nt, Artificial Sequence
  Synthetic
uuggaugcaccccgcuuccacau

SEQ ID NO: 29878 - RNA, 23 nt, Artificial Sequence
  Synthetic
uggaugcaccccgcuuccacaug

SEQ ID NO: 29879 - RNA, 23 nt, Artificial Sequence
  Synthetic
ggaugcaccccgcuuccacaugg

SEQ ID NO: 29880 - RNA, 23 nt, Artificial Sequence
  Synthetic
gaugcaccccgcuuccacaugga

SEQ ID NO: 29881 - RNA, 23 nt, Artificial Sequence
  Synthetic
augcaccccgcuuccacauggac

SEQ ID NO: 29882 - RNA, 23 nt, Artificial Sequence
  Synthetic
ugcaccccgcuuccacauggacu

SEQ ID NO: 29883 - RNA, 23 nt, Artificial Sequence
  Synthetic
gcaccccgcuuccacauggacuu

SEQ ID NO: 29884 - RNA, 23 nt, Artificial Sequence
  Synthetic
caccccgcuuccacauggacuuu

SEQ ID NO: 29885 - RNA, 23 nt, Artificial Sequence
  Synthetic
accccgcuuccacauggacuuua

SEQ ID NO: 29886 - RNA, 23 nt, Artificial Sequence
  Synthetic
ccccgcuuccacauggacuuuac

SEQ ID NO: 29887 - RNA, 23 nt, Artificial Sequence
  Synthetic
cccgcuuccacauggacuuuacc

SEQ ID NO: 29888 - RNA, 23 nt, Artificial Sequence
  Synthetic
ccgcuuccacauggacuuuacca

SEQ ID NO: 29889 - RNA, 23 nt, Artificial Sequence
  Synthetic
cgcuuccacauggacuuuaccau

SEQ ID NO: 29890 - RNA, 23 nt, Artificial Sequence
  Synthetic
gcuuccacauggacuuuaccauc

SEQ ID NO: 29891 - RNA, 23 nt, Artificial Sequence
  Synthetic
cuuccacauggacuuuaccaucc

SEQ ID NO: 29892 - RNA, 23 nt, Artificial Sequence
  Synthetic
uuccacauggacuuuaccaucca

SEQ ID NO: 29893 - RNA, 23 nt, Artificial Sequence
  Synthetic
uccacauggacuuuaccauccac

SEQ ID NO: 29894 - RNA, 23 nt, Artificial Sequence
  Synthetic
ccacauggacuuuaccauccaca

SEQ ID NO: 29895 - RNA, 23 nt, Artificial Sequence
  Synthetic
cacauggacuuuaccauccacaa

SEQ ID NO: 29896 - RNA, 23 nt, Artificial Sequence
  Synthetic
acauggacuuuaccauccacaac

SEQ ID NO: 29897 - RNA, 23 nt, Artificial Sequence
  Synthetic
cauggacuuuaccauccacaacu

SEQ ID NO: 29898 - RNA, 23 nt, Artificial Sequence
  Synthetic
auggacuuuaccauccacaacuu

SEQ ID NO: 29899 - RNA, 23 nt, Artificial Sequence
  Synthetic
uggacuuuaccauccacaacuua

SEQ ID NO: 29900 - RNA, 23 nt, Artificial Sequence
  Synthetic
ggacuuuaccauccacaacuuac

SEQ ID NO: 29901 - RNA, 23 nt, Artificial Sequence
  Synthetic
gacuuuaccauccacaacuuacc

SEQ ID NO: 29902 - RNA, 23 nt, Artificial Sequence
  Synthetic
acuuuaccauccacaacuuacca

SEQ ID NO: 29903 - RNA, 23 nt, Artificial Sequence
  Synthetic
cuuuaccauccacaacuuaccag

SEQ ID NO: 29904 - RNA, 23 nt, Artificial Sequence
  Synthetic
uuuaccauccacaacuuaccagc

SEQ ID NO: 29905 - RNA, 23 nt, Artificial Sequence
  Synthetic
uuaccauccacaacuuaccagca

SEQ ID NO: 29906 - RNA, 23 nt, Artificial Sequence
  Synthetic
uaccauccacaacuuaccagcaa

SEQ ID NO: 29907 - RNA, 23 nt, Artificial Sequence
  Synthetic
accauccacaacuuaccagcaag

SEQ ID NO: 29908 - RNA, 23 nt, Artificial Sequence
  Synthetic
ccauccacaacuuaccagcaaga

SEQ ID NO: 29909 - RNA, 23 nt, Artificial Sequence
  Synthetic
cauccacaacuuaccagcaagaa

SEQ ID NO: 29910 - RNA, 23 nt, Artificial Sequence
  Synthetic
auccacaacuuaccagcaagaau

SEQ ID NO: 29911 - RNA, 23 nt, Artificial Sequence
  Synthetic
uccacaacuuaccagcaagaauu

SEQ ID NO: 29912 - RNA, 23 nt, Artificial Sequence
  Synthetic
ccacaacuuaccagcaagaauuu

SEQ ID NO: 29913 - RNA, 23 nt, Artificial Sequence
  Synthetic
cacaacuuaccagcaagaauuug

SEQ ID NO: 29914 - RNA, 23 nt, Artificial Sequence
  Synthetic
acaacuuaccagcaagaauuugg

SEQ ID NO: 29915 - RNA, 23 nt, Artificial Sequence
  Synthetic
caacuuaccagcaagaauuugga

SEQ ID NO: 29916 - RNA, 23 nt, Artificial Sequence
  Synthetic
aacuuaccagcaagaauuuggaa

SEQ ID NO: 29917 - RNA, 23 nt, Artificial Sequence
  Synthetic
acuuaccagcaagaauuuggaag

SEQ ID NO: 29918 - RNA, 23 nt, Artificial Sequence
  Synthetic
cuuaccagcaagaauuuggaaga

SEQ ID NO: 29919 - RNA, 23 nt, Artificial Sequence
  Synthetic
uuaccagcaagaauuuggaagau

SEQ ID NO: 29920 - RNA, 23 nt, Artificial Sequence
  Synthetic
uaccagcaagaauuuggaagauu

SEQ ID NO: 29921 - RNA, 23 nt, Artificial Sequence
  Synthetic
accagcaagaauuuggaagauuc

SEQ ID NO: 29922 - RNA, 23 nt, Artificial Sequence
  Synthetic
ccagcaagaauuuggaagauucc

SEQ ID NO: 29923 - RNA, 23 nt, Artificial Sequence
  Synthetic
cagcaagaauuuggaagauucca

SEQ ID NO: 29924 - RNA, 23 nt, Artificial Sequence
  Synthetic
agcaagaauuuggaagauuccag

SEQ ID NO: 29925 - RNA, 23 nt, Artificial Sequence
  Synthetic
gcaagaauuuggaagauuccagu

SEQ ID NO: 29926 - RNA, 23 nt, Artificial Sequence
  Synthetic
caagaauuuggaagauuccagug

SEQ ID NO: 29927 - RNA, 23 nt, Artificial Sequence
  Synthetic
aagaauuuggaagauuccaguga

SEQ ID NO: 29928 - RNA, 23 nt, Artificial Sequence
  Synthetic
agaauuuggaagauuccagugau

SEQ ID NO: 29929 - RNA, 23 nt, Artificial Sequence
  Synthetic
gaauuuggaagauuccagugaug

SEQ ID NO: 29930 - RNA, 23 nt, Artificial Sequence
  Synthetic
aauuuggaagauuccagugaugu

SEQ ID NO: 29931 - RNA, 23 nt, Artificial Sequence
  Synthetic
auuuggaagauuccagugaugua

SEQ ID NO: 29932 - RNA, 23 nt, Artificial Sequence
  Synthetic
uuuggaagauuccagugauguaa

SEQ ID NO: 29933 - RNA, 23 nt, Artificial Sequence
  Synthetic
uuggaagauuccagugauguaaa

SEQ ID NO: 29934 - RNA, 23 nt, Artificial Sequence
  Synthetic
uggaagauuccagugauguaaaa

SEQ ID NO: 29935 - RNA, 23 nt, Artificial Sequence
  Synthetic
ggaagauuccagugauguaaaac

SEQ ID NO: 29936 - RNA, 23 nt, Artificial Sequence
  Synthetic
gaagauuccagugauguaaaacc

SEQ ID NO: 29937 - RNA, 23 nt, Artificial Sequence
  Synthetic
aagauuccagugauguaaaaccu

SEQ ID NO: 29938 - RNA, 23 nt, Artificial Sequence
  Synthetic
agauuccagugauguaaaaccug

SEQ ID NO: 29939 - RNA, 23 nt, Artificial Sequence
  Synthetic
gauuccagugauguaaaaccugc

SEQ ID NO: 29940 - RNA, 23 nt, Artificial Sequence
  Synthetic
auuccagugauguaaaaccugcc

SEQ ID NO: 29941 - RNA, 23 nt, Artificial Sequence
  Synthetic
uuccagugauguaaaaccugccc

SEQ ID NO: 29942 - RNA, 23 nt, Artificial Sequence
  Synthetic
uccagugauguaaaaccugcccc

SEQ ID NO: 29943 - RNA, 23 nt, Artificial Sequence
  Synthetic
ccagugauguaaaaccugccccc

SEQ ID NO: 29944 - RNA, 23 nt, Artificial Sequence
  Synthetic
cagugauguaaaaccugcccccc

SEQ ID NO: 29945 - RNA, 23 nt, Artificial Sequence
  Synthetic
agugauguaaaaccugccccccu

SEQ ID NO: 29946 - RNA, 23 nt, Artificial Sequence
  Synthetic
gugauguaaaaccugccccccuu

SEQ ID NO: 29947 - RNA, 23 nt, Artificial Sequence
  Synthetic
ugauguaaaaccugccccccuug

SEQ ID NO: 29948 - RNA, 23 nt, Artificial Sequence
  Synthetic
gauguaaaaccugccccccuugg

SEQ ID NO: 29949 - RNA, 23 nt, Artificial Sequence
  Synthetic
auguaaaaccugccccccuuggu

SEQ ID NO: 29950 - RNA, 23 nt, Artificial Sequence
  Synthetic
uguaaaaccugccccccuuggug

SEQ ID NO: 29951 - RNA, 23 nt, Artificial Sequence
  Synthetic
guaaaaccugccccccuugguga

SEQ ID NO: 29952 - RNA, 23 nt, Artificial Sequence
  Synthetic
uaaaaccugccccccuuggugag

SEQ ID NO: 29953 - RNA, 23 nt, Artificial Sequence
  Synthetic
aaaaccugccccccuuggugagg

SEQ ID NO: 29954 - RNA, 23 nt, Artificial Sequence
  Synthetic
aaaccugccccccuuggugaggg

SEQ ID NO: 29955 - RNA, 23 nt, Artificial Sequence
  Synthetic
aaccugccccccuuggugagggu

SEQ ID NO: 29956 - RNA, 23 nt, Artificial Sequence
  Synthetic
accugccccccuuggugagggug

SEQ ID NO: 29957 - RNA, 23 nt, Artificial Sequence
  Synthetic
ccugccccccuuggugaggguga

SEQ ID NO: 29958 - RNA, 23 nt, Artificial Sequence
  Synthetic
cugccccccuuggugagggugaa

SEQ ID NO: 29959 - RNA, 23 nt, Artificial Sequence
  Synthetic
ugccccccuuggugagggugaag

SEQ ID NO: 29960 - RNA, 23 nt, Artificial Sequence
  Synthetic
gccccccuuggugagggugaaga

SEQ ID NO: 29961 - RNA, 23 nt, Artificial Sequence
  Synthetic
ccccccuuggugagggugaagag

SEQ ID NO: 29962 - RNA, 23 nt, Artificial Sequence
  Synthetic
cccccuuggugagggugaagagu

SEQ ID NO: 29963 - RNA, 23 nt, Artificial Sequence
  Synthetic
ccccuuggugagggugaagaguu

SEQ ID NO: 29964 - RNA, 23 nt, Artificial Sequence
  Synthetic
cccuuggugagggugaagaguug

SEQ ID NO: 29965 - RNA, 23 nt, Artificial Sequence
  Synthetic
ccuuggugagggugaagaguugg

SEQ ID NO: 29966 - RNA, 23 nt, Artificial Sequence
  Synthetic
cuuggugagggugaagaguuggc

SEQ ID NO: 29967 - RNA, 23 nt, Artificial Sequence
  Synthetic
uuggugagggugaagaguuggca

SEQ ID NO: 29968 - RNA, 23 nt, Artificial Sequence
  Synthetic
uggugagggugaagaguuggcag

SEQ ID NO: 29969 - RNA, 23 nt, Artificial Sequence
  Synthetic
ggugagggugaagaguuggcaga

SEQ ID NO: 29970 - RNA, 23 nt, Artificial Sequence
  Synthetic
gugagggugaagaguuggcagaa

SEQ ID NO: 29971 - RNA, 23 nt, Artificial Sequence
  Synthetic
ugagggugaagaguuggcagaag

SEQ ID NO: 29972 - RNA, 23 nt, Artificial Sequence
  Synthetic
gagggugaagaguuggcagaaga

SEQ ID NO: 29973 - RNA, 23 nt, Artificial Sequence
  Synthetic
agggugaagaguuggcagaagaa

SEQ ID NO: 29974 - RNA, 23 nt, Artificial Sequence
  Synthetic
gggugaagaguuggcagaagaac

SEQ ID NO: 29975 - RNA, 23 nt, Artificial Sequence
  Synthetic
ggugaagaguuggcagaagaaca

SEQ ID NO: 29976 - RNA, 23 nt, Artificial Sequence
  Synthetic
gugaagaguuggcagaagaacag

SEQ ID NO: 29977 - RNA, 23 nt, Artificial Sequence
  Synthetic
ugaagaguuggcagaagaacagg

SEQ ID NO: 29978 - RNA, 23 nt, Artificial Sequence
  Synthetic
gaagaguuggcagaagaacagga

SEQ ID NO: 29979 - RNA, 23 nt, Artificial Sequence
  Synthetic
aagaguuggcagaagaacaggaa

SEQ ID NO: 29980 - RNA, 23 nt, Artificial Sequence
  Synthetic
agaguuggcagaagaacaggaac

SEQ ID NO: 29981 - RNA, 23 nt, Artificial Sequence
  Synthetic
gaguuggcagaagaacaggaaca

SEQ ID NO: 29982 - RNA, 23 nt, Artificial Sequence
  Synthetic
aguuggcagaagaacaggaacag

SEQ ID NO: 29983 - RNA, 23 nt, Artificial Sequence
  Synthetic
guuggcagaagaacaggaacaga

SEQ ID NO: 29984 - RNA, 23 nt, Artificial Sequence
  Synthetic
uuggcagaagaacaggaacagag

SEQ ID NO: 29985 - RNA, 23 nt, Artificial Sequence
  Synthetic
uggcagaagaacaggaacagaga

SEQ ID NO: 29986 - RNA, 23 nt, Artificial Sequence
  Synthetic
ggcagaagaacaggaacagagac

SEQ ID NO: 29987 - RNA, 23 nt, Artificial Sequence
  Synthetic
gcagaagaacaggaacagagaca

SEQ ID NO: 29988 - RNA, 23 nt, Artificial Sequence
  Synthetic
cagaagaacaggaacagagacag

SEQ ID NO: 29989 - RNA, 23 nt, Artificial Sequence
  Synthetic
agaagaacaggaacagagacaga

SEQ ID NO: 29990 - RNA, 23 nt, Artificial Sequence
  Synthetic
gaagaacaggaacagagacagaa

SEQ ID NO: 29991 - RNA, 23 nt, Artificial Sequence
  Synthetic
aagaacaggaacagagacagaau

SEQ ID NO: 29992 - RNA, 23 nt, Artificial Sequence
  Synthetic
agaacaggaacagagacagaaug

SEQ ID NO: 29993 - RNA, 23 nt, Artificial Sequence
  Synthetic
gaacaggaacagagacagaaugc

SEQ ID NO: 29994 - RNA, 23 nt, Artificial Sequence
  Synthetic
aacaggaacagagacagaaugcu

SEQ ID NO: 29995 - RNA, 23 nt, Artificial Sequence
  Synthetic
acaggaacagagacagaaugcug

SEQ ID NO: 29996 - RNA, 23 nt, Artificial Sequence
  Synthetic
caggaacagagacagaaugcuga

SEQ ID NO: 29997 - RNA, 23 nt, Artificial Sequence
  Synthetic
aggaacagagacagaaugcugaa

SEQ ID NO: 29998 - RNA, 23 nt, Artificial Sequence
  Synthetic
ggaacagagacagaaugcugaag

SEQ ID NO: 29999 - RNA, 23 nt, Artificial Sequence
  Synthetic
gaacagagacagaaugcugaaga

SEQ ID NO: 30000 - RNA, 23 nt, Artificial Sequence
  Synthetic
aacagagacagaaugcugaagau

SEQ ID NO: 30001 - RNA, 23 nt, Artificial Sequence
  Synthetic
acagagacagaaugcugaagaug

SEQ ID NO: 30002 - RNA, 23 nt, Artificial Sequence
  Synthetic
cagagacagaaugcugaagauga

SEQ ID NO: 30003 - RNA, 23 nt, Artificial Sequence
  Synthetic
agagacagaaugcugaagaugau

SEQ ID NO: 30004 - RNA, 23 nt, Artificial Sequence
  Synthetic
gagacagaaugcugaagaugauc

SEQ ID NO: 30005 - RNA, 23 nt, Artificial Sequence
  Synthetic
agacagaaugcugaagaugaucg

SEQ ID NO: 30006 - RNA, 23 nt, Artificial Sequence
  Synthetic
gacagaaugcugaagaugaucga

SEQ ID NO: 30007 - RNA, 23 nt, Artificial Sequence
  Synthetic
acagaaugcugaagaugaucgac

SEQ ID NO: 30008 - RNA, 23 nt, Artificial Sequence
  Synthetic
cagaaugcugaagaugaucgaca

SEQ ID NO: 30009 - RNA, 23 nt, Artificial Sequence
  Synthetic
agaaugcugaagaugaucgacag

SEQ ID NO: 30010 - RNA, 23 nt, Artificial Sequence
  Synthetic
gaaugcugaagaugaucgacagg

SEQ ID NO: 30011 - RNA, 23 nt, Artificial Sequence
  Synthetic
aaugcugaagaugaucgacagga

SEQ ID NO: 30012 - RNA, 23 nt, Artificial Sequence
  Synthetic
augcugaagaugaucgacaggau

SEQ ID NO: 30013 - RNA, 23 nt, Artificial Sequence
  Synthetic
ugcugaagaugaucgacaggauc

SEQ ID NO: 30014 - RNA, 23 nt, Artificial Sequence
  Synthetic
gcugaagaugaucgacaggauca

SEQ ID NO: 30015 - RNA, 23 nt, Artificial Sequence
  Synthetic
cugaagaugaucgacaggaucau

SEQ ID NO: 30016 - RNA, 23 nt, Artificial Sequence
  Synthetic
ugaagaugaucgacaggaucaug

SEQ ID NO: 30017 - RNA, 23 nt, Artificial Sequence
  Synthetic
gaagaugaucgacaggaucaugg

SEQ ID NO: 30018 - RNA, 23 nt, Artificial Sequence
  Synthetic
aagaugaucgacaggaucauggu

SEQ ID NO: 30019 - RNA, 23 nt, Artificial Sequence
  Synthetic
agaugaucgacaggaucauggug

SEQ ID NO: 30020 - RNA, 23 nt, Artificial Sequence
  Synthetic
gaugaucgacaggaucauggugg

SEQ ID NO: 30021 - RNA, 23 nt, Artificial Sequence
  Synthetic
augaucgacaggaucaugguggc

SEQ ID NO: 30022 - RNA, 23 nt, Artificial Sequence
  Synthetic
ugaucgacaggaucaugguggcc

SEQ ID NO: 30023 - RNA, 23 nt, Artificial Sequence
  Synthetic
gaucgacaggaucaugguggccu

SEQ ID NO: 30024 - RNA, 23 nt, Artificial Sequence
  Synthetic
aucgacaggaucaugguggccug

SEQ ID NO: 30025 - RNA, 23 nt, Artificial Sequence
  Synthetic
ucgacaggaucaugguggccugg

SEQ ID NO: 30026 - RNA, 23 nt, Artificial Sequence
  Synthetic
cgacaggaucaugguggccugga

SEQ ID NO: 30027 - RNA, 23 nt, Artificial Sequence
  Synthetic
gacaggaucaugguggccuggac

SEQ ID NO: 30028 - RNA, 23 nt, Artificial Sequence
  Synthetic
acaggaucaugguggccuggaca

SEQ ID NO: 30029 - RNA, 23 nt, Artificial Sequence
  Synthetic
caggaucaugguggccuggacag

SEQ ID NO: 30030 - RNA, 23 nt, Artificial Sequence
  Synthetic
aggaucaugguggccuggacaga

SEQ ID NO: 30031 - RNA, 23 nt, Artificial Sequence
  Synthetic
ggaucaugguggccuggacagac

SEQ ID NO: 30032 - RNA, 23 nt, Artificial Sequence
  Synthetic
gaucaugguggccuggacagacu

SEQ ID NO: 30033 - RNA, 23 nt, Artificial Sequence
  Synthetic
aucaugguggccuggacagacug

SEQ ID NO: 30034 - RNA, 23 nt, Artificial Sequence
  Synthetic
ucaugguggccuggacagacugc

SEQ ID NO: 30035 - RNA, 23 nt, Artificial Sequence
  Synthetic
caugguggccuggacagacugca

SEQ ID NO: 30036 - RNA, 23 nt, Artificial Sequence
  Synthetic
augguggccuggacagacugcag

SEQ ID NO: 30037 - RNA, 23 nt, Artificial Sequence
  Synthetic
ugguggccuggacagacugcagc

SEQ ID NO: 30038 - RNA, 23 nt, Artificial Sequence
  Synthetic
gguggccuggacagacugcagcc

SEQ ID NO: 30039 - RNA, 23 nt, Artificial Sequence
  Synthetic
guggccuggacagacugcagcca

SEQ ID NO: 30040 - RNA, 23 nt, Artificial Sequence
  Synthetic
uggccuggacagacugcagccau

SEQ ID NO: 30041 - RNA, 23 nt, Artificial Sequence
  Synthetic
ggccuggacagacugcagccauu

SEQ ID NO: 30042 - RNA, 23 nt, Artificial Sequence
  Synthetic
gccuggacagacugcagccauuc

SEQ ID NO: 30043 - RNA, 23 nt, Artificial Sequence
  Synthetic
ccuggacagacugcagccauucg

SEQ ID NO: 30044 - RNA, 23 nt, Artificial Sequence
  Synthetic
cuggacagacugcagccauucgu

SEQ ID NO: 30045 - RNA, 23 nt, Artificial Sequence
  Synthetic
uggacagacugcagccauucguu

SEQ ID NO: 30046 - RNA, 23 nt, Artificial Sequence
  Synthetic
ggacagacugcagccauucguuu

SEQ ID NO: 30047 - RNA, 23 nt, Artificial Sequence
  Synthetic
gacagacugcagccauucguuug

SEQ ID NO: 30048 - RNA, 23 nt, Artificial Sequence
  Synthetic
acagacugcagccauucguuugg

SEQ ID NO: 30049 - RNA, 23 nt, Artificial Sequence
  Synthetic
cagacugcagccauucguuuggu

SEQ ID NO: 30050 - RNA, 23 nt, Artificial Sequence
  Synthetic
agacugcagccauucguuuggug

SEQ ID NO: 30051 - RNA, 23 nt, Artificial Sequence
  Synthetic
gacugcagccauucguuugguga

SEQ ID NO: 30052 - RNA, 23 nt, Artificial Sequence
  Synthetic
acugcagccauucguuuggugau

SEQ ID NO: 30053 - RNA, 23 nt, Artificial Sequence
  Synthetic
cugcagccauucguuuggugaug

SEQ ID NO: 30054 - RNA, 23 nt, Artificial Sequence
  Synthetic
ugcagccauucguuuggugauga

SEQ ID NO: 30055 - RNA, 23 nt, Artificial Sequence
  Synthetic
gcagccauucguuuggugaugau

SEQ ID NO: 30056 - RNA, 23 nt, Artificial Sequence
  Synthetic
cagccauucguuuggugaugaug

SEQ ID NO: 30057 - RNA, 23 nt, Artificial Sequence
  Synthetic
agccauucguuuggugaugauga

SEQ ID NO: 30058 - RNA, 23 nt, Artificial Sequence
  Synthetic
gccauucguuuggugaugaugag

SEQ ID NO: 30059 - RNA, 23 nt, Artificial Sequence
  Synthetic
ccauucguuuggugaugaugaga

SEQ ID NO: 30060 - RNA, 23 nt, Artificial Sequence
  Synthetic
cauucguuuggugaugaugagaa

SEQ ID NO: 30061 - RNA, 23 nt, Artificial Sequence
  Synthetic
auucguuuggugaugaugagaaa

SEQ ID NO: 30062 - RNA, 23 nt, Artificial Sequence
  Synthetic
uucguuuggugaugaugagaaac

SEQ ID NO: 30063 - RNA, 23 nt, Artificial Sequence
  Synthetic
ucguuuggugaugaugagaaaca

SEQ ID NO: 30064 - RNA, 23 nt, Artificial Sequence
  Synthetic
cguuuggugaugaugagaaacag

SEQ ID NO: 30065 - RNA, 23 nt, Artificial Sequence
  Synthetic
guuuggugaugaugagaaacagu

SEQ ID NO: 30066 - RNA, 23 nt, Artificial Sequence
  Synthetic
uuuggugaugaugagaaacagug

SEQ ID NO: 30067 - RNA, 23 nt, Artificial Sequence
  Synthetic
uuggugaugaugagaaacagugg

SEQ ID NO: 30068 - RNA, 23 nt, Artificial Sequence
  Synthetic
uggugaugaugagaaacaguggu

SEQ ID NO: 30069 - RNA, 23 nt, Artificial Sequence
  Synthetic
ggugaugaugagaaacaguggug

SEQ ID NO: 30070 - RNA, 23 nt, Artificial Sequence
  Synthetic
gugaugaugagaaacaguggugg

SEQ ID NO: 30071 - RNA, 23 nt, Artificial Sequence
  Synthetic
ugaugaugagaaacaguggugga

SEQ ID NO: 30072 - RNA, 23 nt, Artificial Sequence
  Synthetic
gaugaugagaaacagugguggac

SEQ ID NO: 30073 - RNA, 23 nt, Artificial Sequence
  Synthetic
augaugagaaacagugguggaca

SEQ ID NO: 30074 - RNA, 23 nt, Artificial Sequence
  Synthetic
ugaugagaaacagugguggacau

SEQ ID NO: 30075 - RNA, 23 nt, Artificial Sequence
  Synthetic
gaugagaaacagugguggacauu

SEQ ID NO: 30076 - RNA, 23 nt, Artificial Sequence
  Synthetic
augagaaacagugguggacauuu

SEQ ID NO: 30077 - RNA, 23 nt, Artificial Sequence
  Synthetic
ugagaaacagugguggacauuuc

SEQ ID NO: 30078 - RNA, 23 nt, Artificial Sequence
  Synthetic
gagaaacagugguggacauuucc

SEQ ID NO: 30079 - RNA, 23 nt, Artificial Sequence
  Synthetic
agaaacagugguggacauuuccu

SEQ ID NO: 30080 - RNA, 23 nt, Artificial Sequence
  Synthetic
gaaacagugguggacauuuccug

SEQ ID NO: 30081 - RNA, 23 nt, Artificial Sequence
  Synthetic
aaacagugguggacauuuccuga

SEQ ID NO: 30082 - RNA, 23 nt, Artificial Sequence
  Synthetic
aacagugguggacauuuccugag

SEQ ID NO: 30083 - RNA, 23 nt, Artificial Sequence
  Synthetic
acagugguggacauuuccugagg

SEQ ID NO: 30084 - RNA, 23 nt, Artificial Sequence
  Synthetic
cagugguggacauuuccugagga

SEQ ID NO: 30085 - RNA, 23 nt, Artificial Sequence
  Synthetic
agugguggacauuuccugaggaa

SEQ ID NO: 30086 - RNA, 23 nt, Artificial Sequence
  Synthetic
gugguggacauuuccugaggaag

SEQ ID NO: 30087 - RNA, 23 nt, Artificial Sequence
  Synthetic
ugguggacauuuccugaggaaga

SEQ ID NO: 30088 - RNA, 23 nt, Artificial Sequence
  Synthetic
gguggacauuuccugaggaagag

SEQ ID NO: 30089 - RNA, 23 nt, Artificial Sequence
  Synthetic
guggacauuuccugaggaagagg

SEQ ID NO: 30090 - RNA, 23 nt, Artificial Sequence
  Synthetic
uggacauuuccugaggaagaggu

SEQ ID NO: 30091 - RNA, 23 nt, Artificial Sequence
  Synthetic
ggacauuuccugaggaagaggug

SEQ ID NO: 30092 - RNA, 23 nt, Artificial Sequence
  Synthetic
gacauuuccugaggaagaggugc

SEQ ID NO: 30093 - RNA, 23 nt, Artificial Sequence
  Synthetic
acauuuccugaggaagaggugcu

SEQ ID NO: 30094 - RNA, 23 nt, Artificial Sequence
  Synthetic
cauuuccugaggaagaggugcua

SEQ ID NO: 30095 - RNA, 23 nt, Artificial Sequence
  Synthetic
auuuccugaggaagaggugcuac

SEQ ID NO: 30096 - RNA, 23 nt, Artificial Sequence
  Synthetic
uuuccugaggaagaggugcuaca

SEQ ID NO: 30097 - RNA, 23 nt, Artificial Sequence
  Synthetic
uuccugaggaagaggugcuacag

SEQ ID NO: 30098 - RNA, 23 nt, Artificial Sequence
  Synthetic
uccugaggaagaggugcuacagu

SEQ ID NO: 30099 - RNA, 23 nt, Artificial Sequence
  Synthetic
ccugaggaagaggugcuacaguu

SEQ ID NO: 30100 - RNA, 23 nt, Artificial Sequence
  Synthetic
cugaggaagaggugcuacaguuc

SEQ ID NO: 30101 - RNA, 23 nt, Artificial Sequence
  Synthetic
ugaggaagaggugcuacaguucu

SEQ ID NO: 30102 - RNA, 23 nt, Artificial Sequence
  Synthetic
gaggaagaggugcuacaguucug

SEQ ID NO: 30103 - RNA, 23 nt, Artificial Sequence
  Synthetic
aggaagaggugcuacaguucugc

SEQ ID NO: 30104 - RNA, 23 nt, Artificial Sequence
  Synthetic
ggaagaggugcuacaguucugcc

SEQ ID NO: 30105 - RNA, 23 nt, Artificial Sequence
  Synthetic
gaagaggugcuacaguucugcca

SEQ ID NO: 30106 - RNA, 23 nt, Artificial Sequence
  Synthetic
aagaggugcuacaguucugccag

SEQ ID NO: 30107 - RNA, 23 nt, Artificial Sequence
  Synthetic
agaggugcuacaguucugccaga

SEQ ID NO: 30108 - RNA, 23 nt, Artificial Sequence
  Synthetic
gaggugcuacaguucugccagag

SEQ ID NO: 30109 - RNA, 23 nt, Artificial Sequence
  Synthetic
aggugcuacaguucugccagaga

SEQ ID NO: 30110 - RNA, 23 nt, Artificial Sequence
  Synthetic
ggugcuacaguucugccagagau

SEQ ID NO: 30111 - RNA, 23 nt, Artificial Sequence
  Synthetic
gugcuacaguucugccagagauc

SEQ ID NO: 30112 - RNA, 23 nt, Artificial Sequence
  Synthetic
ugcuacaguucugccagagauca

SEQ ID NO: 30113 - RNA, 23 nt, Artificial Sequence
  Synthetic
gcuacaguucugccagagaucag

SEQ ID NO: 30114 - RNA, 23 nt, Artificial Sequence
  Synthetic
cuacaguucugccagagaucagu

SEQ ID NO: 30115 - RNA, 23 nt, Artificial Sequence
  Synthetic
uacaguucugccagagaucaguu

SEQ ID NO: 30116 - RNA, 23 nt, Artificial Sequence
  Synthetic
acaguucugccagagaucaguug

SEQ ID NO: 30117 - RNA, 23 nt, Artificial Sequence
  Synthetic
caguucugccagagaucaguugc

SEQ ID NO: 30118 - RNA, 23 nt, Artificial Sequence
  Synthetic
aguucugccagagaucaguugcg

SEQ ID NO: 30119 - RNA, 23 nt, Artificial Sequence
  Synthetic
guucugccagagaucaguugcgu

SEQ ID NO: 30120 - RNA, 23 nt, Artificial Sequence
  Synthetic
uucugccagagaucaguugcgug

SEQ ID NO: 30121 - RNA, 23 nt, Artificial Sequence
  Synthetic
ucugccagagaucaguugcgugu

SEQ ID NO: 30122 - RNA, 23 nt, Artificial Sequence
  Synthetic
cugccagagaucaguugcguguc

SEQ ID NO: 30123 - RNA, 23 nt, Artificial Sequence
  Synthetic
ugccagagaucaguugcgugucc

SEQ ID NO: 30124 - RNA, 23 nt, Artificial Sequence
  Synthetic
gccagagaucaguugcgugucca

SEQ ID NO: 30125 - RNA, 23 nt, Artificial Sequence
  Synthetic
ccagagaucaguugcguguccau

SEQ ID NO: 30126 - RNA, 23 nt, Artificial Sequence
  Synthetic
cagagaucaguugcguguccauu

SEQ ID NO: 30127 - RNA, 23 nt, Artificial Sequence
  Synthetic
agagaucaguugcguguccauug

SEQ ID NO: 30128 - RNA, 23 nt, Artificial Sequence
  Synthetic
gagaucaguugcguguccauugc

SEQ ID NO: 30129 - RNA, 23 nt, Artificial Sequence
  Synthetic
agaucaguugcguguccauugcc

SEQ ID NO: 30130 - RNA, 23 nt, Artificial Sequence
  Synthetic
gaucaguugcguguccauugccc

SEQ ID NO: 30131 - RNA, 23 nt, Artificial Sequence
  Synthetic
aucaguugcguguccauugccca

SEQ ID NO: 30132 - RNA, 23 nt, Artificial Sequence
  Synthetic
ucaguugcguguccauugcccac

SEQ ID NO: 30133 - RNA, 23 nt, Artificial Sequence
  Synthetic
caguugcguguccauugcccacg

SEQ ID NO: 30134 - RNA, 23 nt, Artificial Sequence
  Synthetic
aguugcguguccauugcccacga

SEQ ID NO: 30135 - RNA, 23 nt, Artificial Sequence
  Synthetic
guugcguguccauugcccacgau

SEQ ID NO: 30136 - RNA, 23 nt, Artificial Sequence
  Synthetic
uugcguguccauugcccacgauc

SEQ ID NO: 30137 - RNA, 23 nt, Artificial Sequence
  Synthetic
ugcguguccauugcccacgaucc

SEQ ID NO: 30138 - RNA, 23 nt, Artificial Sequence
  Synthetic
gcguguccauugcccacgaucca

SEQ ID NO: 30139 - RNA, 23 nt, Artificial Sequence
  Synthetic
cguguccauugcccacgauccau

SEQ ID NO: 30140 - RNA, 23 nt, Artificial Sequence
  Synthetic
guguccauugcccacgauccauu

SEQ ID NO: 30141 - RNA, 23 nt, Artificial Sequence
  Synthetic
uguccauugcccacgauccauug

SEQ ID NO: 30142 - RNA, 23 nt, Artificial Sequence
  Synthetic
guccauugcccacgauccauugg

SEQ ID NO: 30143 - RNA, 23 nt, Artificial Sequence
  Synthetic
uccauugcccacgauccauuggc

SEQ ID NO: 30144 - RNA, 23 nt, Artificial Sequence
  Synthetic
ccauugcccacgauccauuggcu

SEQ ID NO: 30145 - RNA, 23 nt, Artificial Sequence
  Synthetic
cauugcccacgauccauuggcug

SEQ ID NO: 30146 - RNA, 23 nt, Artificial Sequence
  Synthetic
auugcccacgauccauuggcuga

SEQ ID NO: 30147 - RNA, 23 nt, Artificial Sequence
  Synthetic
uugcccacgauccauuggcugac

SEQ ID NO: 30148 - RNA, 23 nt, Artificial Sequence
  Synthetic
ugcccacgauccauuggcugacg

SEQ ID NO: 30149 - RNA, 23 nt, Artificial Sequence
  Synthetic
gcccacgauccauuggcugacga

SEQ ID NO: 30150 - RNA, 23 nt, Artificial Sequence
  Synthetic
cccacgauccauuggcugacgau

SEQ ID NO: 30151 - RNA, 23 nt, Artificial Sequence
  Synthetic
ccacgauccauuggcugacgauc

SEQ ID NO: 30152 - RNA, 23 nt, Artificial Sequence
  Synthetic
cacgauccauuggcugacgaucg

SEQ ID NO: 30153 - RNA, 23 nt, Artificial Sequence
  Synthetic
acgauccauuggcugacgaucgu

SEQ ID NO: 30154 - RNA, 23 nt, Artificial Sequence
  Synthetic
cgauccauuggcugacgaucgug

SEQ ID NO: 30155 - RNA, 23 nt, Artificial Sequence
  Synthetic
gauccauuggcugacgaucgugg

SEQ ID NO: 30156 - RNA, 23 nt, Artificial Sequence
  Synthetic
auccauuggcugacgaucgugga

SEQ ID NO: 30157 - RNA, 23 nt, Artificial Sequence
  Synthetic
uccauuggcugacgaucguggag

SEQ ID NO: 30158 - RNA, 23 nt, Artificial Sequence
  Synthetic
ccauuggcugacgaucguggaga

SEQ ID NO: 30159 - RNA, 23 nt, Artificial Sequence
  Synthetic
cauuggcugacgaucguggagac

SEQ ID NO: 30160 - RNA, 23 nt, Artificial Sequence
  Synthetic
auuggcugacgaucguggagacg

SEQ ID NO: 30161 - RNA, 23 nt, Artificial Sequence
  Synthetic
uuggcugacgaucguggagacga

SEQ ID NO: 30162 - RNA, 23 nt, Artificial Sequence
  Synthetic
uggcugacgaucguggagacgaa

SEQ ID NO: 30163 - RNA, 23 nt, Artificial Sequence
  Synthetic
ggcugacgaucguggagacgaac

SEQ ID NO: 30164 - RNA, 23 nt, Artificial Sequence
  Synthetic
gcugacgaucguggagacgaaca

SEQ ID NO: 30165 - RNA, 23 nt, Artificial Sequence
  Synthetic
cugacgaucguggagacgaacag

SEQ ID NO: 30166 - RNA, 23 nt, Artificial Sequence
  Synthetic
ugacgaucguggagacgaacagc

SEQ ID NO: 30167 - RNA, 23 nt, Artificial Sequence
  Synthetic
gacgaucguggagacgaacagca

SEQ ID NO: 30168 - RNA, 23 nt, Artificial Sequence
  Synthetic
acgaucguggagacgaacagcag

SEQ ID NO: 30169 - RNA, 23 nt, Artificial Sequence
  Synthetic
cgaucguggagacgaacagcagc

SEQ ID NO: 30170 - RNA, 23 nt, Artificial Sequence
  Synthetic
gaucguggagacgaacagcagca

SEQ ID NO: 30171 - RNA, 23 nt, Artificial Sequence
  Synthetic
aucguggagacgaacagcagcac

SEQ ID NO: 30172 - RNA, 23 nt, Artificial Sequence
  Synthetic
ucguggagacgaacagcagcacc

SEQ ID NO: 30173 - RNA, 23 nt, Artificial Sequence
  Synthetic
cguggagacgaacagcagcacca

SEQ ID NO: 30174 - RNA, 23 nt, Artificial Sequence
  Synthetic
guggagacgaacagcagcaccag

SEQ ID NO: 30175 - RNA, 23 nt, Artificial Sequence
  Synthetic
uggagacgaacagcagcaccagc

SEQ ID NO: 30176 - RNA, 23 nt, Artificial Sequence
  Synthetic
ggagacgaacagcagcaccagca

SEQ ID NO: 30177 - RNA, 23 nt, Artificial Sequence
  Synthetic
gagacgaacagcagcaccagcac

SEQ ID NO: 30178 - RNA, 23 nt, Artificial Sequence
  Synthetic
agacgaacagcagcaccagcacc

SEQ ID NO: 30179 - RNA, 23 nt, Artificial Sequence
  Synthetic
gacgaacagcagcaccagcaccg

SEQ ID NO: 30180 - RNA, 23 nt, Artificial Sequence
  Synthetic
acgaacagcagcaccagcaccgc

SEQ ID NO: 30181 - RNA, 23 nt, Artificial Sequence
  Synthetic
cgaacagcagcaccagcaccgcg

SEQ ID NO: 30182 - RNA, 23 nt, Artificial Sequence
  Synthetic
gaacagcagcaccagcaccgcga

SEQ ID NO: 30183 - RNA, 23 nt, Artificial Sequence
  Synthetic
aacagcagcaccagcaccgcgac

SEQ ID NO: 30184 - RNA, 23 nt, Artificial Sequence
  Synthetic
acagcagcaccagcaccgcgacg

SEQ ID NO: 30185 - RNA, 23 nt, Artificial Sequence
  Synthetic
cagcagcaccagcaccgcgacgu

SEQ ID NO: 30186 - RNA, 23 nt, Artificial Sequence
  Synthetic
agcagcaccagcaccgcgacgug

SEQ ID NO: 30187 - RNA, 23 nt, Artificial Sequence
  Synthetic
gcagcaccagcaccgcgacgugg

SEQ ID NO: 30188 - RNA, 23 nt, Artificial Sequence
  Synthetic
cagcaccagcaccgcgacgugga

SEQ ID NO: 30189 - RNA, 23 nt, Artificial Sequence
  Synthetic
agcaccagcaccgcgacguggag

SEQ ID NO: 30190 - RNA, 23 nt, Artificial Sequence
  Synthetic
gcaccagcaccgcgacguggagg

SEQ ID NO: 30191 - RNA, 23 nt, Artificial Sequence
  Synthetic
caccagcaccgcgacguggagga

SEQ ID NO: 30192 - RNA, 23 nt, Artificial Sequence
  Synthetic
accagcaccgcgacguggaggac

SEQ ID NO: 30193 - RNA, 23 nt, Artificial Sequence
  Synthetic
ccagcaccgcgacguggaggacg

SEQ ID NO: 30194 - RNA, 23 nt, Artificial Sequence
  Synthetic
cagcaccgcgacguggaggacga

SEQ ID NO: 30195 - RNA, 23 nt, Artificial Sequence
  Synthetic
agcaccgcgacguggaggacgau

SEQ ID NO: 30196 - RNA, 23 nt, Artificial Sequence
  Synthetic
gcaccgcgacguggaggacgaug

SEQ ID NO: 30197 - RNA, 23 nt, Artificial Sequence
  Synthetic
caccgcgacguggaggacgauga

SEQ ID NO: 30198 - RNA, 23 nt, Artificial Sequence
  Synthetic
accgcgacguggaggacgaugau

SEQ ID NO: 30199 - RNA, 23 nt, Artificial Sequence
  Synthetic
ccgcgacguggaggacgaugaua

SEQ ID NO: 30200 - RNA, 23 nt, Artificial Sequence
  Synthetic
cgcgacguggaggacgaugauac

SEQ ID NO: 30201 - RNA, 23 nt, Artificial Sequence
  Synthetic
gcgacguggaggacgaugauacu

SEQ ID NO: 30202 - RNA, 23 nt, Artificial Sequence
  Synthetic
cgacguggaggacgaugauacuc

SEQ ID NO: 30203 - RNA, 23 nt, Artificial Sequence
  Synthetic
gacguggaggacgaugauacuca

SEQ ID NO: 30204 - RNA, 23 nt, Artificial Sequence
  Synthetic
acguggaggacgaugauacucag

SEQ ID NO: 30205 - RNA, 23 nt, Artificial Sequence
  Synthetic
cguggaggacgaugauacucagc

SEQ ID NO: 30206 - RNA, 23 nt, Artificial Sequence
  Synthetic
guggaggacgaugauacucagca

SEQ ID NO: 30207 - RNA, 23 nt, Artificial Sequence
  Synthetic
uggaggacgaugauacucagcaa

SEQ ID NO: 30208 - RNA, 23 nt, Artificial Sequence
  Synthetic
ggaggacgaugauacucagcaac

SEQ ID NO: 30209 - RNA, 23 nt, Artificial Sequence
  Synthetic
gaggacgaugauacucagcaaca

SEQ ID NO: 30210 - RNA, 23 nt, Artificial Sequence
  Synthetic
aggacgaugauacucagcaacag

SEQ ID NO: 30211 - RNA, 23 nt, Artificial Sequence
  Synthetic
ggacgaugauacucagcaacagg

SEQ ID NO: 30212 - RNA, 23 nt, Artificial Sequence
  Synthetic
gacgaugauacucagcaacagga

SEQ ID NO: 30213 - RNA, 23 nt, Artificial Sequence
  Synthetic
acgaugauacucagcaacaggag

SEQ ID NO: 30214 - RNA, 23 nt, Artificial Sequence
  Synthetic
cgaugauacucagcaacaggagg

SEQ ID NO: 30215 - RNA, 23 nt, Artificial Sequence
  Synthetic
gaugauacucagcaacaggagga

SEQ ID NO: 30216 - RNA, 23 nt, Artificial Sequence
  Synthetic
augauacucagcaacaggaggag

SEQ ID NO: 30217 - RNA, 23 nt, Artificial Sequence
  Synthetic
ugauacucagcaacaggaggagc

SEQ ID NO: 30218 - RNA, 23 nt, Artificial Sequence
  Synthetic
gauacucagcaacaggaggagca

SEQ ID NO: 30219 - RNA, 23 nt, Artificial Sequence
  Synthetic
auacucagcaacaggaggagcau

SEQ ID NO: 30220 - RNA, 23 nt, Artificial Sequence
  Synthetic
uacucagcaacaggaggagcauu

SEQ ID NO: 30221 - RNA, 23 nt, Artificial Sequence
  Synthetic
acucagcaacaggaggagcauuc

SEQ ID NO: 30222 - RNA, 23 nt, Artificial Sequence
  Synthetic
cucagcaacaggaggagcauucu

SEQ ID NO: 30223 - RNA, 23 nt, Artificial Sequence
  Synthetic
ucagcaacaggaggagcauucug

SEQ ID NO: 30224 - RNA, 23 nt, Artificial Sequence
  Synthetic
cagcaacaggaggagcauucugg

SEQ ID NO: 30225 - RNA, 23 nt, Artificial Sequence
  Synthetic
agcaacaggaggagcauucuggc

SEQ ID NO: 30226 - RNA, 23 nt, Artificial Sequence
  Synthetic
gcaacaggaggagcauucuggcg

SEQ ID NO: 30227 - RNA, 23 nt, Artificial Sequence
  Synthetic
caacaggaggagcauucuggcgg

SEQ ID NO: 30228 - RNA, 23 nt, Artificial Sequence
  Synthetic
aacaggaggagcauucuggcggc

SEQ ID NO: 30229 - RNA, 23 nt, Artificial Sequence
  Synthetic
acaggaggagcauucuggcggca

SEQ ID NO: 30230 - RNA, 23 nt, Artificial Sequence
  Synthetic
caggaggagcauucuggcggcaa

SEQ ID NO: 30231 - RNA, 23 nt, Artificial Sequence
  Synthetic
aggaggagcauucuggcggcaag

SEQ ID NO: 30232 - RNA, 23 nt, Artificial Sequence
  Synthetic
ggaggagcauucuggcggcaagu

SEQ ID NO: 30233 - RNA, 23 nt, Artificial Sequence
  Synthetic
gaggagcauucuggcggcaaguu

SEQ ID NO: 30234 - RNA, 23 nt, Artificial Sequence
  Synthetic
aggagcauucuggcggcaaguuc

SEQ ID NO: 30235 - RNA, 23 nt, Artificial Sequence
  Synthetic
ggagcauucuggcggcaaguucu

SEQ ID NO: 30236 - RNA, 23 nt, Artificial Sequence
  Synthetic
gagcauucuggcggcaaguucug

SEQ ID NO: 30237 - RNA, 23 nt, Artificial Sequence
  Synthetic
agcauucuggcggcaaguucugc

SEQ ID NO: 30238 - RNA, 23 nt, Artificial Sequence
  Synthetic
gcauucuggcggcaaguucugcu

SEQ ID NO: 30239 - RNA, 23 nt, Artificial Sequence
  Synthetic
cauucuggcggcaaguucugcuc

SEQ ID NO: 30240 - RNA, 23 nt, Artificial Sequence
  Synthetic
auucuggcggcaaguucugcuca

SEQ ID NO: 30241 - RNA, 23 nt, Artificial Sequence
  Synthetic
uucuggcggcaaguucugcucag

SEQ ID NO: 30242 - RNA, 23 nt, Artificial Sequence
  Synthetic
ucuggcggcaaguucugcucagc

SEQ ID NO: 30243 - RNA, 23 nt, Artificial Sequence
  Synthetic
cuggcggcaaguucugcucagcg

SEQ ID NO: 30244 - RNA, 23 nt, Artificial Sequence
  Synthetic
uggcggcaaguucugcucagcgg

SEQ ID NO: 30245 - RNA, 23 nt, Artificial Sequence
  Synthetic
ggcggcaaguucugcucagcgga

SEQ ID NO: 30246 - RNA, 23 nt, Artificial Sequence
  Synthetic
gcggcaaguucugcucagcggag

SEQ ID NO: 30247 - RNA, 23 nt, Artificial Sequence
  Synthetic
cggcaaguucugcucagcggagu

SEQ ID NO: 30248 - RNA, 23 nt, Artificial Sequence
  Synthetic
ggcaaguucugcucagcggaguu

SEQ ID NO: 30249 - RNA, 23 nt, Artificial Sequence
  Synthetic
gcaaguucugcucagcggaguuu

SEQ ID NO: 30250 - RNA, 23 nt, Artificial Sequence
  Synthetic
caaguucugcucagcggaguuuc

SEQ ID NO: 30251 - RNA, 23 nt, Artificial Sequence
  Synthetic
aaguucugcucagcggaguuucu

SEQ ID NO: 30252 - RNA, 23 nt, Artificial Sequence
  Synthetic
aguucugcucagcggaguuucug

SEQ ID NO: 30253 - RNA, 23 nt, Artificial Sequence
  Synthetic
guucugcucagcggaguuucugc

SEQ ID NO: 30254 - RNA, 23 nt, Artificial Sequence
  Synthetic
uucugcucagcggaguuucugca

SEQ ID NO: 30255 - RNA, 23 nt, Artificial Sequence
  Synthetic
ucugcucagcggaguuucugcag

SEQ ID NO: 30256 - RNA, 23 nt, Artificial Sequence
  Synthetic
cugcucagcggaguuucugcagc

SEQ ID NO: 30257 - RNA, 23 nt, Artificial Sequence
  Synthetic
ugcucagcggaguuucugcagcc

SEQ ID NO: 30258 - RNA, 23 nt, Artificial Sequence
  Synthetic
gcucagcggaguuucugcagccc

SEQ ID NO: 30259 - RNA, 23 nt, Artificial Sequence
  Synthetic
cucagcggaguuucugcagccca

SEQ ID NO: 30260 - RNA, 23 nt, Artificial Sequence
  Synthetic
ucagcggaguuucugcagcccaa

SEQ ID NO: 30261 - RNA, 23 nt, Artificial Sequence
  Synthetic
cagcggaguuucugcagcccaaa

SEQ ID NO: 30262 - RNA, 23 nt, Artificial Sequence
  Synthetic
agcggaguuucugcagcccaaag

SEQ ID NO: 30263 - RNA, 23 nt, Artificial Sequence
  Synthetic
gcggaguuucugcagcccaaagg

SEQ ID NO: 30264 - RNA, 23 nt, Artificial Sequence
  Synthetic
cggaguuucugcagcccaaagga

SEQ ID NO: 30265 - RNA, 23 nt, Artificial Sequence
  Synthetic
ggaguuucugcagcccaaaggaa

SEQ ID NO: 30266 - RNA, 23 nt, Artificial Sequence
  Synthetic
gaguuucugcagcccaaaggaac

SEQ ID NO: 30267 - RNA, 23 nt, Artificial Sequence
  Synthetic
aguuucugcagcccaaaggaaca

SEQ ID NO: 30268 - RNA, 23 nt, Artificial Sequence
  Synthetic
guuucugcagcccaaaggaacag

SEQ ID NO: 30269 - RNA, 23 nt, Artificial Sequence
  Synthetic
uuucugcagcccaaaggaacagc

SEQ ID NO: 30270 - RNA, 23 nt, Artificial Sequence
  Synthetic
uucugcagcccaaaggaacagcu

SEQ ID NO: 30271 - RNA, 23 nt, Artificial Sequence
  Synthetic
ucugcagcccaaaggaacagcug

SEQ ID NO: 30272 - RNA, 23 nt, Artificial Sequence
  Synthetic
cugcagcccaaaggaacagcugu

SEQ ID NO: 30273 - RNA, 23 nt, Artificial Sequence
  Synthetic
ugcagcccaaaggaacagcuguc

SEQ ID NO: 30274 - RNA, 23 nt, Artificial Sequence
  Synthetic
gcagcccaaaggaacagcugucc

SEQ ID NO: 30275 - RNA, 23 nt, Artificial Sequence
  Synthetic
cagcccaaaggaacagcuguccc

SEQ ID NO: 30276 - RNA, 23 nt, Artificial Sequence
  Synthetic
agcccaaaggaacagcugucccg

SEQ ID NO: 30277 - RNA, 23 nt, Artificial Sequence
  Synthetic
gcccaaaggaacagcugucccga

SEQ ID NO: 30278 - RNA, 23 nt, Artificial Sequence
  Synthetic
cccaaaggaacagcugucccgau

SEQ ID NO: 30279 - RNA, 23 nt, Artificial Sequence
  Synthetic
ccaaaggaacagcugucccgauc

SEQ ID NO: 30280 - RNA, 23 nt, Artificial Sequence
  Synthetic
caaaggaacagcugucccgaucc

SEQ ID NO: 30281 - RNA, 23 nt, Artificial Sequence
  Synthetic
aaaggaacagcugucccgauccu

SEQ ID NO: 30282 - RNA, 23 nt, Artificial Sequence
  Synthetic
aaggaacagcugucccgauccuc

SEQ ID NO: 30283 - RNA, 23 nt, Artificial Sequence
  Synthetic
aggaacagcugucccgauccuca

SEQ ID NO: 30284 - RNA, 23 nt, Artificial Sequence
  Synthetic
ggaacagcugucccgauccucag

SEQ ID NO: 30285 - RNA, 23 nt, Artificial Sequence
  Synthetic
gaacagcugucccgauccucagg

SEQ ID NO: 30286 - RNA, 23 nt, Artificial Sequence
  Synthetic
aacagcugucccgauccucaggg

SEQ ID NO: 30287 - RNA, 23 nt, Artificial Sequence
  Synthetic
acagcugucccgauccucagggu

SEQ ID NO: 30288 - RNA, 23 nt, Artificial Sequence
  Synthetic
cagcugucccgauccucagggug

SEQ ID NO: 30289 - RNA, 23 nt, Artificial Sequence
  Synthetic
agcugucccgauccucagggugg

SEQ ID NO: 30290 - RNA, 23 nt, Artificial Sequence
  Synthetic
gcugucccgauccucaggguggc

SEQ ID NO: 30291 - RNA, 23 nt, Artificial Sequence
  Synthetic
cugucccgauccucaggguggcc

SEQ ID NO: 30292 - RNA, 23 nt, Artificial Sequence
  Synthetic
ugucccgauccucaggguggccu

SEQ ID NO: 30293 - RNA, 23 nt, Artificial Sequence
  Synthetic
gucccgauccucaggguggccuc

SEQ ID NO: 30294 - RNA, 23 nt, Artificial Sequence
  Synthetic
ucccgauccucaggguggccuca

SEQ ID NO: 30295 - RNA, 23 nt, Artificial Sequence
  Synthetic
cccgauccucaggguggccucaa

SEQ ID NO: 30296 - RNA, 23 nt, Artificial Sequence
  Synthetic
ccgauccucaggguggccucaaa

SEQ ID NO: 30297 - RNA, 23 nt, Artificial Sequence
  Synthetic
cgauccucaggguggccucaaac

SEQ ID NO: 30298 - RNA, 23 nt, Artificial Sequence
  Synthetic
gauccucaggguggccucaaaca

SEQ ID NO: 30299 - RNA, 23 nt, Artificial Sequence
  Synthetic
auccucaggguggccucaaacac

SEQ ID NO: 30300 - RNA, 23 nt, Artificial Sequence
  Synthetic
uccucaggguggccucaaacaca

SEQ ID NO: 30301 - RNA, 23 nt, Artificial Sequence
  Synthetic
ccucaggguggccucaaacacaa

SEQ ID NO: 30302 - RNA, 23 nt, Artificial Sequence
  Synthetic
cucaggguggccucaaacacaaa

SEQ ID NO: 30303 - RNA, 23 nt, Artificial Sequence
  Synthetic
ucaggguggccucaaacacaaac

SEQ ID NO: 30304 - RNA, 23 nt, Artificial Sequence
  Synthetic
caggguggccucaaacacaaacu

SEQ ID NO: 30305 - RNA, 23 nt, Artificial Sequence
  Synthetic
aggguggccucaaacacaaacuc

SEQ ID NO: 30306 - RNA, 23 nt, Artificial Sequence
  Synthetic
ggguggccucaaacacaaacucg

SEQ ID NO: 30307 - RNA, 23 nt, Artificial Sequence
  Synthetic
gguggccucaaacacaaacucgg

SEQ ID NO: 30308 - RNA, 23 nt, Artificial Sequence
  Synthetic
guggccucaaacacaaacucggg

SEQ ID NO: 30309 - RNA, 23 nt, Artificial Sequence
  Synthetic
uggccucaaacacaaacucgggu

SEQ ID NO: 30310 - RNA, 23 nt, Artificial Sequence
  Synthetic
ggccucaaacacaaacucgggug

SEQ ID NO: 30311 - RNA, 23 nt, Artificial Sequence
  Synthetic
gccucaaacacaaacucgggugc

SEQ ID NO: 30312 - RNA, 23 nt, Artificial Sequence
  Synthetic
ccucaaacacaaacucgggugcg

SEQ ID NO: 30313 - RNA, 23 nt, Artificial Sequence
  Synthetic
cucaaacacaaacucgggugcgu

SEQ ID NO: 30314 - RNA, 23 nt, Artificial Sequence
  Synthetic
ucaaacacaaacucgggugcguu

SEQ ID NO: 30315 - RNA, 23 nt, Artificial Sequence
  Synthetic
caaacacaaacucgggugcguug

SEQ ID NO: 30316 - RNA, 23 nt, Artificial Sequence
  Synthetic
aaacacaaacucgggugcguugg

SEQ ID NO: 30317 - RNA, 23 nt, Artificial Sequence
  Synthetic
aacacaaacucgggugcguuggc

SEQ ID NO: 30318 - RNA, 23 nt, Artificial Sequence
  Synthetic
acacaaacucgggugcguuggcu

SEQ ID NO: 30319 - RNA, 23 nt, Artificial Sequence
  Synthetic
cacaaacucgggugcguuggcuc

SEQ ID NO: 30320 - RNA, 23 nt, Artificial Sequence
  Synthetic
acaaacucgggugcguuggcucc

SEQ ID NO: 30321 - RNA, 23 nt, Artificial Sequence
  Synthetic
caaacucgggugcguuggcuccg

SEQ ID NO: 30322 - RNA, 23 nt, Artificial Sequence
  Synthetic
aaacucgggugcguuggcuccgc

SEQ ID NO: 30323 - RNA, 23 nt, Artificial Sequence
  Synthetic
aacucgggugcguuggcuccgcu

SEQ ID NO: 30324 - RNA, 23 nt, Artificial Sequence
  Synthetic
acucgggugcguuggcuccgcug

SEQ ID NO: 30325 - RNA, 23 nt, Artificial Sequence
  Synthetic
cucgggugcguuggcuccgcugc

SEQ ID NO: 30326 - RNA, 23 nt, Artificial Sequence
  Synthetic
ucgggugcguuggcuccgcugcu

SEQ ID NO: 30327 - RNA, 23 nt, Artificial Sequence
  Synthetic
cgggugcguuggcuccgcugcug

SEQ ID NO: 30328 - RNA, 23 nt, Artificial Sequence
  Synthetic
gggugcguuggcuccgcugcugg

SEQ ID NO: 30329 - RNA, 23 nt, Artificial Sequence
  Synthetic
ggugcguuggcuccgcugcuggc

SEQ ID NO: 30330 - RNA, 23 nt, Artificial Sequence
  Synthetic
gugcguuggcuccgcugcuggcg

SEQ ID NO: 30331 - RNA, 23 nt, Artificial Sequence
  Synthetic
ugcguuggcuccgcugcuggcgc

SEQ ID NO: 30332 - RNA, 23 nt, Artificial Sequence
  Synthetic
gcguuggcuccgcugcuggcgcc

SEQ ID NO: 30333 - RNA, 23 nt, Artificial Sequence
  Synthetic
cguuggcuccgcugcuggcgccg

SEQ ID NO: 30334 - RNA, 23 nt, Artificial Sequence
  Synthetic
guuggcuccgcugcuggcgccgc

SEQ ID NO: 30335 - RNA, 23 nt, Artificial Sequence
  Synthetic
uuggcuccgcugcuggcgccgcc

SEQ ID NO: 30336 - RNA, 23 nt, Artificial Sequence
  Synthetic
uggcuccgcugcuggcgccgcca

SEQ ID NO: 30337 - RNA, 23 nt, Artificial Sequence
  Synthetic
ggcuccgcugcuggcgccgccaa

SEQ ID NO: 30338 - RNA, 23 nt, Artificial Sequence
  Synthetic
gcuccgcugcuggcgccgccaaa

SEQ ID NO: 30339 - RNA, 23 nt, Artificial Sequence
  Synthetic
cuccgcugcuggcgccgccaaag

SEQ ID NO: 30340 - RNA, 23 nt, Artificial Sequence
  Synthetic
uccgcugcuggcgccgccaaagc

SEQ ID NO: 30341 - RNA, 23 nt, Artificial Sequence
  Synthetic
ccgcugcuggcgccgccaaagcu

SEQ ID NO: 30342 - RNA, 23 nt, Artificial Sequence
  Synthetic
cgcugcuggcgccgccaaagcug

SEQ ID NO: 30343 - RNA, 23 nt, Artificial Sequence
  Synthetic
gcugcuggcgccgccaaagcugc

SEQ ID NO: 30344 - RNA, 23 nt, Artificial Sequence
  Synthetic
cugcuggcgccgccaaagcugcg

SEQ ID NO: 30345 - RNA, 23 nt, Artificial Sequence
  Synthetic
ugcuggcgccgccaaagcugcgc

SEQ ID NO: 30346 - RNA, 23 nt, Artificial Sequence
  Synthetic
gcuggcgccgccaaagcugcgcu

SEQ ID NO: 30347 - RNA, 23 nt, Artificial Sequence
  Synthetic
cuggcgccgccaaagcugcgcug

SEQ ID NO: 30348 - RNA, 23 nt, Artificial Sequence
  Synthetic
uggcgccgccaaagcugcgcugc

SEQ ID NO: 30349 - RNA, 23 nt, Artificial Sequence
  Synthetic
ggcgccgccaaagcugcgcugcg

SEQ ID NO: 30350 - RNA, 23 nt, Artificial Sequence
  Synthetic
gcgccgccaaagcugcgcugcgg

SEQ ID NO: 30351 - RNA, 23 nt, Artificial Sequence
  Synthetic
cgccgccaaagcugcgcugcggg

SEQ ID NO: 30352 - RNA, 23 nt, Artificial Sequence
  Synthetic
gccgccaaagcugcgcugcgggg

SEQ ID NO: 30353 - RNA, 23 nt, Artificial Sequence
  Synthetic
ccgccaaagcugcgcugcggggc

SEQ ID NO: 30354 - RNA, 23 nt, Artificial Sequence
  Synthetic
cgccaaagcugcgcugcggggcu

SEQ ID NO: 30355 - RNA, 23 nt, Artificial Sequence
  Synthetic
gccaaagcugcgcugcggggcug

SEQ ID NO: 30356 - RNA, 23 nt, Artificial Sequence
  Synthetic
ccaaagcugcgcugcggggcugc

SEQ ID NO: 30357 - RNA, 23 nt, Artificial Sequence
  Synthetic
caaagcugcgcugcggggcugcg

SEQ ID NO: 30358 - RNA, 23 nt, Artificial Sequence
  Synthetic
aaagcugcgcugcggggcugcgc

SEQ ID NO: 30359 - RNA, 23 nt, Artificial Sequence
  Synthetic
aagcugcgcugcggggcugcgcg

SEQ ID NO: 30360 - RNA, 23 nt, Artificial Sequence
  Synthetic
agcugcgcugcggggcugcgcgc

SEQ ID NO: 30361 - RNA, 23 nt, Artificial Sequence
  Synthetic
gcugcgcugcggggcugcgcgcg

SEQ ID NO: 30362 - RNA, 23 nt, Artificial Sequence
  Synthetic
cugcgcugcggggcugcgcgcgc

SEQ ID NO: 30363 - RNA, 23 nt, Artificial Sequence
  Synthetic
ugcgcugcggggcugcgcgcgcg

SEQ ID NO: 30364 - RNA, 23 nt, Artificial Sequence
  Synthetic
gcgcugcggggcugcgcgcgcgc

SEQ ID NO: 30365 - RNA, 23 nt, Artificial Sequence
  Synthetic
cgcugcggggcugcgcgcgcgcg

SEQ ID NO: 30366 - RNA, 23 nt, Artificial Sequence
  Synthetic
gcugcggggcugcgcgcgcgcga

SEQ ID NO: 30367 - RNA, 23 nt, Artificial Sequence
  Synthetic
cugcggggcugcgcgcgcgcgaa

SEQ ID NO: 30368 - RNA, 23 nt, Artificial Sequence
  Synthetic
ugcggggcugcgcgcgcgcgaag

SEQ ID NO: 30369 - RNA, 23 nt, Artificial Sequence
  Synthetic
gcggggcugcgcgcgcgcgaagc

SEQ ID NO: 30370 - RNA, 23 nt, Artificial Sequence
  Synthetic
cggggcugcgcgcgcgcgaagca

SEQ ID NO: 30371 - RNA, 23 nt, Artificial Sequence
  Synthetic
ggggcugcgcgcgcgcgaagcaa

SEQ ID NO: 30372 - RNA, 23 nt, Artificial Sequence
  Synthetic
gggcugcgcgcgcgcgaagcaag

SEQ ID NO: 30373 - RNA, 23 nt, Artificial Sequence
  Synthetic
ggcugcgcgcgcgcgaagcaagg

SEQ ID NO: 30374 - RNA, 23 nt, Artificial Sequence
  Synthetic
gcugcgcgcgcgcgaagcaaggg

SEQ ID NO: 30375 - RNA, 23 nt, Artificial Sequence
  Synthetic
cugcgcgcgcgcgaagcaagggg

SEQ ID NO: 30376 - RNA, 23 nt, Artificial Sequence
  Synthetic
ugcgcgcgcgcgaagcaaggggg

SEQ ID NO: 30377 - RNA, 23 nt, Artificial Sequence
  Synthetic
gcgcgcgcgcgaagcaagggggc

SEQ ID NO: 30378 - RNA, 23 nt, Artificial Sequence
  Synthetic
gaccagugaguuacucugauguu

SEQ ID NO: 30379 - RNA, 23 nt, Artificial Sequence
  Synthetic
accagugaguuacucugauguuu

SEQ ID NO: 30380 - RNA, 23 nt, Artificial Sequence
  Synthetic
ccagugaguuacucugauguuua

SEQ ID NO: 30381 - RNA, 23 nt, Artificial Sequence
  Synthetic
cagugaguuacucugauguuuau

SEQ ID NO: 30382 - RNA, 23 nt, Artificial Sequence
  Synthetic
agugaguuacucugauguuuauu

SEQ ID NO: 30383 - RNA, 23 nt, Artificial Sequence
  Synthetic
gugaguuacucugauguuuauuu

SEQ ID NO: 30384 - RNA, 23 nt, Artificial Sequence
  Synthetic
ugaguuacucugauguuuauuuu

SEQ ID NO: 30385 - RNA, 23 nt, Artificial Sequence
  Synthetic
gaguuacucugauguuuauuuua

SEQ ID NO: 30386 - RNA, 23 nt, Artificial Sequence
  Synthetic
aguuacucugauguuuauuuuaa

SEQ ID NO: 30387 - RNA, 23 nt, Artificial Sequence
  Synthetic
guuacucugauguuuauuuuaau

SEQ ID NO: 30388 - RNA, 23 nt, Artificial Sequence
  Synthetic
uuacucugauguuuauuuuaaug

SEQ ID NO: 30389 - RNA, 23 nt, Artificial Sequence
  Synthetic
uacucugauguuuauuuuaaugc

SEQ ID NO: 30390 - RNA, 23 nt, Artificial Sequence
  Synthetic
acucugauguuuauuuuaaugca

SEQ ID NO: 30391 - RNA, 23 nt, Artificial Sequence
  Synthetic
cucugauguuuauuuuaaugcau

SEQ ID NO: 30392 - RNA, 23 nt, Artificial Sequence
  Synthetic
ucugauguuuauuuuaaugcauc

SEQ ID NO: 30393 - RNA, 23 nt, Artificial Sequence
  Synthetic
cugauguuuauuuuaaugcaucu

SEQ ID NO: 30394 - RNA, 23 nt, Artificial Sequence
  Synthetic
ugauguuuauuuuaaugcaucuu

SEQ ID NO: 30395 - RNA, 23 nt, Artificial Sequence
  Synthetic
gauguuuauuuuaaugcaucuua

SEQ ID NO: 30396 - RNA, 23 nt, Artificial Sequence
  Synthetic
auguuuauuuuaaugcaucuuag

SEQ ID NO: 30397 - RNA, 23 nt, Artificial Sequence
  Synthetic
uguuuauuuuaaugcaucuuagu

SEQ ID NO: 30398 - RNA, 23 nt, Artificial Sequence
  Synthetic
guuuauuuuaaugcaucuuaguc

SEQ ID NO: 30399 - RNA, 23 nt, Artificial Sequence
  Synthetic
uuuauuuuaaugcaucuuagucc

SEQ ID NO: 30400 - RNA, 23 nt, Artificial Sequence
  Synthetic
uuauuuuaaugcaucuuagucca

SEQ ID NO: 30401 - RNA, 23 nt, Artificial Sequence
  Synthetic
uauuuuaaugcaucuuaguccac

SEQ ID NO: 30402 - RNA, 23 nt, Artificial Sequence
  Synthetic
auuuuaaugcaucuuaguccaca

SEQ ID NO: 30403 - RNA, 23 nt, Artificial Sequence
  Synthetic
uuuuaaugcaucuuaguccacac

SEQ ID NO: 30404 - RNA, 23 nt, Artificial Sequence
  Synthetic
uuuaaugcaucuuaguccacaca

SEQ ID NO: 30405 - RNA, 23 nt, Artificial Sequence
  Synthetic
uuaaugcaucuuaguccacacag

SEQ ID NO: 30406 - RNA, 23 nt, Artificial Sequence
  Synthetic
uaaugcaucuuaguccacacagu

SEQ ID NO: 30407 - RNA, 23 nt, Artificial Sequence
  Synthetic
aaugcaucuuaguccacacaguu

SEQ ID NO: 30408 - RNA, 23 nt, Artificial Sequence
  Synthetic
augcaucuuaguccacacaguug

SEQ ID NO: 30409 - RNA, 23 nt, Artificial Sequence
  Synthetic
ugcaucuuaguccacacaguugg

SEQ ID NO: 30410 - RNA, 23 nt, Artificial Sequence
  Synthetic
gcaucuuaguccacacaguuggu

SEQ ID NO: 30411 - RNA, 23 nt, Artificial Sequence
  Synthetic
caucuuaguccacacaguuggua

SEQ ID NO: 30412 - RNA, 23 nt, Artificial Sequence
  Synthetic
aucuuaguccacacaguugguau

SEQ ID NO: 30413 - RNA, 23 nt, Artificial Sequence
  Synthetic
ucuuaguccacacaguugguaua

SEQ ID NO: 30414 - RNA, 23 nt, Artificial Sequence
  Synthetic
cuuaguccacacaguugguauaa

SEQ ID NO: 30415 - RNA, 23 nt, Artificial Sequence
  Synthetic
uuaguccacacaguugguauaaa

SEQ ID NO: 30416 - RNA, 23 nt, Artificial Sequence
  Synthetic
uaguccacacaguugguauaaaa

SEQ ID NO: 30417 - RNA, 23 nt, Artificial Sequence
  Synthetic
aguccacacaguugguauaaaau

SEQ ID NO: 30418 - RNA, 23 nt, Artificial Sequence
  Synthetic
guccacacaguugguauaaaauc

SEQ ID NO: 30419 - RNA, 23 nt, Artificial Sequence
  Synthetic
uccacacaguugguauaaaauca

SEQ ID NO: 30420 - RNA, 23 nt, Artificial Sequence
  Synthetic
ccacacaguugguauaaaaucag

SEQ ID NO: 30421 - RNA, 23 nt, Artificial Sequence
  Synthetic
cacacaguugguauaaaaucaga

SEQ ID NO: 30422 - RNA, 23 nt, Artificial Sequence
  Synthetic
acacaguugguauaaaaucagaa

SEQ ID NO: 30423 - RNA, 23 nt, Artificial Sequence
  Synthetic
cacaguugguauaaaaucagaaa

SEQ ID NO: 30424 - RNA, 23 nt, Artificial Sequence
  Synthetic
acaguugguauaaaaucagaaaa

SEQ ID NO: 30425 - RNA, 23 nt, Artificial Sequence
  Synthetic
caguugguauaaaaucagaaaau

SEQ ID NO: 30426 - RNA, 23 nt, Artificial Sequence
  Synthetic
aguugguauaaaaucagaaaaug

SEQ ID NO: 30427 - RNA, 23 nt, Artificial Sequence
  Synthetic
guugguauaaaaucagaaaaugc

SEQ ID NO: 30428 - RNA, 23 nt, Artificial Sequence
  Synthetic
uugguauaaaaucagaaaaugca

SEQ ID NO: 30429 - RNA, 23 nt, Artificial Sequence
  Synthetic
ugguauaaaaucagaaaaugcaa

SEQ ID NO: 30430 - RNA, 23 nt, Artificial Sequence
  Synthetic
gguauaaaaucagaaaaugcaaa

SEQ ID NO: 30431 - RNA, 23 nt, Artificial Sequence
  Synthetic
guauaaaaucagaaaaugcaaag

SEQ ID NO: 30432 - RNA, 23 nt, Artificial Sequence
  Synthetic
uauaaaaucagaaaaugcaaagc

SEQ ID NO: 30433 - RNA, 23 nt, Artificial Sequence
  Synthetic
auaaaaucagaaaaugcaaagca

SEQ ID NO: 30434 - RNA, 23 nt, Artificial Sequence
  Synthetic
uaaaaucagaaaaugcaaagcaa

SEQ ID NO: 30435 - RNA, 23 nt, Artificial Sequence
  Synthetic
aaaaucagaaaaugcaaagcaaa

SEQ ID NO: 30436 - RNA, 23 nt, Artificial Sequence
  Synthetic
aaaucagaaaaugcaaagcaaaa

SEQ ID NO: 30437 - RNA, 23 nt, Artificial Sequence
  Synthetic
aaucagaaaaugcaaagcaaaaa

SEQ ID NO: 30438 - RNA, 23 nt, Artificial Sequence
  Synthetic
aucagaaaaugcaaagcaaaaac

SEQ ID NO: 30439 - RNA, 23 nt, Artificial Sequence
  Synthetic
ucagaaaaugcaaagcaaaaaca

SEQ ID NO: 30440 - RNA, 23 nt, Artificial Sequence
  Synthetic
cagaaaaugcaaagcaaaaacaa

SEQ ID NO: 30441 - RNA, 23 nt, Artificial Sequence
  Synthetic
agaaaaugcaaagcaaaaacaaa

SEQ ID NO: 30442 - RNA, 23 nt, Artificial Sequence
  Synthetic
gaaaaugcaaagcaaaaacaaaa

SEQ ID NO: 30443 - RNA, 23 nt, Artificial Sequence
  Synthetic
aaaaugcaaagcaaaaacaaaag

SEQ ID NO: 30444 - RNA, 23 nt, Artificial Sequence
  Synthetic
aaaugcaaagcaaaaacaaaagg

SEQ ID NO: 30445 - RNA, 23 nt, Artificial Sequence
  Synthetic
aaugcaaagcaaaaacaaaaggu

SEQ ID NO: 30446 - RNA, 23 nt, Artificial Sequence
  Synthetic
augcaaagcaaaaacaaaagguc

SEQ ID NO: 30447 - RNA, 23 nt, Artificial Sequence
  Synthetic
ugcaaagcaaaaacaaaaggucu

SEQ ID NO: 30448 - RNA, 23 nt, Artificial Sequence
  Synthetic
gcaaagcaaaaacaaaaggucug

SEQ ID NO: 30449 - RNA, 23 nt, Artificial Sequence
  Synthetic
caaagcaaaaacaaaaggucugg

SEQ ID NO: 30450 - RNA, 23 nt, Artificial Sequence
  Synthetic
aaagcaaaaacaaaaggucugga

SEQ ID NO: 30451 - RNA, 23 nt, Artificial Sequence
  Synthetic
aagcaaaaacaaaaggucuggag

SEQ ID NO: 30452 - RNA, 23 nt, Artificial Sequence
  Synthetic
agcaaaaacaaaaggucuggagu

SEQ ID NO: 30453 - RNA, 23 nt, Artificial Sequence
  Synthetic
gcaaaaacaaaaggucuggaguc

SEQ ID NO: 30454 - RNA, 23 nt, Artificial Sequence
  Synthetic
caaaaacaaaaggucuggagucu

SEQ ID NO: 30455 - RNA, 23 nt, Artificial Sequence
  Synthetic
aaaaacaaaaggucuggagucuu

SEQ ID NO: 30456 - RNA, 23 nt, Artificial Sequence
  Synthetic
aaaacaaaaggucuggagucuua

SEQ ID NO: 30457 - RNA, 23 nt, Artificial Sequence
  Synthetic
aaacaaaaggucuggagucuuag

SEQ ID NO: 30458 - RNA, 23 nt, Artificial Sequence
  Synthetic
aacaaaaggucuggagucuuagc

SEQ ID NO: 30459 - RNA, 23 nt, Artificial Sequence
  Synthetic
acaaaaggucuggagucuuagca

SEQ ID NO: 30460 - RNA, 23 nt, Artificial Sequence
  Synthetic
caaaaggucuggagucuuagcau

SEQ ID NO: 30461 - RNA, 23 nt, Artificial Sequence
  Synthetic
aaaaggucuggagucuuagcauc

SEQ ID NO: 30462 - RNA, 23 nt, Artificial Sequence
  Synthetic
aaaggucuggagucuuagcauca

SEQ ID NO: 30463 - RNA, 23 nt, Artificial Sequence
  Synthetic
aaggucuggagucuuagcaucag

SEQ ID NO: 30464 - RNA, 23 nt, Artificial Sequence
  Synthetic
aggucuggagucuuagcaucaga

SEQ ID NO: 30465 - RNA, 23 nt, Artificial Sequence
  Synthetic
ggucuggagucuuagcaucagaa

SEQ ID NO: 30466 - RNA, 23 nt, Artificial Sequence
  Synthetic
gucuggagucuuagcaucagaag

SEQ ID NO: 30467 - RNA, 23 nt, Artificial Sequence
  Synthetic
ucuggagucuuagcaucagaagg

SEQ ID NO: 30468 - RNA, 23 nt, Artificial Sequence
  Synthetic
cuggagucuuagcaucagaaggg

SEQ ID NO: 30469 - RNA, 23 nt, Artificial Sequence
  Synthetic
uggagucuuagcaucagaagggc

SEQ ID NO: 30470 - RNA, 23 nt, Artificial Sequence
  Synthetic
ggagucuuagcaucagaagggca

SEQ ID NO: 30471 - RNA, 23 nt, Artificial Sequence
  Synthetic
gagucuuagcaucagaagggcac

SEQ ID NO: 30472 - RNA, 23 nt, Artificial Sequence
  Synthetic
agucuuagcaucagaagggcacc

SEQ ID NO: 30473 - RNA, 23 nt, Artificial Sequence
  Synthetic
gucuuagcaucagaagggcacca

SEQ ID NO: 30474 - RNA, 23 nt, Artificial Sequence
  Synthetic
ucuuagcaucagaagggcaccau

SEQ ID NO: 30475 - RNA, 23 nt, Artificial Sequence
  Synthetic
cuuagcaucagaagggcaccaua

SEQ ID NO: 30476 - RNA, 23 nt, Artificial Sequence
  Synthetic
uuagcaucagaagggcaccauau

SEQ ID NO: 30477 - RNA, 23 nt, Artificial Sequence
  Synthetic
uagcaucagaagggcaccauaua

SEQ ID NO: 30478 - RNA, 23 nt, Artificial Sequence
  Synthetic
agcaucagaagggcaccauauau

SEQ ID NO: 30479 - RNA, 23 nt, Artificial Sequence
  Synthetic
gcaucagaagggcaccauauaua

SEQ ID NO: 30480 - RNA, 23 nt, Artificial Sequence
  Synthetic
caucagaagggcaccauauauac

SEQ ID NO: 30481 - RNA, 23 nt, Artificial Sequence
  Synthetic
aucagaagggcaccauauauaca

SEQ ID NO: 30482 - RNA, 23 nt, Artificial Sequence
  Synthetic
ucagaagggcaccauauauacau

SEQ ID NO: 30483 - RNA, 23 nt, Artificial Sequence
  Synthetic
cagaagggcaccauauauacauc

SEQ ID NO: 30484 - RNA, 23 nt, Artificial Sequence
  Synthetic
agaagggcaccauauauacaucu

SEQ ID NO: 30485 - RNA, 23 nt, Artificial Sequence
  Synthetic
gaagggcaccauauauacaucua

SEQ ID NO: 30486 - RNA, 23 nt, Artificial Sequence
  Synthetic
aagggcaccauauauacaucuac

SEQ ID NO: 30487 - RNA, 23 nt, Artificial Sequence
  Synthetic
agggcaccauauauacaucuaca

SEQ ID NO: 30488 - RNA, 23 nt, Artificial Sequence
  Synthetic
gggcaccauauauacaucuacag

SEQ ID NO: 30489 - RNA, 23 nt, Artificial Sequence
  Synthetic
ggcaccauauauacaucuacagu

SEQ ID NO: 30490 - RNA, 23 nt, Artificial Sequence
  Synthetic
gcaccauauauacaucuacaguu

SEQ ID NO: 30491 - RNA, 23 nt, Artificial Sequence
  Synthetic
caccauauauacaucuacaguug

SEQ ID NO: 30492 - RNA, 23 nt, Artificial Sequence
  Synthetic
accauauauacaucuacaguugg

SEQ ID NO: 30493 - RNA, 23 nt, Artificial Sequence
  Synthetic
ccauauauacaucuacaguuggu

SEQ ID NO: 30494 - RNA, 23 nt, Artificial Sequence
  Synthetic
cauauauacaucuacaguuggug

SEQ ID NO: 30495 - RNA, 23 nt, Artificial Sequence
  Synthetic
auauauacaucuacaguuggugg

SEQ ID NO: 30496 - RNA, 23 nt, Artificial Sequence
  Synthetic
uauauacaucuacaguugguggc

SEQ ID NO: 30497 - RNA, 23 nt, Artificial Sequence
  Synthetic
auauacaucuacaguugguggcc

SEQ ID NO: 30498 - RNA, 23 nt, Artificial Sequence
  Synthetic
uauacaucuacaguugguggcca

SEQ ID NO: 30499 - RNA, 23 nt, Artificial Sequence
  Synthetic
auacaucuacaguugguggccaa

SEQ ID NO: 30500 - RNA, 23 nt, Artificial Sequence
  Synthetic
uacaucuacaguugguggccaau

SEQ ID NO: 30501 - RNA, 23 nt, Artificial Sequence
  Synthetic
acaucuacaguugguggccaaua

SEQ ID NO: 30502 - RNA, 23 nt, Artificial Sequence
  Synthetic
caucuacaguugguggccaauac

SEQ ID NO: 30503 - RNA, 23 nt, Artificial Sequence
  Synthetic
aucuacaguugguggccaauaca

SEQ ID NO: 30504 - RNA, 23 nt, Artificial Sequence
  Synthetic
ucuacaguugguggccaauacaa

SEQ ID NO: 30505 - RNA, 23 nt, Artificial Sequence
  Synthetic
cuacaguugguggccaauacaag

SEQ ID NO: 30506 - RNA, 23 nt, Artificial Sequence
  Synthetic
uacaguugguggccaauacaagu

SEQ ID NO: 30507 - RNA, 23 nt, Artificial Sequence
  Synthetic
acaguugguggccaauacaaguc

SEQ ID NO: 30508 - RNA, 23 nt, Artificial Sequence
  Synthetic
caguugguggccaauacaaguca

SEQ ID NO: 30509 - RNA, 23 nt, Artificial Sequence
  Synthetic
aguugguggccaauacaagucau

SEQ ID NO: 30510 - RNA, 23 nt, Artificial Sequence
  Synthetic
guugguggccaauacaagucauu

SEQ ID NO: 30511 - RNA, 23 nt, Artificial Sequence
  Synthetic
uugguggccaauacaagucauug

SEQ ID NO: 30512 - RNA, 23 nt, Artificial Sequence
  Synthetic
ugguggccaauacaagucauugc

SEQ ID NO: 30513 - RNA, 23 nt, Artificial Sequence
  Synthetic
gguggccaauacaagucauugcc

SEQ ID NO: 30514 - RNA, 23 nt, Artificial Sequence
  Synthetic
guggccaauacaagucauugcca

SEQ ID NO: 30515 - RNA, 23 nt, Artificial Sequence
  Synthetic
uggccaauacaagucauugccag

SEQ ID NO: 30516 - RNA, 23 nt, Artificial Sequence
  Synthetic
ggccaauacaagucauugccaga

SEQ ID NO: 30517 - RNA, 23 nt, Artificial Sequence
  Synthetic
gccaauacaagucauugccagac

SEQ ID NO: 30518 - RNA, 23 nt, Artificial Sequence
  Synthetic
ccaauacaagucauugccagaca

SEQ ID NO: 30519 - RNA, 23 nt, Artificial Sequence
  Synthetic
caauacaagucauugccagacag

SEQ ID NO: 30520 - RNA, 23 nt, Artificial Sequence
  Synthetic
aauacaagucauugccagacagu

SEQ ID NO: 30521 - RNA, 23 nt, Artificial Sequence
  Synthetic
auacaagucauugccagacaguc

SEQ ID NO: 30522 - RNA, 23 nt, Artificial Sequence
  Synthetic
uacaagucauugccagacagucc

SEQ ID NO: 30523 - RNA, 23 nt, Artificial Sequence
  Synthetic
acaagucauugccagacaguccu

SEQ ID NO: 30524 - RNA, 23 nt, Artificial Sequence
  Synthetic
caagucauugccagacaguccuu

SEQ ID NO: 30525 - RNA, 23 nt, Artificial Sequence
  Synthetic
aagucauugccagacaguccuug

SEQ ID NO: 30526 - RNA, 23 nt, Artificial Sequence
  Synthetic
agucauugccagacaguccuugg

SEQ ID NO: 30527 - RNA, 23 nt, Artificial Sequence
  Synthetic
gucauugccagacaguccuugga

SEQ ID NO: 30528 - RNA, 23 nt, Artificial Sequence
  Synthetic
ucauugccagacaguccuuggag

SEQ ID NO: 30529 - RNA, 23 nt, Artificial Sequence
  Synthetic
cauugccagacaguccuuggagg

SEQ ID NO: 30530 - RNA, 23 nt, Artificial Sequence
  Synthetic
auugccagacaguccuuggaggc

SEQ ID NO: 30531 - RNA, 23 nt, Artificial Sequence
  Synthetic
uugccagacaguccuuggaggca

SEQ ID NO: 30532 - RNA, 23 nt, Artificial Sequence
  Synthetic
ugccagacaguccuuggaggcac

SEQ ID NO: 30533 - RNA, 23 nt, Artificial Sequence
  Synthetic
gccagacaguccuuggaggcaca

SEQ ID NO: 30534 - RNA, 23 nt, Artificial Sequence
  Synthetic
ccagacaguccuuggaggcacag

SEQ ID NO: 30535 - RNA, 23 nt, Artificial Sequence
  Synthetic
cagacaguccuuggaggcacaga

SEQ ID NO: 30536 - RNA, 23 nt, Artificial Sequence
  Synthetic
agacaguccuuggaggcacagaa

SEQ ID NO: 30537 - RNA, 23 nt, Artificial Sequence
  Synthetic
gacaguccuuggaggcacagaac

SEQ ID NO: 30538 - RNA, 23 nt, Artificial Sequence
  Synthetic
acaguccuuggaggcacagaaca

SEQ ID NO: 30539 - RNA, 23 nt, Artificial Sequence
  Synthetic
caguccuuggaggcacagaacag

SEQ ID NO: 30540 - RNA, 23 nt, Artificial Sequence
  Synthetic
aguccuuggaggcacagaacagc

SEQ ID NO: 30541 - RNA, 23 nt, Artificial Sequence
  Synthetic
guccuuggaggcacagaacagcc

SEQ ID NO: 30542 - RNA, 23 nt, Artificial Sequence
  Synthetic
uccuuggaggcacagaacagccu

SEQ ID NO: 30543 - RNA, 23 nt, Artificial Sequence
  Synthetic
ccuuggaggcacagaacagccua

SEQ ID NO: 30544 - RNA, 23 nt, Artificial Sequence
  Synthetic
cuuggaggcacagaacagccuag

SEQ ID NO: 30545 - RNA, 23 nt, Artificial Sequence
  Synthetic
uuggaggcacagaacagccuaga

SEQ ID NO: 30546 - RNA, 23 nt, Artificial Sequence
  Synthetic
uggaggcacagaacagccuagac

SEQ ID NO: 30547 - RNA, 23 nt, Artificial Sequence
  Synthetic
ggaggcacagaacagccuagacc

SEQ ID NO: 30548 - RNA, 23 nt, Artificial Sequence
  Synthetic
gaggcacagaacagccuagaccc

SEQ ID NO: 30549 - RNA, 23 nt, Artificial Sequence
  Synthetic
aggcacagaacagccuagaccca

SEQ ID NO: 30550 - RNA, 23 nt, Artificial Sequence
  Synthetic
ggcacagaacagccuagacccag

SEQ ID NO: 30551 - RNA, 23 nt, Artificial Sequence
  Synthetic
gcacagaacagccuagacccagc

SEQ ID NO: 30552 - RNA, 23 nt, Artificial Sequence
  Synthetic
cacagaacagccuagacccagcc

SEQ ID NO: 30553 - RNA, 23 nt, Artificial Sequence
  Synthetic
acagaacagccuagacccagcca

SEQ ID NO: 30554 - RNA, 23 nt, Artificial Sequence
  Synthetic
cagaacagccuagacccagccaa

SEQ ID NO: 30555 - RNA, 23 nt, Artificial Sequence
  Synthetic
agaacagccuagacccagccaag

SEQ ID NO: 30556 - RNA, 23 nt, Artificial Sequence
  Synthetic
gaacagccuagacccagccaagc

SEQ ID NO: 30557 - RNA, 23 nt, Artificial Sequence
  Synthetic
aacagccuagacccagccaagcu

SEQ ID NO: 30558 - RNA, 23 nt, Artificial Sequence
  Synthetic
acagccuagacccagccaagcuc

SEQ ID NO: 30559 - RNA, 23 nt, Artificial Sequence
  Synthetic
cagccuagacccagccaagcucu

SEQ ID NO: 30560 - RNA, 23 nt, Artificial Sequence
  Synthetic
agccuagacccagccaagcucua

SEQ ID NO: 30561 - RNA, 23 nt, Artificial Sequence
  Synthetic
gccuagacccagccaagcucuag

SEQ ID NO: 30562 - RNA, 23 nt, Artificial Sequence
  Synthetic
ccuagacccagccaagcucuagg

SEQ ID NO: 30563 - RNA, 23 nt, Artificial Sequence
  Synthetic
cuagacccagccaagcucuagga

SEQ ID NO: 30564 - RNA, 23 nt, Artificial Sequence
  Synthetic
uagacccagccaagcucuaggaa

SEQ ID NO: 30565 - RNA, 23 nt, Artificial Sequence
  Synthetic
agacccagccaagcucuaggaac

SEQ ID NO: 30566 - RNA, 23 nt, Artificial Sequence
  Synthetic
gacccagccaagcucuaggaacu

SEQ ID NO: 30567 - RNA, 23 nt, Artificial Sequence
  Synthetic
acccagccaagcucuaggaacuc

SEQ ID NO: 30568 - RNA, 23 nt, Artificial Sequence
  Synthetic
cccagccaagcucuaggaacuca

SEQ ID NO: 30569 - RNA, 23 nt, Artificial Sequence
  Synthetic
ccagccaagcucuaggaacucac

SEQ ID NO: 30570 - RNA, 23 nt, Artificial Sequence
  Synthetic
cagccaagcucuaggaacucacg

SEQ ID NO: 30571 - RNA, 23 nt, Artificial Sequence
  Synthetic
agccaagcucuaggaacucacgg

SEQ ID NO: 30572 - RNA, 23 nt, Artificial Sequence
  Synthetic
gccaagcucuaggaacucacggu

SEQ ID NO: 30573 - RNA, 23 nt, Artificial Sequence
  Synthetic
ccaagcucuaggaacucacgguc

SEQ ID NO: 30574 - RNA, 23 nt, Artificial Sequence
  Synthetic
caagcucuaggaacucacggucc

SEQ ID NO: 30575 - RNA, 23 nt, Artificial Sequence
  Synthetic
aagcucuaggaacucacgguccc

SEQ ID NO: 30576 - RNA, 23 nt, Artificial Sequence
  Synthetic
agcucuaggaacucacgguccca

SEQ ID NO: 30577 - RNA, 23 nt, Artificial Sequence
  Synthetic
gcucuaggaacucacggucccaa

SEQ ID NO: 30578 - RNA, 23 nt, Artificial Sequence
  Synthetic
cucuaggaacucacggucccaag

SEQ ID NO: 30579 - RNA, 23 nt, Artificial Sequence
  Synthetic
ucuaggaacucacggucccaagg

SEQ ID NO: 30580 - RNA, 23 nt, Artificial Sequence
  Synthetic
cuaggaacucacggucccaagga

SEQ ID NO: 30581 - RNA, 23 nt, Artificial Sequence
  Synthetic
uaggaacucacggucccaaggag

SEQ ID NO: 30582 - RNA, 23 nt, Artificial Sequence
  Synthetic
aggaacucacggucccaaggagu

SEQ ID NO: 30583 - RNA, 23 nt, Artificial Sequence
  Synthetic
ggaacucacggucccaaggaguc

SEQ ID NO: 30584 - RNA, 23 nt, Artificial Sequence
  Synthetic
gaacucacggucccaaggagucu

SEQ ID NO: 30585 - RNA, 23 nt, Artificial Sequence
  Synthetic
aacucacggucccaaggagucua

SEQ ID NO: 30586 - RNA, 23 nt, Artificial Sequence
  Synthetic
acucacggucccaaggagucuag

SEQ ID NO: 30587 - RNA, 23 nt, Artificial Sequence
  Synthetic
cucacggucccaaggagucuaga

SEQ ID NO: 30588 - RNA, 23 nt, Artificial Sequence
  Synthetic
ucacggucccaaggagucuagac

SEQ ID NO: 30589 - RNA, 23 nt, Artificial Sequence
  Synthetic
cacggucccaaggagucuagacg

SEQ ID NO: 30590 - RNA, 23 nt, Artificial Sequence
  Synthetic
acggucccaaggagucuagacgc

SEQ ID NO: 30591 - RNA, 23 nt, Artificial Sequence
  Synthetic
cggucccaaggagucuagacgcu

SEQ ID NO: 30592 - RNA, 23 nt, Artificial Sequence
  Synthetic
ggucccaaggagucuagacgcuu

SEQ ID NO: 30593 - RNA, 23 nt, Artificial Sequence
  Synthetic
gucccaaggagucuagacgcuug

SEQ ID NO: 30594 - RNA, 23 nt, Artificial Sequence
  Synthetic
ucccaaggagucuagacgcuugu

SEQ ID NO: 30595 - RNA, 23 nt, Artificial Sequence
  Synthetic
cccaaggagucuagacgcuuguu

SEQ ID NO: 30596 - RNA, 23 nt, Artificial Sequence
  Synthetic
ccaaggagucuagacgcuuguuc

SEQ ID NO: 30597 - RNA, 23 nt, Artificial Sequence
  Synthetic
caaggagucuagacgcuuguucu

SEQ ID NO: 30598 - RNA, 23 nt, Artificial Sequence
  Synthetic
aaggagucuagacgcuuguucug

SEQ ID NO: 30599 - RNA, 23 nt, Artificial Sequence
  Synthetic
aggagucuagacgcuuguucuga

SEQ ID NO: 30600 - RNA, 23 nt, Artificial Sequence
  Synthetic
ggagucuagacgcuuguucugau

SEQ ID NO: 30601 - RNA, 23 nt, Artificial Sequence
  Synthetic
gagucuagacgcuuguucugaug

SEQ ID NO: 30602 - RNA, 23 nt, Artificial Sequence
  Synthetic
agucuagacgcuuguucugaugc

SEQ ID NO: 30603 - RNA, 23 nt, Artificial Sequence
  Synthetic
gucuagacgcuuguucugaugcu

SEQ ID NO: 30604 - RNA, 23 nt, Artificial Sequence
  Synthetic
ucuagacgcuuguucugaugcuc

SEQ ID NO: 30605 - RNA, 23 nt, Artificial Sequence
  Synthetic
cuagacgcuuguucugaugcucc

SEQ ID NO: 30606 - RNA, 23 nt, Artificial Sequence
  Synthetic
uagacgcuuguucugaugcuccg

SEQ ID NO: 30607 - RNA, 23 nt, Artificial Sequence
  Synthetic
agacgcuuguucugaugcuccga

SEQ ID NO: 30608 - RNA, 23 nt, Artificial Sequence
  Synthetic
gacgcuuguucugaugcuccgac

SEQ ID NO: 30609 - RNA, 23 nt, Artificial Sequence
  Synthetic
acgcuuguucugaugcuccgacc

SEQ ID NO: 30610 - RNA, 23 nt, Artificial Sequence
  Synthetic
cgcuuguucugaugcuccgaccg

SEQ ID NO: 30611 - RNA, 23 nt, Artificial Sequence
  Synthetic
gcuuguucugaugcuccgaccgu

SEQ ID NO: 30612 - RNA, 23 nt, Artificial Sequence
  Synthetic
cuuguucugaugcuccgaccgua

SEQ ID NO: 30613 - RNA, 23 nt, Artificial Sequence
  Synthetic
uuguucugaugcuccgaccguaa

SEQ ID NO: 30614 - RNA, 23 nt, Artificial Sequence
  Synthetic
uguucugaugcuccgaccguaag

SEQ ID NO: 30615 - RNA, 23 nt, Artificial Sequence
  Synthetic
guucugaugcuccgaccguaaga

SEQ ID NO: 30616 - RNA, 23 nt, Artificial Sequence
  Synthetic
uucugaugcuccgaccguaagaa

SEQ ID NO: 30617 - RNA, 23 nt, Artificial Sequence
  Synthetic
ucugaugcuccgaccguaagaaa

SEQ ID NO: 30618 - RNA, 23 nt, Artificial Sequence
  Synthetic
cugaugcuccgaccguaagaaaa

SEQ ID NO: 30619 - RNA, 23 nt, Artificial Sequence
  Synthetic
ugaugcuccgaccguaagaaaaa

SEQ ID NO: 30620 - RNA, 23 nt, Artificial Sequence
  Synthetic
gaugcuccgaccguaagaaaaau

SEQ ID NO: 30621 - RNA, 23 nt, Artificial Sequence
  Synthetic
augcuccgaccguaagaaaaaug

SEQ ID NO: 30622 - RNA, 23 nt, Artificial Sequence
  Synthetic
ugcuccgaccguaagaaaaaugu

SEQ ID NO: 30623 - RNA, 23 nt, Artificial Sequence
  Synthetic
gcuccgaccguaagaaaaaugug

SEQ ID NO: 30624 - RNA, 23 nt, Artificial Sequence
  Synthetic
cuccgaccguaagaaaaaugugg

SEQ ID NO: 30625 - RNA, 23 nt, Artificial Sequence
  Synthetic
uccgaccguaagaaaaauguggg

SEQ ID NO: 30626 - RNA, 23 nt, Artificial Sequence
  Synthetic
ccgaccguaagaaaaauguggga

SEQ ID NO: 30627 - RNA, 23 nt, Artificial Sequence
  Synthetic
cgaccguaagaaaaaugugggag

SEQ ID NO: 30628 - RNA, 23 nt, Artificial Sequence
  Synthetic
gaccguaagaaaaaugugggagu

SEQ ID NO: 30629 - RNA, 23 nt, Artificial Sequence
  Synthetic
accguaagaaaaaugugggagug

SEQ ID NO: 30630 - RNA, 23 nt, Artificial Sequence
  Synthetic
ccguaagaaaaaugugggaguga

SEQ ID NO: 30631 - RNA, 23 nt, Artificial Sequence
  Synthetic
cguaagaaaaaugugggagugau

SEQ ID NO: 30632 - RNA, 23 nt, Artificial Sequence
  Synthetic
guaagaaaaaugugggagugaug

SEQ ID NO: 30633 - RNA, 23 nt, Artificial Sequence
  Synthetic
uaagaaaaaugugggagugauga

SEQ ID NO: 30634 - RNA, 23 nt, Artificial Sequence
  Synthetic
aagaaaaaugugggagugaugaa

SEQ ID NO: 30635 - RNA, 23 nt, Artificial Sequence
  Synthetic
agaaaaaugugggagugaugaag

SEQ ID NO: 30636 - RNA, 23 nt, Artificial Sequence
  Synthetic
gaaaaaugugggagugaugaagg

SEQ ID NO: 30637 - RNA, 23 nt, Artificial Sequence
  Synthetic
aaaaaugugggagugaugaaggc

SEQ ID NO: 30638 - RNA, 23 nt, Artificial Sequence
  Synthetic
aaaaugugggagugaugaaggcu

SEQ ID NO: 30639 - RNA, 23 nt, Artificial Sequence
  Synthetic
aaaugugggagugaugaaggcuu

SEQ ID NO: 30640 - RNA, 23 nt, Artificial Sequence
  Synthetic
aaugugggagugaugaaggcuuu

SEQ ID NO: 30641 - RNA, 23 nt, Artificial Sequence
  Synthetic
augugggagugaugaaggcuuua

SEQ ID NO: 30642 - RNA, 23 nt, Artificial Sequence
  Synthetic
ugugggagugaugaaggcuuuau

SEQ ID NO: 30643 - RNA, 23 nt, Artificial Sequence
  Synthetic
gugggagugaugaaggcuuuaug

SEQ ID NO: 30644 - RNA, 23 nt, Artificial Sequence
  Synthetic
ugggagugaugaaggcuuuauga

SEQ ID NO: 30645 - RNA, 23 nt, Artificial Sequence
  Synthetic
gggagugaugaaggcuuuaugau

SEQ ID NO: 30646 - RNA, 23 nt, Artificial Sequence
  Synthetic
ggagugaugaaggcuuuaugauu

SEQ ID NO: 30647 - RNA, 23 nt, Artificial Sequence
  Synthetic
gagugaugaaggcuuuaugauuu

SEQ ID NO: 30648 - RNA, 23 nt, Artificial Sequence
  Synthetic
agugaugaaggcuuuaugauuua

SEQ ID NO: 30649 - RNA, 23 nt, Artificial Sequence
  Synthetic
gugaugaaggcuuuaugauuuac

SEQ ID NO: 30650 - RNA, 23 nt, Artificial Sequence
  Synthetic
ugaugaaggcuuuaugauuuacu

SEQ ID NO: 30651 - RNA, 23 nt, Artificial Sequence
  Synthetic
gaugaaggcuuuaugauuuacuc

SEQ ID NO: 30652 - RNA, 23 nt, Artificial Sequence
  Synthetic
augaaggcuuuaugauuuacuca

SEQ ID NO: 30653 - RNA, 23 nt, Artificial Sequence
  Synthetic
ugaaggcuuuaugauuuacucau

SEQ ID NO: 30654 - RNA, 23 nt, Artificial Sequence
  Synthetic
gaaggcuuuaugauuuacucauu

SEQ ID NO: 30655 - RNA, 23 nt, Artificial Sequence
  Synthetic
aaggcuuuaugauuuacucauua

SEQ ID NO: 30656 - RNA, 23 nt, Artificial Sequence
  Synthetic
aggcuuuaugauuuacucauuau

SEQ ID NO: 30657 - RNA, 23 nt, Artificial Sequence
  Synthetic
ggcuuuaugauuuacucauuaua

SEQ ID NO: 30658 - RNA, 23 nt, Artificial Sequence
  Synthetic
gcuuuaugauuuacucauuauag

SEQ ID NO: 30659 - RNA, 23 nt, Artificial Sequence
  Synthetic
cuuuaugauuuacucauuauagu

SEQ ID NO: 30660 - RNA, 23 nt, Artificial Sequence
  Synthetic
uuuaugauuuacucauuauagua

SEQ ID NO: 30661 - RNA, 23 nt, Artificial Sequence
  Synthetic
uuaugauuuacucauuauaguaa

SEQ ID NO: 30662 - RNA, 23 nt, Artificial Sequence
  Synthetic
uaugauuuacucauuauaguaau

SEQ ID NO: 30663 - RNA, 23 nt, Artificial Sequence
  Synthetic
augauuuacucauuauaguaaua

SEQ ID NO: 30664 - RNA, 23 nt, Artificial Sequence
  Synthetic
ugauuuacucauuauaguaauaa

SEQ ID NO: 30665 - RNA, 23 nt, Artificial Sequence
  Synthetic
gauuuacucauuauaguaauaau

SEQ ID NO: 30666 - RNA, 23 nt, Artificial Sequence
  Synthetic
auuuacucauuauaguaauaaua

SEQ ID NO: 30667 - RNA, 23 nt, Artificial Sequence
  Synthetic
uuuacucauuauaguaauaauag

SEQ ID NO: 30668 - RNA, 23 nt, Artificial Sequence
  Synthetic
uuacucauuauaguaauaauagc

SEQ ID NO: 30669 - RNA, 23 nt, Artificial Sequence
  Synthetic
uacucauuauaguaauaauagca

SEQ ID NO: 30670 - RNA, 23 nt, Artificial Sequence
  Synthetic
acucauuauaguaauaauagcag

SEQ ID NO: 30671 - RNA, 23 nt, Artificial Sequence
  Synthetic
cucauuauaguaauaauagcagc

SEQ ID NO: 30672 - RNA, 23 nt, Artificial Sequence
  Synthetic
ucauuauaguaauaauagcagcc

SEQ ID NO: 30673 - RNA, 23 nt, Artificial Sequence
  Synthetic
cauuauaguaauaauagcagccu

SEQ ID NO: 30674 - RNA, 23 nt, Artificial Sequence
  Synthetic
auuauaguaauaauagcagccua

SEQ ID NO: 30675 - RNA, 23 nt, Artificial Sequence
  Synthetic
uuauaguaauaauagcagccuag

SEQ ID NO: 30676 - RNA, 23 nt, Artificial Sequence
  Synthetic
uauaguaauaauagcagccuagc

SEQ ID NO: 30677 - RNA, 23 nt, Artificial Sequence
  Synthetic
auaguaauaauagcagccuagcu

SEQ ID NO: 30678 - RNA, 23 nt, Artificial Sequence
  Synthetic
uaguaauaauagcagccuagcua

SEQ ID NO: 30679 - RNA, 23 nt, Artificial Sequence
  Synthetic
aguaauaauagcagccuagcuag

SEQ ID NO: 30680 - RNA, 23 nt, Artificial Sequence
  Synthetic
guaauaauagcagccuagcuagg

SEQ ID NO: 30681 - RNA, 23 nt, Artificial Sequence
  Synthetic
uaauaauagcagccuagcuaggu

SEQ ID NO: 30682 - RNA, 23 nt, Artificial Sequence
  Synthetic
aauaauagcagccuagcuaggua

SEQ ID NO: 30683 - RNA, 23 nt, Artificial Sequence
  Synthetic
auaauagcagccuagcuagguac

SEQ ID NO: 30684 - RNA, 23 nt, Artificial Sequence
  Synthetic
uaauagcagccuagcuagguaca

SEQ ID NO: 30685 - RNA, 23 nt, Artificial Sequence
  Synthetic
aauagcagccuagcuagguacaa

SEQ ID NO: 30686 - RNA, 23 nt, Artificial Sequence
  Synthetic
auagcagccuagcuagguacaaa

SEQ ID NO: 30687 - RNA, 23 nt, Artificial Sequence
  Synthetic
uagcagccuagcuagguacaaaa

SEQ ID NO: 30688 - RNA, 23 nt, Artificial Sequence
  Synthetic
agcagccuagcuagguacaaaag

SEQ ID NO: 30689 - RNA, 23 nt, Artificial Sequence
  Synthetic
gcagccuagcuagguacaaaagc

SEQ ID NO: 30690 - RNA, 23 nt, Artificial Sequence
  Synthetic
cagccuagcuagguacaaaagca

SEQ ID NO: 30691 - RNA, 23 nt, Artificial Sequence
  Synthetic
agccuagcuagguacaaaagcag

SEQ ID NO: 30692 - RNA, 23 nt, Artificial Sequence
  Synthetic
gccuagcuagguacaaaagcagu

SEQ ID NO: 30693 - RNA, 23 nt, Artificial Sequence
  Synthetic
ccuagcuagguacaaaagcaguu

SEQ ID NO: 30694 - RNA, 23 nt, Artificial Sequence
  Synthetic
cuagcuagguacaaaagcaguua

SEQ ID NO: 30695 - RNA, 23 nt, Artificial Sequence
  Synthetic
uagcuagguacaaaagcaguuau

SEQ ID NO: 30696 - RNA, 23 nt, Artificial Sequence
  Synthetic
agcuagguacaaaagcaguuaua

SEQ ID NO: 30697 - RNA, 23 nt, Artificial Sequence
  Synthetic
gcuagguacaaaagcaguuauaa

SEQ ID NO: 30698 - RNA, 23 nt, Artificial Sequence
  Synthetic
cuagguacaaaagcaguuauaaa

SEQ ID NO: 30699 - RNA, 23 nt, Artificial Sequence
  Synthetic
uagguacaaaagcaguuauaaac

SEQ ID NO: 30700 - RNA, 23 nt, Artificial Sequence
  Synthetic
agguacaaaagcaguuauaaacc

SEQ ID NO: 30701 - RNA, 23 nt, Artificial Sequence
  Synthetic
gguacaaaagcaguuauaaacca

SEQ ID NO: 30702 - RNA, 23 nt, Artificial Sequence
  Synthetic
guacaaaagcaguuauaaaccau

SEQ ID NO: 30703 - RNA, 23 nt, Artificial Sequence
  Synthetic
uacaaaagcaguuauaaaccauu

SEQ ID NO: 30704 - RNA, 23 nt, Artificial Sequence
  Synthetic
acaaaagcaguuauaaaccauuu

SEQ ID NO: 30705 - RNA, 23 nt, Artificial Sequence
  Synthetic
caaaagcaguuauaaaccauuua

SEQ ID NO: 30706 - RNA, 23 nt, Artificial Sequence
  Synthetic
aaaagcaguuauaaaccauuuau

SEQ ID NO: 30707 - RNA, 23 nt, Artificial Sequence
  Synthetic
aaagcaguuauaaaccauuuaua

SEQ ID NO: 30708 - RNA, 23 nt, Artificial Sequence
  Synthetic
aagcaguuauaaaccauuuauau

SEQ ID NO: 30709 - RNA, 23 nt, Artificial Sequence
  Synthetic
agcaguuauaaaccauuuauauu

SEQ ID NO: 30710 - RNA, 23 nt, Artificial Sequence
  Synthetic
gcaguuauaaaccauuuauauua

SEQ ID NO: 30711 - RNA, 23 nt, Artificial Sequence
  Synthetic
caguuauaaaccauuuauauuac

SEQ ID NO: 30712 - RNA, 23 nt, Artificial Sequence
  Synthetic
aguuauaaaccauuuauauuaca

SEQ ID NO: 30713 - RNA, 23 nt, Artificial Sequence
  Synthetic
guuauaaaccauuuauauuacac

SEQ ID NO: 30714 - RNA, 23 nt, Artificial Sequence
  Synthetic
uuauaaaccauuuauauuacaca

SEQ ID NO: 30715 - RNA, 23 nt, Artificial Sequence
  Synthetic
uauaaaccauuuauauuacacag

SEQ ID NO: 30716 - RNA, 23 nt, Artificial Sequence
  Synthetic
auaaaccauuuauauuacacaga

SEQ ID NO: 30717 - RNA, 23 nt, Artificial Sequence
  Synthetic
uaaaccauuuauauuacacagaa

SEQ ID NO: 30718 - RNA, 23 nt, Artificial Sequence
  Synthetic
aaaccauuuauauuacacagaau

SEQ ID NO: 30719 - RNA, 23 nt, Artificial Sequence
  Synthetic
aaccauuuauauuacacagaauu

SEQ ID NO: 30720 - RNA, 23 nt, Artificial Sequence
  Synthetic
accauuuauauuacacagaauua

SEQ ID NO: 30721 - RNA, 23 nt, Artificial Sequence
  Synthetic
ccauuuauauuacacagaauuau

SEQ ID NO: 30722 - RNA, 23 nt, Artificial Sequence
  Synthetic
cauuuauauuacacagaauuauu

SEQ ID NO: 30723 - RNA, 23 nt, Artificial Sequence
  Synthetic
auuuauauuacacagaauuauuc

SEQ ID NO: 30724 - RNA, 23 nt, Artificial Sequence
  Synthetic
uuuauauuacacagaauuauuca

SEQ ID NO: 30725 - RNA, 23 nt, Artificial Sequence
  Synthetic
uuauauuacacagaauuauucag

SEQ ID NO: 30726 - RNA, 23 nt, Artificial Sequence
  Synthetic
uauauuacacagaauuauucagg

SEQ ID NO: 30727 - RNA, 23 nt, Artificial Sequence
  Synthetic
auauuacacagaauuauucaggu

SEQ ID NO: 30728 - RNA, 23 nt, Artificial Sequence
  Synthetic
uauuacacagaauuauucagguc

SEQ ID NO: 30729 - RNA, 23 nt, Artificial Sequence
  Synthetic
auuacacagaauuauucaggucu

SEQ ID NO: 30730 - RNA, 23 nt, Artificial Sequence
  Synthetic
uuacacagaauuauucaggucuc

SEQ ID NO: 30731 - RNA, 23 nt, Artificial Sequence
  Synthetic
uacacagaauuauucaggucucc

SEQ ID NO: 30732 - RNA, 23 nt, Artificial Sequence
  Synthetic
acacagaauuauucaggucucca

SEQ ID NO: 30733 - RNA, 23 nt, Artificial Sequence
  Synthetic
cacagaauuauucaggucuccau

SEQ ID NO: 30734 - RNA, 23 nt, Artificial Sequence
  Synthetic
acagaauuauucaggucuccauu

SEQ ID NO: 30735 - RNA, 23 nt, Artificial Sequence
  Synthetic
cagaauuauucaggucuccauuc

SEQ ID NO: 30736 - RNA, 23 nt, Artificial Sequence
  Synthetic
agaauuauucaggucuccauucu

SEQ ID NO: 30737 - RNA, 23 nt, Artificial Sequence
  Synthetic
gaauuauucaggucuccauucua

SEQ ID NO: 30738 - RNA, 23 nt, Artificial Sequence
  Synthetic
aauuauucaggucuccauucuau

SEQ ID NO: 30739 - RNA, 23 nt, Artificial Sequence
  Synthetic
auuauucaggucuccauucuauc

SEQ ID NO: 30740 - RNA, 23 nt, Artificial Sequence
  Synthetic
uuauucaggucuccauucuaucu

SEQ ID NO: 30741 - RNA, 23 nt, Artificial Sequence
  Synthetic
uauucaggucuccauucuaucuu

SEQ ID NO: 30742 - RNA, 23 nt, Artificial Sequence
  Synthetic
auucaggucuccauucuaucuua

SEQ ID NO: 30743 - RNA, 23 nt, Artificial Sequence
  Synthetic
uucaggucuccauucuaucuuau

SEQ ID NO: 30744 - RNA, 23 nt, Artificial Sequence
  Synthetic
ucaggucuccauucuaucuuaug

SEQ ID NO: 30745 - RNA, 23 nt, Artificial Sequence
  Synthetic
caggucuccauucuaucuuaugu

SEQ ID NO: 30746 - RNA, 23 nt, Artificial Sequence
  Synthetic
aggucuccauucuaucuuauguu

SEQ ID NO: 30747 - RNA, 23 nt, Artificial Sequence
  Synthetic
ggucuccauucuaucuuauguug

SEQ ID NO: 30748 - RNA, 23 nt, Artificial Sequence
  Synthetic
gucuccauucuaucuuauguugu

SEQ ID NO: 30749 - RNA, 23 nt, Artificial Sequence
  Synthetic
ucuccauucuaucuuauguugua

SEQ ID NO: 30750 - RNA, 23 nt, Artificial Sequence
  Synthetic
cuccauucuaucuuauguuguaa

SEQ ID NO: 30751 - RNA, 23 nt, Artificial Sequence
  Synthetic
uccauucuaucuuauguuguaaa

SEQ ID NO: 30752 - RNA, 23 nt, Artificial Sequence
  Synthetic
ccauucuaucuuauguuguaaaa

SEQ ID NO: 30753 - RNA, 23 nt, Artificial Sequence
  Synthetic
cauucuaucuuauguuguaaaau

SEQ ID NO: 30754 - RNA, 23 nt, Artificial Sequence
  Synthetic
auucuaucuuauguuguaaaauu

SEQ ID NO: 30755 - RNA, 23 nt, Artificial Sequence
  Synthetic
uucuaucuuauguuguaaaauug

SEQ ID NO: 30756 - RNA, 23 nt, Artificial Sequence
  Synthetic
ucuaucuuauguuguaaaauugu

SEQ ID NO: 30757 - RNA, 23 nt, Artificial Sequence
  Synthetic
cuaucuuauguuguaaaauuguu

SEQ ID NO: 30758 - RNA, 23 nt, Artificial Sequence
  Synthetic
uaucuuauguuguaaaauuguua

SEQ ID NO: 30759 - RNA, 23 nt, Artificial Sequence
  Synthetic
aucuuauguuguaaaauuguuaa

SEQ ID NO: 30760 - RNA, 23 nt, Artificial Sequence
  Synthetic
ucuuauguuguaaaauuguuaau

SEQ ID NO: 30761 - RNA, 23 nt, Artificial Sequence
  Synthetic
cuuauguuguaaaauuguuaauu

SEQ ID NO: 30762 - RNA, 23 nt, Artificial Sequence
  Synthetic
uuauguuguaaaauuguuaauug

SEQ ID NO: 30763 - RNA, 23 nt, Artificial Sequence
  Synthetic
uauguuguaaaauuguuaauugg

SEQ ID NO: 30764 - RNA, 23 nt, Artificial Sequence
  Synthetic
auguuguaaaauuguuaauugga

SEQ ID NO: 30765 - RNA, 23 nt, Artificial Sequence
  Synthetic
uguuguaaaauuguuaauuggau

SEQ ID NO: 30766 - RNA, 23 nt, Artificial Sequence
  Synthetic
guuguaaaauuguuaauuggauu

SEQ ID NO: 30767 - RNA, 23 nt, Artificial Sequence
  Synthetic
uuguaaaauuguuaauuggauuu

SEQ ID NO: 30768 - RNA, 23 nt, Artificial Sequence
  Synthetic
uguaaaauuguuaauuggauuuc

SEQ ID NO: 30769 - RNA, 23 nt, Artificial Sequence
  Synthetic
guaaaauuguuaauuggauuucc

SEQ ID NO: 30770 - RNA, 23 nt, Artificial Sequence
  Synthetic
uaaaauuguuaauuggauuucca

SEQ ID NO: 30771 - RNA, 23 nt, Artificial Sequence
  Synthetic
aaaauuguuaauuggauuuccag

SEQ ID NO: 30772 - RNA, 23 nt, Artificial Sequence
  Synthetic
aaauuguuaauuggauuuccagu

SEQ ID NO: 30773 - RNA, 23 nt, Artificial Sequence
  Synthetic
aauuguuaauuggauuuccagug

SEQ ID NO: 30774 - RNA, 23 nt, Artificial Sequence
  Synthetic
auuguuaauuggauuuccaguga

SEQ ID NO: 30775 - RNA, 23 nt, Artificial Sequence
  Synthetic
uuguuaauuggauuuccagugag

SEQ ID NO: 30776 - RNA, 23 nt, Artificial Sequence
  Synthetic
uguuaauuggauuuccagugagu

SEQ ID NO: 30777 - RNA, 23 nt, Artificial Sequence
  Synthetic
guuaauuggauuuccagugaguu

SEQ ID NO: 30778 - RNA, 23 nt, Artificial Sequence
  Synthetic
uuaauuggauuuccagugaguug

SEQ ID NO: 30779 - RNA, 23 nt, Artificial Sequence
  Synthetic
uaauuggauuuccagugaguugu

SEQ ID NO: 30780 - RNA, 23 nt, Artificial Sequence
  Synthetic
aauuggauuuccagugaguuguu

SEQ ID NO: 30781 - RNA, 23 nt, Artificial Sequence
  Synthetic
auuggauuuccagugaguuguuu

SEQ ID NO: 30782 - RNA, 23 nt, Artificial Sequence
  Synthetic
uuggauuuccagugaguuguuua

SEQ ID NO: 30783 - RNA, 23 nt, Artificial Sequence
  Synthetic
uggauuuccagugaguuguuuag

SEQ ID NO: 30784 - RNA, 23 nt, Artificial Sequence
  Synthetic
ggauuuccagugaguuguuuaga

SEQ ID NO: 30785 - RNA, 23 nt, Artificial Sequence
  Synthetic
gauuuccagugaguuguuuagau

SEQ ID NO: 30786 - RNA, 23 nt, Artificial Sequence
  Synthetic
auuuccagugaguuguuuagaug

SEQ ID NO: 30787 - RNA, 23 nt, Artificial Sequence
  Synthetic
uuuccagugaguuguuuagauga

SEQ ID NO: 30788 - RNA, 23 nt, Artificial Sequence
  Synthetic
uuccagugaguuguuuagaugau

SEQ ID NO: 30789 - RNA, 23 nt, Artificial Sequence
  Synthetic
uccagugaguuguuuagaugauu

SEQ ID NO: 30790 - RNA, 23 nt, Artificial Sequence
  Synthetic
ccagugaguuguuuagaugauua

SEQ ID NO: 30791 - RNA, 23 nt, Artificial Sequence
  Synthetic
cagugaguuguuuagaugauuag

SEQ ID NO: 30792 - RNA, 23 nt, Artificial Sequence
  Synthetic
agugaguuguuuagaugauuagu

SEQ ID NO: 30793 - RNA, 23 nt, Artificial Sequence
  Synthetic
gugaguuguuuagaugauuagug

SEQ ID NO: 30794 - RNA, 23 nt, Artificial Sequence
  Synthetic
ugaguuguuuagaugauuaguga

SEQ ID NO: 30795 - RNA, 23 nt, Artificial Sequence
  Synthetic
gaguuguuuagaugauuagugau

SEQ ID NO: 30796 - RNA, 23 nt, Artificial Sequence
  Synthetic
aguuguuuagaugauuagugaua

SEQ ID NO: 30797 - RNA, 23 nt, Artificial Sequence
  Synthetic
guuguuuagaugauuagugauaa

SEQ ID NO: 30798 - RNA, 23 nt, Artificial Sequence
  Synthetic
uuguuuagaugauuagugauaau

SEQ ID NO: 30799 - RNA, 23 nt, Artificial Sequence
  Synthetic
uguuuagaugauuagugauaaua

SEQ ID NO: 30800 - RNA, 23 nt, Artificial Sequence
  Synthetic
guuuagaugauuagugauaauaa

SEQ ID NO: 30801 - RNA, 23 nt, Artificial Sequence
  Synthetic
uuuagaugauuagugauaauaag

SEQ ID NO: 30802 - RNA, 23 nt, Artificial Sequence
  Synthetic
uuagaugauuagugauaauaagg

SEQ ID NO: 30803 - RNA, 23 nt, Artificial Sequence
  Synthetic
uagaugauuagugauaauaagga

SEQ ID NO: 30804 - RNA, 23 nt, Artificial Sequence
  Synthetic
agaugauuagugauaauaaggaa

SEQ ID NO: 30805 - RNA, 23 nt, Artificial Sequence
  Synthetic
gaugauuagugauaauaaggaau

SEQ ID NO: 30806 - RNA, 23 nt, Artificial Sequence
  Synthetic
augauuagugauaauaaggaaug

SEQ ID NO: 30807 - RNA, 23 nt, Artificial Sequence
  Synthetic
ugauuagugauaauaaggaaugg

SEQ ID NO: 30808 - RNA, 23 nt, Artificial Sequence
  Synthetic
gauuagugauaauaaggaauggu

SEQ ID NO: 30809 - RNA, 23 nt, Artificial Sequence
  Synthetic
auuagugauaauaaggaauggua

SEQ ID NO: 30810 - RNA, 23 nt, Artificial Sequence
  Synthetic
uuagugauaauaaggaaugguaa

SEQ ID NO: 30811 - RNA, 23 nt, Artificial Sequence
  Synthetic
uagugauaauaaggaaugguaaa

SEQ ID NO: 30812 - RNA, 23 nt, Artificial Sequence
  Synthetic
agugauaauaaggaaugguaaau

SEQ ID NO: 30813 - RNA, 23 nt, Artificial Sequence
  Synthetic
gugauaauaaggaaugguaaauc

SEQ ID NO: 30814 - RNA, 23 nt, Artificial Sequence
  Synthetic
ugauaauaaggaaugguaaaucc

SEQ ID NO: 30815 - RNA, 23 nt, Artificial Sequence
  Synthetic
gauaauaaggaaugguaaaucca

SEQ ID NO: 30816 - RNA, 23 nt, Artificial Sequence
  Synthetic
auaauaaggaaugguaaauccau

SEQ ID NO: 30817 - RNA, 23 nt, Artificial Sequence
  Synthetic
uaauaaggaaugguaaauccaua

SEQ ID NO: 30818 - RNA, 23 nt, Artificial Sequence
  Synthetic
aauaaggaaugguaaauccauag

SEQ ID NO: 30819 - RNA, 23 nt, Artificial Sequence
  Synthetic
auaaggaaugguaaauccauagc

SEQ ID NO: 30820 - RNA, 23 nt, Artificial Sequence
  Synthetic
uaaggaaugguaaauccauagca

SEQ ID NO: 30821 - RNA, 23 nt, Artificial Sequence
  Synthetic
aaggaaugguaaauccauagcac

SEQ ID NO: 30822 - RNA, 23 nt, Artificial Sequence
  Synthetic
aggaaugguaaauccauagcacc

SEQ ID NO: 30823 - RNA, 23 nt, Artificial Sequence
  Synthetic
ggaaugguaaauccauagcacca

SEQ ID NO: 30824 - RNA, 23 nt, Artificial Sequence
  Synthetic
gaaugguaaauccauagcaccau

SEQ ID NO: 30825 - RNA, 23 nt, Artificial Sequence
  Synthetic
aaugguaaauccauagcaccauu

SEQ ID NO: 30826 - RNA, 23 nt, Artificial Sequence
  Synthetic
augguaaauccauagcaccauuu

SEQ ID NO: 30827 - RNA, 23 nt, Artificial Sequence
  Synthetic
ugguaaauccauagcaccauuuc

SEQ ID NO: 30828 - RNA, 23 nt, Artificial Sequence
  Synthetic
gguaaauccauagcaccauuuca

SEQ ID NO: 30829 - RNA, 23 nt, Artificial Sequence
  Synthetic
guaaauccauagcaccauuucaa

SEQ ID NO: 30830 - RNA, 23 nt, Artificial Sequence
  Synthetic
uaaauccauagcaccauuucaaa

SEQ ID NO: 30831 - RNA, 23 nt, Artificial Sequence
  Synthetic
aaauccauagcaccauuucaaag

SEQ ID NO: 30832 - RNA, 23 nt, Artificial Sequence
  Synthetic
aauccauagcaccauuucaaaga

SEQ ID NO: 30833 - RNA, 23 nt, Artificial Sequence
  Synthetic
auccauagcaccauuucaaagac

SEQ ID NO: 30834 - RNA, 23 nt, Artificial Sequence
  Synthetic
uccauagcaccauuucaaagacu

SEQ ID NO: 30835 - RNA, 23 nt, Artificial Sequence
  Synthetic
ccauagcaccauuucaaagacuu

SEQ ID NO: 30836 - RNA, 23 nt, Artificial Sequence
  Synthetic
cauagcaccauuucaaagacuug

SEQ ID NO: 30837 - RNA, 23 nt, Artificial Sequence
  Synthetic
auagcaccauuucaaagacuugu

SEQ ID NO: 30838 - RNA, 23 nt, Artificial Sequence
  Synthetic
uagcaccauuucaaagacuuguu

SEQ ID NO: 30839 - RNA, 23 nt, Artificial Sequence
  Synthetic
agcaccauuucaaagacuuguug

SEQ ID NO: 30840 - RNA, 23 nt, Artificial Sequence
  Synthetic
gcaccauuucaaagacuuguugu

SEQ ID NO: 30841 - RNA, 23 nt, Artificial Sequence
  Synthetic
caccauuucaaagacuuguuguc

SEQ ID NO: 30842 - RNA, 23 nt, Artificial Sequence
  Synthetic
accauuucaaagacuuguuguca

SEQ ID NO: 30843 - RNA, 23 nt, Artificial Sequence
  Synthetic
ccauuucaaagacuuguugucac

SEQ ID NO: 30844 - RNA, 23 nt, Artificial Sequence
  Synthetic
cauuucaaagacuuguugucacu

SEQ ID NO: 30845 - RNA, 23 nt, Artificial Sequence
  Synthetic
auuucaaagacuuguugucacug

SEQ ID NO: 30846 - RNA, 23 nt, Artificial Sequence
  Synthetic
uuucaaagacuuguugucacuga

SEQ ID NO: 30847 - RNA, 23 nt, Artificial Sequence
  Synthetic
uucaaagacuuguugucacugau

SEQ ID NO: 30848 - RNA, 23 nt, Artificial Sequence
  Synthetic
ucaaagacuuguugucacugauu

SEQ ID NO: 30849 - RNA, 23 nt, Artificial Sequence
  Synthetic
caaagacuuguugucacugauuu

SEQ ID NO: 30850 - RNA, 23 nt, Artificial Sequence
  Synthetic
aaagacuuguugucacugauuuc

SEQ ID NO: 30851 - RNA, 23 nt, Artificial Sequence
  Synthetic
aagacuuguugucacugauuucu

SEQ ID NO: 30852 - RNA, 23 nt, Artificial Sequence
  Synthetic
agacuuguugucacugauuucuc

SEQ ID NO: 30853 - RNA, 23 nt, Artificial Sequence
  Synthetic
gacuuguugucacugauuucuca

SEQ ID NO: 30854 - RNA, 23 nt, Artificial Sequence
  Synthetic
acuuguugucacugauuucucau

SEQ ID NO: 30855 - RNA, 23 nt, Artificial Sequence
  Synthetic
cuuguugucacugauuucucauu

SEQ ID NO: 30856 - RNA, 23 nt, Artificial Sequence
  Synthetic
uuguugucacugauuucucauuu

SEQ ID NO: 30857 - RNA, 23 nt, Artificial Sequence
  Synthetic
uguugucacugauuucucauuua

SEQ ID NO: 30858 - RNA, 23 nt, Artificial Sequence
  Synthetic
guugucacugauuucucauuuag

SEQ ID NO: 30859 - RNA, 23 nt, Artificial Sequence
  Synthetic
uugucacugauuucucauuuaga

SEQ ID NO: 30860 - RNA, 23 nt, Artificial Sequence
  Synthetic
ugucacugauuucucauuuagau

SEQ ID NO: 30861 - RNA, 23 nt, Artificial Sequence
  Synthetic
gucacugauuucucauuuagaug

SEQ ID NO: 30862 - RNA, 23 nt, Artificial Sequence
  Synthetic
ucacugauuucucauuuagaugu

SEQ ID NO: 30863 - RNA, 23 nt, Artificial Sequence
  Synthetic
cacugauuucucauuuagaugug

SEQ ID NO: 30864 - RNA, 23 nt, Artificial Sequence
  Synthetic
acugauuucucauuuagaugugu

SEQ ID NO: 30865 - RNA, 23 nt, Artificial Sequence
  Synthetic
cugauuucucauuuagaugugug

SEQ ID NO: 30866 - RNA, 23 nt, Artificial Sequence
  Synthetic
ugauuucucauuuagauguguga

SEQ ID NO: 30867 - RNA, 23 nt, Artificial Sequence
  Synthetic
gauuucucauuuagaugugugac

SEQ ID NO: 30868 - RNA, 23 nt, Artificial Sequence
  Synthetic
auuucucauuuagaugugugacg

SEQ ID NO: 30869 - RNA, 23 nt, Artificial Sequence
  Synthetic
uuucucauuuagaugugugacga

SEQ ID NO: 30870 - RNA, 23 nt, Artificial Sequence
  Synthetic
uucucauuuagaugugugacgaa

SEQ ID NO: 30871 - RNA, 23 nt, Artificial Sequence
  Synthetic
ucucauuuagaugugugacgaag

SEQ ID NO: 30872 - RNA, 23 nt, Artificial Sequence
  Synthetic
cucauuuagaugugugacgaaga

SEQ ID NO: 30873 - RNA, 23 nt, Artificial Sequence
  Synthetic
ucauuuagaugugugacgaagau

SEQ ID NO: 30874 - RNA, 23 nt, Artificial Sequence
  Synthetic
cauuuagaugugugacgaagaua

SEQ ID NO: 30875 - RNA, 23 nt, Artificial Sequence
  Synthetic
auuuagaugugugacgaagauac

SEQ ID NO: 30876 - RNA, 23 nt, Artificial Sequence
  Synthetic
uuuagaugugugacgaagauacu

SEQ ID NO: 30877 - RNA, 23 nt, Artificial Sequence
  Synthetic
uuagaugugugacgaagauacuc

SEQ ID NO: 30878 - RNA, 23 nt, Artificial Sequence
  Synthetic
uagaugugugacgaagauacucc

SEQ ID NO: 30879 - RNA, 23 nt, Artificial Sequence
  Synthetic
agaugugugacgaagauacucca

SEQ ID NO: 30880 - RNA, 23 nt, Artificial Sequence
  Synthetic
gaugugugacgaagauacuccac

SEQ ID NO: 30881 - RNA, 23 nt, Artificial Sequence
  Synthetic
augugugacgaagauacuccacc

SEQ ID NO: 30882 - RNA, 23 nt, Artificial Sequence
  Synthetic
ugugugacgaagauacuccaccu

SEQ ID NO: 30883 - RNA, 23 nt, Artificial Sequence
  Synthetic
gugugacgaagauacuccaccug

SEQ ID NO: 30884 - RNA, 23 nt, Artificial Sequence
  Synthetic
ugugacgaagauacuccaccugu

SEQ ID NO: 30885 - RNA, 23 nt, Artificial Sequence
  Synthetic
gugacgaagauacuccaccugua

SEQ ID NO: 30886 - RNA, 23 nt, Artificial Sequence
  Synthetic
ugacgaagauacuccaccuguaa

SEQ ID NO: 30887 - RNA, 23 nt, Artificial Sequence
  Synthetic
gacgaagauacuccaccuguaag

SEQ ID NO: 30888 - RNA, 23 nt, Artificial Sequence
  Synthetic
acgaagauacuccaccuguaagg

SEQ ID NO: 30889 - RNA, 23 nt, Artificial Sequence
  Synthetic
cgaagauacuccaccuguaaggg

SEQ ID NO: 30890 - RNA, 23 nt, Artificial Sequence
  Synthetic
gaagauacuccaccuguaagggc

SEQ ID NO: 30891 - RNA, 23 nt, Artificial Sequence
  Synthetic
aagauacuccaccuguaagggca

SEQ ID NO: 30892 - RNA, 23 nt, Artificial Sequence
  Synthetic
agauacuccaccuguaagggcaa

SEQ ID NO: 30893 - RNA, 23 nt, Artificial Sequence
  Synthetic
gauacuccaccuguaagggcaag

SEQ ID NO: 30894 - RNA, 23 nt, Artificial Sequence
  Synthetic
auacuccaccuguaagggcaagu

SEQ ID NO: 30895 - RNA, 23 nt, Artificial Sequence
  Synthetic
uacuccaccuguaagggcaagua

SEQ ID NO: 30896 - RNA, 23 nt, Artificial Sequence
  Synthetic
acuccaccuguaagggcaaguau

SEQ ID NO: 30897 - RNA, 23 nt, Artificial Sequence
  Synthetic
cuccaccuguaagggcaaguaug

SEQ ID NO: 30898 - RNA, 23 nt, Artificial Sequence
  Synthetic
uccaccuguaagggcaaguaugc

SEQ ID NO: 30899 - RNA, 23 nt, Artificial Sequence
  Synthetic
ccaccuguaagggcaaguaugcc

SEQ ID NO: 30900 - RNA, 23 nt, Artificial Sequence
  Synthetic
caccuguaagggcaaguaugcca

SEQ ID NO: 30901 - RNA, 23 nt, Artificial Sequence
  Synthetic
accuguaagggcaaguaugccaa

SEQ ID NO: 30902 - RNA, 23 nt, Artificial Sequence
  Synthetic
ccuguaagggcaaguaugccaau

SEQ ID NO: 30903 - RNA, 23 nt, Artificial Sequence
  Synthetic
cuguaagggcaaguaugccaaug

SEQ ID NO: 30904 - RNA, 23 nt, Artificial Sequence
  Synthetic
uguaagggcaaguaugccaaugc

SEQ ID NO: 30905 - RNA, 23 nt, Artificial Sequence
  Synthetic
guaagggcaaguaugccaaugcc

SEQ ID NO: 30906 - RNA, 23 nt, Artificial Sequence
  Synthetic
uaagggcaaguaugccaaugcca

SEQ ID NO: 30907 - RNA, 23 nt, Artificial Sequence
  Synthetic
aagggcaaguaugccaaugccac

SEQ ID NO: 30908 - RNA, 23 nt, Artificial Sequence
  Synthetic
agggcaaguaugccaaugccaca

SEQ ID NO: 30909 - RNA, 23 nt, Artificial Sequence
  Synthetic
gggcaaguaugccaaugccacaa

SEQ ID NO: 30910 - RNA, 23 nt, Artificial Sequence
  Synthetic
ggcaaguaugccaaugccacaag

SEQ ID NO: 30911 - RNA, 23 nt, Artificial Sequence
  Synthetic
gcaaguaugccaaugccacaagc

SEQ ID NO: 30912 - RNA, 23 nt, Artificial Sequence
  Synthetic
caaguaugccaaugccacaagcc

SEQ ID NO: 30913 - RNA, 23 nt, Artificial Sequence
  Synthetic
aaguaugccaaugccacaagccg

SEQ ID NO: 30914 - RNA, 23 nt, Artificial Sequence
  Synthetic
aguaugccaaugccacaagccgu

SEQ ID NO: 30915 - RNA, 23 nt, Artificial Sequence
  Synthetic
guaugccaaugccacaagccgug

SEQ ID NO: 30916 - RNA, 23 nt, Artificial Sequence
  Synthetic
uaugccaaugccacaagccgugu

SEQ ID NO: 30917 - RNA, 23 nt, Artificial Sequence
  Synthetic
augccaaugccacaagccguguu

SEQ ID NO: 30918 - RNA, 23 nt, Artificial Sequence
  Synthetic
ugccaaugccacaagccguguuu

SEQ ID NO: 30919 - RNA, 23 nt, Artificial Sequence
  Synthetic
gccaaugccacaagccguguuuu

SEQ ID NO: 30920 - RNA, 23 nt, Artificial Sequence
  Synthetic
ccaaugccacaagccguguuuuu

SEQ ID NO: 30921 - RNA, 23 nt, Artificial Sequence
  Synthetic
caaugccacaagccguguuuuug

SEQ ID NO: 30922 - RNA, 23 nt, Artificial Sequence
  Synthetic
aaugccacaagccguguuuuugc

SEQ ID NO: 30923 - RNA, 23 nt, Artificial Sequence
  Synthetic
augccacaagccguguuuuugca

SEQ ID NO: 30924 - RNA, 23 nt, Artificial Sequence
  Synthetic
ugccacaagccguguuuuugcaa

SEQ ID NO: 30925 - RNA, 23 nt, Artificial Sequence
  Synthetic
gccacaagccguguuuuugcaag

SEQ ID NO: 30926 - RNA, 23 nt, Artificial Sequence
  Synthetic
ccacaagccguguuuuugcaagg

SEQ ID NO: 30927 - RNA, 23 nt, Artificial Sequence
  Synthetic
cacaagccguguuuuugcaaggg

SEQ ID NO: 30928 - RNA, 23 nt, Artificial Sequence
  Synthetic
acaagccguguuuuugcaagggc

SEQ ID NO: 30929 - RNA, 23 nt, Artificial Sequence
  Synthetic
caagccguguuuuugcaagggcu

SEQ ID NO: 30930 - RNA, 23 nt, Artificial Sequence
  Synthetic
aagccguguuuuugcaagggcuc

SEQ ID NO: 30931 - RNA, 23 nt, Artificial Sequence
  Synthetic
agccguguuuuugcaagggcucc

SEQ ID NO: 30932 - RNA, 23 nt, Artificial Sequence
  Synthetic
gccguguuuuugcaagggcucca

SEQ ID NO: 30933 - RNA, 23 nt, Artificial Sequence
  Synthetic
ccguguuuuugcaagggcuccag

SEQ ID NO: 30934 - RNA, 23 nt, Artificial Sequence
  Synthetic
cguguuuuugcaagggcuccagu

SEQ ID NO: 30935 - RNA, 23 nt, Artificial Sequence
  Synthetic
guguuuuugcaagggcuccaguu

SEQ ID NO: 30936 - RNA, 23 nt, Artificial Sequence
  Synthetic
uguuuuugcaagggcuccaguuu

SEQ ID NO: 30937 - RNA, 23 nt, Artificial Sequence
  Synthetic
guuuuugcaagggcuccaguuug

SEQ ID NO: 30938 - RNA, 23 nt, Artificial Sequence
  Synthetic
uuuuugcaagggcuccaguuugg

SEQ ID NO: 30939 - RNA, 23 nt, Artificial Sequence
  Synthetic
uuuugcaagggcuccaguuuggg

SEQ ID NO: 30940 - RNA, 23 nt, Artificial Sequence
  Synthetic
uuugcaagggcuccaguuugggc

SEQ ID NO: 30941 - RNA, 23 nt, Artificial Sequence
  Synthetic
uugcaagggcuccaguuugggca

SEQ ID NO: 30942 - RNA, 23 nt, Artificial Sequence
  Synthetic
ugcaagggcuccaguuugggcau

SEQ ID NO: 30943 - RNA, 23 nt, Artificial Sequence
  Synthetic
gcaagggcuccaguuugggcauu

SEQ ID NO: 30944 - RNA, 23 nt, Artificial Sequence
  Synthetic
caagggcuccaguuugggcauuu

SEQ ID NO: 30945 - RNA, 23 nt, Artificial Sequence
  Synthetic
aagggcuccaguuugggcauuuu

SEQ ID NO: 30946 - RNA, 23 nt, Artificial Sequence
  Synthetic
agggcuccaguuugggcauuuug

SEQ ID NO: 30947 - RNA, 23 nt, Artificial Sequence
  Synthetic
gggcuccaguuugggcauuuugu

SEQ ID NO: 30948 - RNA, 23 nt, Artificial Sequence
  Synthetic
ggcuccaguuugggcauuuuguc

SEQ ID NO: 30949 - RNA, 23 nt, Artificial Sequence
  Synthetic
gcuccaguuugggcauuuugucc

SEQ ID NO: 30950 - RNA, 23 nt, Artificial Sequence
  Synthetic
cuccaguuugggcauuuuguccg

SEQ ID NO: 30951 - RNA, 23 nt, Artificial Sequence
  Synthetic
uccaguuugggcauuuuguccgu

SEQ ID NO: 30952 - RNA, 23 nt, Artificial Sequence
  Synthetic
ccaguuugggcauuuuguccgug

SEQ ID NO: 30953 - RNA, 23 nt, Artificial Sequence
  Synthetic
caguuugggcauuuuguccgugu

SEQ ID NO: 30954 - RNA, 23 nt, Artificial Sequence
  Synthetic
aguuugggcauuuuguccgugug

SEQ ID NO: 30955 - RNA, 23 nt, Artificial Sequence
  Synthetic
guuugggcauuuuguccgugugc

SEQ ID NO: 30956 - RNA, 23 nt, Artificial Sequence
  Synthetic
uuugggcauuuuguccgugugcg

SEQ ID NO: 30957 - RNA, 23 nt, Artificial Sequence
  Synthetic
uugggcauuuuguccgugugcgc

SEQ ID NO: 30958 - RNA, 23 nt, Artificial Sequence
  Synthetic
ugggcauuuuguccgugugcgcg

SEQ ID NO: 30959 - RNA, 23 nt, Artificial Sequence
  Synthetic
gggcauuuuguccgugugcgcgu

SEQ ID NO: 30960 - RNA, 23 nt, Artificial Sequence
  Synthetic
ggcauuuuguccgugugcgcgua

SEQ ID NO: 30961 - RNA, 23 nt, Artificial Sequence
  Synthetic
gcauuuuguccgugugcgcguaa

SEQ ID NO: 30962 - RNA, 23 nt, Artificial Sequence
  Synthetic
cauuuuguccgugugcgcguaaa

SEQ ID NO: 30963 - RNA, 23 nt, Artificial Sequence
  Synthetic
auuuuguccgugugcgcguaaag

SEQ ID NO: 30964 - RNA, 23 nt, Artificial Sequence
  Synthetic
uuuuguccgugugcgcguaaagc

SEQ ID NO: 30965 - RNA, 23 nt, Artificial Sequence
  Synthetic
uuuguccgugugcgcguaaagcu

SEQ ID NO: 30966 - RNA, 23 nt, Artificial Sequence
  Synthetic
uuguccgugugcgcguaaagcuu

SEQ ID NO: 30967 - RNA, 23 nt, Artificial Sequence
  Synthetic
uguccgugugcgcguaaagcuuc

SEQ ID NO: 30968 - RNA, 23 nt, Artificial Sequence
  Synthetic
guccgugugcgcguaaagcuuca

SEQ ID NO: 30969 - RNA, 23 nt, Artificial Sequence
  Synthetic
uccgugugcgcguaaagcuucac

SEQ ID NO: 30970 - RNA, 23 nt, Artificial Sequence
  Synthetic
ccgugugcgcguaaagcuucaca

SEQ ID NO: 30971 - RNA, 23 nt, Artificial Sequence
  Synthetic
cgugugcgcguaaagcuucacac

SEQ ID NO: 30972 - RNA, 23 nt, Artificial Sequence
  Synthetic
gugugcgcguaaagcuucacaca

SEQ ID NO: 30973 - RNA, 23 nt, Artificial Sequence
  Synthetic
ugugcgcguaaagcuucacacag

SEQ ID NO: 30974 - RNA, 23 nt, Artificial Sequence
  Synthetic
gugcgcguaaagcuucacacaga

SEQ ID NO: 30975 - RNA, 23 nt, Artificial Sequence
  Synthetic
ugcgcguaaagcuucacacagag

SEQ ID NO: 30976 - RNA, 23 nt, Artificial Sequence
  Synthetic
gcgcguaaagcuucacacagagg

SEQ ID NO: 30977 - RNA, 23 nt, Artificial Sequence
  Synthetic
cgcguaaagcuucacacagaggu

SEQ ID NO: 30978 - RNA, 23 nt, Artificial Sequence
  Synthetic
gcguaaagcuucacacagagguu

SEQ ID NO: 30979 - RNA, 23 nt, Artificial Sequence
  Synthetic
cguaaagcuucacacagagguuc

SEQ ID NO: 30980 - RNA, 23 nt, Artificial Sequence
  Synthetic
guaaagcuucacacagagguucg

SEQ ID NO: 30981 - RNA, 23 nt, Artificial Sequence
  Synthetic
uaaagcuucacacagagguucgg

SEQ ID NO: 30982 - RNA, 23 nt, Artificial Sequence
  Synthetic
aaagcuucacacagagguucggg

SEQ ID NO: 30983 - RNA, 23 nt, Artificial Sequence
  Synthetic
aagcuucacacagagguucgggc

SEQ ID NO: 30984 - RNA, 23 nt, Artificial Sequence
  Synthetic
agcuucacacagagguucgggca

SEQ ID NO: 30985 - RNA, 23 nt, Artificial Sequence
  Synthetic
gcuucacacagagguucgggcag

SEQ ID NO: 30986 - RNA, 23 nt, Artificial Sequence
  Synthetic
cuucacacagagguucgggcagc

SEQ ID NO: 30987 - RNA, 23 nt, Artificial Sequence
  Synthetic
uucacacagagguucgggcagcg

SEQ ID NO: 30988 - RNA, 23 nt, Artificial Sequence
  Synthetic
ucacacagagguucgggcagcgg

SEQ ID NO: 30989 - RNA, 23 nt, Artificial Sequence
  Synthetic
cacacagagguucgggcagcggc

SEQ ID NO: 30990 - RNA, 23 nt, Artificial Sequence
  Synthetic
acacagagguucgggcagcggcu

SEQ ID NO: 30991 - RNA, 23 nt, Artificial Sequence
  Synthetic
cacagagguucgggcagcggcug

SEQ ID NO: 30992 - RNA, 23 nt, Artificial Sequence
  Synthetic
acagagguucgggcagcggcugu

SEQ ID NO: 30993 - RNA, 23 nt, Artificial Sequence
  Synthetic
cagagguucgggcagcggcuguu

SEQ ID NO: 30994 - RNA, 23 nt, Artificial Sequence
  Synthetic
agagguucgggcagcggcuguuu

SEQ ID NO: 30995 - RNA, 23 nt, Artificial Sequence
  Synthetic
gagguucgggcagcggcuguuuc

SEQ ID NO: 30996 - RNA, 23 nt, Artificial Sequence
  Synthetic
agguucgggcagcggcuguuucu

SEQ ID NO: 30997 - RNA, 23 nt, Artificial Sequence
  Synthetic
gguucgggcagcggcuguuucug

SEQ ID NO: 30998 - RNA, 23 nt, Artificial Sequence
  Synthetic
guucgggcagcggcuguuucugu

SEQ ID NO: 30999 - RNA, 23 nt, Artificial Sequence
  Synthetic
uucgggcagcggcuguuucuguu

SEQ ID NO: 31000 - RNA, 23 nt, Artificial Sequence
  Synthetic
ucgggcagcggcuguuucuguug

SEQ ID NO: 31001 - RNA, 23 nt, Artificial Sequence
  Synthetic
cgggcagcggcuguuucuguugg

SEQ ID NO: 31002 - RNA, 23 nt, Artificial Sequence
  Synthetic
gggcagcggcuguuucuguugga

SEQ ID NO: 31003 - RNA, 23 nt, Artificial Sequence
  Synthetic
ggcagcggcuguuucuguuggau

SEQ ID NO: 31004 - RNA, 23 nt, Artificial Sequence
  Synthetic
gcagcggcuguuucuguuggaug

SEQ ID NO: 31005 - RNA, 23 nt, Artificial Sequence
  Synthetic
cagcggcuguuucuguuggaugc

SEQ ID NO: 31006 - RNA, 23 nt, Artificial Sequence
  Synthetic
agcggcuguuucuguuggaugca

SEQ ID NO: 31007 - RNA, 23 nt, Artificial Sequence
  Synthetic
gcggcuguuucuguuggaugcac

SEQ ID NO: 31008 - RNA, 23 nt, Artificial Sequence
  Synthetic
cggcuguuucuguuggaugcacu

SEQ ID NO: 31009 - RNA, 23 nt, Artificial Sequence
  Synthetic
ggcuguuucuguuggaugcacug

SEQ ID NO: 31010 - RNA, 23 nt, Artificial Sequence
  Synthetic
gcuguuucuguuggaugcacugg

SEQ ID NO: 31011 - RNA, 23 nt, Artificial Sequence
  Synthetic
cuguuucuguuggaugcacuggg

SEQ ID NO: 31012 - RNA, 23 nt, Artificial Sequence
  Synthetic
uguuucuguuggaugcacugggu

SEQ ID NO: 31013 - RNA, 23 nt, Artificial Sequence
  Synthetic
guuucuguuggaugcacuggguc

SEQ ID NO: 31014 - RNA, 23 nt, Artificial Sequence
  Synthetic
uuucuguuggaugcacuggguca

SEQ ID NO: 31015 - RNA, 23 nt, Artificial Sequence
  Synthetic
uucuguuggaugcacugggucac

SEQ ID NO: 31016 - RNA, 23 nt, Artificial Sequence
  Synthetic
ucuguuggaugcacugggucacc

SEQ ID NO: 31017 - RNA, 23 nt, Artificial Sequence
  Synthetic
cuguuggaugcacugggucaccc

SEQ ID NO: 31018 - RNA, 23 nt, Artificial Sequence
  Synthetic
uguuggaugcacugggucaccca

SEQ ID NO: 31019 - RNA, 23 nt, Artificial Sequence
  Synthetic
guuggaugcacugggucacccac

SEQ ID NO: 31020 - RNA, 23 nt, Artificial Sequence
  Synthetic
uuggaugcacugggucacccacc

SEQ ID NO: 31021 - RNA, 23 nt, Artificial Sequence
  Synthetic
uggaugcacugggucacccacca

SEQ ID NO: 31022 - RNA, 23 nt, Artificial Sequence
  Synthetic
ggaugcacugggucacccaccag

SEQ ID NO: 31023 - RNA, 23 nt, Artificial Sequence
  Synthetic
gaugcacugggucacccaccaga

SEQ ID NO: 31024 - RNA, 23 nt, Artificial Sequence
  Synthetic
augcacugggucacccaccagaa

SEQ ID NO: 31025 - RNA, 23 nt, Artificial Sequence
  Synthetic
ugcacugggucacccaccagaaa

SEQ ID NO: 31026 - RNA, 23 nt, Artificial Sequence
  Synthetic
gcacugggucacccaccagaaaa

SEQ ID NO: 31027 - RNA, 23 nt, Artificial Sequence
  Synthetic
cacugggucacccaccagaaaag

SEQ ID NO: 31028 - RNA, 23 nt, Artificial Sequence
  Synthetic
acugggucacccaccagaaaagg

SEQ ID NO: 31029 - RNA, 23 nt, Artificial Sequence
  Synthetic
cugggucacccaccagaaaaggg

SEQ ID NO: 31030 - RNA, 23 nt, Artificial Sequence
  Synthetic
ugggucacccaccagaaaagggc

SEQ ID NO: 31031 - RNA, 23 nt, Artificial Sequence
  Synthetic
gggucacccaccagaaaagggcu

SEQ ID NO: 31032 - RNA, 23 nt, Artificial Sequence
  Synthetic
ggucacccaccagaaaagggcuu

SEQ ID NO: 31033 - RNA, 23 nt, Artificial Sequence
  Synthetic
gucacccaccagaaaagggcuuu

SEQ ID NO: 31034 - RNA, 23 nt, Artificial Sequence
  Synthetic
ucacccaccagaaaagggcuuuu

SEQ ID NO: 31035 - RNA, 23 nt, Artificial Sequence
  Synthetic
cacccaccagaaaagggcuuuug

SEQ ID NO: 31036 - RNA, 23 nt, Artificial Sequence
  Synthetic
acccaccagaaaagggcuuuugg

SEQ ID NO: 31037 - RNA, 23 nt, Artificial Sequence
  Synthetic
cccaccagaaaagggcuuuugga

SEQ ID NO: 31038 - RNA, 23 nt, Artificial Sequence
  Synthetic
ccaccagaaaagggcuuuuggac

SEQ ID NO: 31039 - RNA, 23 nt, Artificial Sequence
  Synthetic
caccagaaaagggcuuuuggaca

SEQ ID NO: 31040 - RNA, 23 nt, Artificial Sequence
  Synthetic
accagaaaagggcuuuuggacau

SEQ ID NO: 31041 - RNA, 23 nt, Artificial Sequence
  Synthetic
ccagaaaagggcuuuuggacauu

SEQ ID NO: 31042 - RNA, 23 nt, Artificial Sequence
  Synthetic
cagaaaagggcuuuuggacauuu

SEQ ID NO: 31043 - RNA, 23 nt, Artificial Sequence
  Synthetic
agaaaagggcuuuuggacauuug

SEQ ID NO: 31044 - RNA, 23 nt, Artificial Sequence
  Synthetic
gaaaagggcuuuuggacauuugg

SEQ ID NO: 31045 - RNA, 23 nt, Artificial Sequence
  Synthetic
aaaagggcuuuuggacauuuggg

SEQ ID NO: 31046 - RNA, 23 nt, Artificial Sequence
  Synthetic
aaagggcuuuuggacauuugggg

SEQ ID NO: 31047 - RNA, 23 nt, Artificial Sequence
  Synthetic
aagggcuuuuggacauuuggggu

SEQ ID NO: 31048 - RNA, 23 nt, Artificial Sequence
  Synthetic
agggcuuuuggacauuugggguu

SEQ ID NO: 31049 - RNA, 23 nt, Artificial Sequence
  Synthetic
gggcuuuuggacauuugggguuu

SEQ ID NO: 31050 - RNA, 23 nt, Artificial Sequence
  Synthetic
ggcuuuuggacauuugggguuuc

SEQ ID NO: 31051 - RNA, 23 nt, Artificial Sequence
  Synthetic
gcuuuuggacauuugggguuucu

SEQ ID NO: 31052 - RNA, 23 nt, Artificial Sequence
  Synthetic
cuuuuggacauuugggguuucua

SEQ ID NO: 31053 - RNA, 23 nt, Artificial Sequence
  Synthetic
uuuuggacauuugggguuucuac

SEQ ID NO: 31054 - RNA, 23 nt, Artificial Sequence
  Synthetic
uuuggacauuugggguuucuacc

SEQ ID NO: 31055 - RNA, 23 nt, Artificial Sequence
  Synthetic
uuggacauuugggguuucuaccc

SEQ ID NO: 31056 - RNA, 23 nt, Artificial Sequence
  Synthetic
uggacauuugggguuucuaccca

SEQ ID NO: 31057 - RNA, 23 nt, Artificial Sequence
  Synthetic
ggacauuugggguuucuacccac

SEQ ID NO: 31058 - RNA, 23 nt, Artificial Sequence
  Synthetic
gacauuugggguuucuacccaca

SEQ ID NO: 31059 - RNA, 23 nt, Artificial Sequence
  Synthetic
acauuugggguuucuacccacac

SEQ ID NO: 31060 - RNA, 23 nt, Artificial Sequence
  Synthetic
cauuugggguuucuacccacacu

SEQ ID NO: 31061 - RNA, 23 nt, Artificial Sequence
  Synthetic
auuugggguuucuacccacacuu

SEQ ID NO: 31062 - RNA, 23 nt, Artificial Sequence
  Synthetic
uuugggguuucuacccacacuuu

SEQ ID NO: 31063 - RNA, 23 nt, Artificial Sequence
  Synthetic
uugggguuucuacccacacuuug

SEQ ID NO: 31064 - RNA, 23 nt, Artificial Sequence
  Synthetic
ugggguuucuacccacacuuugg

SEQ ID NO: 31065 - RNA, 23 nt, Artificial Sequence
  Synthetic
gggguuucuacccacacuuuggu

SEQ ID NO: 31066 - RNA, 23 nt, Artificial Sequence
  Synthetic
ggguuucuacccacacuuugguu

SEQ ID NO: 31067 - RNA, 23 nt, Artificial Sequence
  Synthetic
gguuucuacccacacuuugguuu

SEQ ID NO: 31068 - RNA, 23 nt, Artificial Sequence
  Synthetic
guuucuacccacacuuugguuuu

SEQ ID NO: 31069 - RNA, 23 nt, Artificial Sequence
  Synthetic
uuucuacccacacuuugguuuuc

SEQ ID NO: 31070 - RNA, 23 nt, Artificial Sequence
  Synthetic
uucuacccacacuuugguuuucu

SEQ ID NO: 31071 - RNA, 23 nt, Artificial Sequence
  Synthetic
ucuacccacacuuugguuuucua

SEQ ID NO: 31072 - RNA, 23 nt, Artificial Sequence
  Synthetic
cuacccacacuuugguuuucuaa

SEQ ID NO: 31073 - RNA, 23 nt, Artificial Sequence
  Synthetic
uacccacacuuugguuuucuaaa

SEQ ID NO: 31074 - RNA, 23 nt, Artificial Sequence
  Synthetic
acccacacuuugguuuucuaaau

SEQ ID NO: 31075 - RNA, 23 nt, Artificial Sequence
  Synthetic
cccacacuuugguuuucuaaaug

SEQ ID NO: 31076 - RNA, 23 nt, Artificial Sequence
  Synthetic
ccacacuuugguuuucuaaauga

SEQ ID NO: 31077 - RNA, 23 nt, Artificial Sequence
  Synthetic
cacacuuugguuuucuaaaugag

SEQ ID NO: 31078 - RNA, 23 nt, Artificial Sequence
  Synthetic
acacuuugguuuucuaaaugagg

SEQ ID NO: 31079 - RNA, 23 nt, Artificial Sequence
  Synthetic
cacuuugguuuucuaaaugaggu

SEQ ID NO: 31080 - RNA, 23 nt, Artificial Sequence
  Synthetic
acuuugguuuucuaaaugaggug

SEQ ID NO: 31081 - RNA, 23 nt, Artificial Sequence
  Synthetic
cuuugguuuucuaaaugaggugg

SEQ ID NO: 31082 - RNA, 23 nt, Artificial Sequence
  Synthetic
uuugguuuucuaaaugaggugga

SEQ ID NO: 31083 - RNA, 23 nt, Artificial Sequence
  Synthetic
uugguuuucuaaaugagguggac

SEQ ID NO: 31084 - RNA, 23 nt, Artificial Sequence
  Synthetic
ugguuuucuaaaugagguggacu

SEQ ID NO: 31085 - RNA, 23 nt, Artificial Sequence
  Synthetic
gguuuucuaaaugagguggacug

SEQ ID NO: 31086 - RNA, 23 nt, Artificial Sequence
  Synthetic
guuuucuaaaugagguggacugg

SEQ ID NO: 31087 - RNA, 23 nt, Artificial Sequence
  Synthetic
uuuucuaaaugagguggacuggg

SEQ ID NO: 31088 - RNA, 23 nt, Artificial Sequence
  Synthetic
uuucuaaaugagguggacuggga

SEQ ID NO: 31089 - RNA, 23 nt, Artificial Sequence
  Synthetic
uucuaaaugagguggacugggag

SEQ ID NO: 31090 - RNA, 23 nt, Artificial Sequence
  Synthetic
ucuaaaugagguggacugggagg

SEQ ID NO: 31091 - RNA, 23 nt, Artificial Sequence
  Synthetic
cuaaaugagguggacugggaggg

SEQ ID NO: 31092 - RNA, 23 nt, Artificial Sequence
  Synthetic
uaaaugagguggacugggaggga

SEQ ID NO: 31093 - RNA, 23 nt, Artificial Sequence
  Synthetic
aaaugagguggacugggagggag

SEQ ID NO: 31094 - RNA, 23 nt, Artificial Sequence
  Synthetic
aaugagguggacugggagggagg

SEQ ID NO: 31095 - RNA, 23 nt, Artificial Sequence
  Synthetic
augagguggacugggagggaggu

SEQ ID NO: 31096 - RNA, 23 nt, Artificial Sequence
  Synthetic
ugagguggacugggagggaggua

SEQ ID NO: 31097 - RNA, 23 nt, Artificial Sequence
  Synthetic
gagguggacugggagggagguau

SEQ ID NO: 31098 - RNA, 23 nt, Artificial Sequence
  Synthetic
agguggacugggagggagguauc

SEQ ID NO: 31099 - RNA, 23 nt, Artificial Sequence
  Synthetic
gguggacugggagggagguaucu

SEQ ID NO: 31100 - RNA, 23 nt, Artificial Sequence
  Synthetic
guggacugggagggagguaucuu

SEQ ID NO: 31101 - RNA, 23 nt, Artificial Sequence
  Synthetic
uggacugggagggagguaucuuc

SEQ ID NO: 31102 - RNA, 23 nt, Artificial Sequence
  Synthetic
ggacugggagggagguaucuucu

SEQ ID NO: 31103 - RNA, 23 nt, Artificial Sequence
  Synthetic
gacugggagggagguaucuucuu

SEQ ID NO: 31104 - RNA, 23 nt, Artificial Sequence
  Synthetic
acugggagggagguaucuucuuu

SEQ ID NO: 31105 - RNA, 23 nt, Artificial Sequence
  Synthetic
cugggagggagguaucuucuuuc

SEQ ID NO: 31106 - RNA, 23 nt, Artificial Sequence
  Synthetic
ugggagggagguaucuucuuuca

SEQ ID NO: 31107 - RNA, 23 nt, Artificial Sequence
  Synthetic
gggagggagguaucuucuuucag

SEQ ID NO: 31108 - RNA, 23 nt, Artificial Sequence
  Synthetic
ggagggagguaucuucuuucaga

SEQ ID NO: 31109 - RNA, 23 nt, Artificial Sequence
  Synthetic
gagggagguaucuucuuucagau

SEQ ID NO: 31110 - RNA, 23 nt, Artificial Sequence
  Synthetic
agggagguaucuucuuucagaug

SEQ ID NO: 31111 - RNA, 23 nt, Artificial Sequence
  Synthetic
gggagguaucuucuuucagauga

SEQ ID NO: 31112 - RNA, 23 nt, Artificial Sequence
  Synthetic
ggagguaucuucuuucagaugaa

SEQ ID NO: 31113 - RNA, 23 nt, Artificial Sequence
  Synthetic
gagguaucuucuuucagaugaaa

SEQ ID NO: 31114 - RNA, 23 nt, Artificial Sequence
  Synthetic
agguaucuucuuucagaugaaag

SEQ ID NO: 31115 - RNA, 23 nt, Artificial Sequence
  Synthetic
gguaucuucuuucagaugaaagg

SEQ ID NO: 31116 - RNA, 23 nt, Artificial Sequence
  Synthetic
guaucuucuuucagaugaaaggg

SEQ ID NO: 31117 - RNA, 23 nt, Artificial Sequence
  Synthetic
uaucuucuuucagaugaaaggga

SEQ ID NO: 31118 - RNA, 23 nt, Artificial Sequence
  Synthetic
aucuucuuucagaugaaagggaa

SEQ ID NO: 31119 - RNA, 23 nt, Artificial Sequence
  Synthetic
ucuucuuucagaugaaagggaag

SEQ ID NO: 31120 - RNA, 23 nt, Artificial Sequence
  Synthetic
cuucuuucagaugaaagggaagg

SEQ ID NO: 31121 - RNA, 23 nt, Artificial Sequence
  Synthetic
uucuuucagaugaaagggaaggg

SEQ ID NO: 31122 - RNA, 23 nt, Artificial Sequence
  Synthetic
ucuuucagaugaaagggaagggg

SEQ ID NO: 31123 - RNA, 23 nt, Artificial Sequence
  Synthetic
cuuucagaugaaagggaaggggc

SEQ ID NO: 31124 - RNA, 23 nt, Artificial Sequence
  Synthetic
uuucagaugaaagggaaggggcg

SEQ ID NO: 31125 - RNA, 23 nt, Artificial Sequence
  Synthetic
uucagaugaaagggaaggggcga

SEQ ID NO: 31126 - RNA, 23 nt, Artificial Sequence
  Synthetic
ucagaugaaagggaaggggcgag

SEQ ID NO: 31127 - RNA, 23 nt, Artificial Sequence
  Synthetic
cagaugaaagggaaggggcgaga

SEQ ID NO: 31128 - RNA, 23 nt, Artificial Sequence
  Synthetic
agaugaaagggaaggggcgagau

SEQ ID NO: 31129 - RNA, 23 nt, Artificial Sequence
  Synthetic
gaugaaagggaaggggcgagaug

SEQ ID NO: 31130 - RNA, 23 nt, Artificial Sequence
  Synthetic
augaaagggaaggggcgagaugg

SEQ ID NO: 31131 - RNA, 23 nt, Artificial Sequence
  Synthetic
ugaaagggaaggggcgagaugga

SEQ ID NO: 31132 - RNA, 23 nt, Artificial Sequence
  Synthetic
gaaagggaaggggcgagauggag

SEQ ID NO: 31133 - RNA, 23 nt, Artificial Sequence
  Synthetic
aaagggaaggggcgagauggagu

SEQ ID NO: 31134 - RNA, 23 nt, Artificial Sequence
  Synthetic
aagggaaggggcgagauggaguu

SEQ ID NO: 31135 - RNA, 23 nt, Artificial Sequence
  Synthetic
agggaaggggcgagauggaguua

SEQ ID NO: 31136 - RNA, 23 nt, Artificial Sequence
  Synthetic
gggaaggggcgagauggaguuau

SEQ ID NO: 31137 - RNA, 23 nt, Artificial Sequence
  Synthetic
ggaaggggcgagauggaguuauc

SEQ ID NO: 31138 - RNA, 23 nt, Artificial Sequence
  Synthetic
gaaggggcgagauggaguuaucu

SEQ ID NO: 31139 - RNA, 23 nt, Artificial Sequence
  Synthetic
aaggggcgagauggaguuaucuu

SEQ ID NO: 31140 - RNA, 23 nt, Artificial Sequence
  Synthetic
aggggcgagauggaguuaucuua

SEQ ID NO: 31141 - RNA, 23 nt, Artificial Sequence
  Synthetic
ggggcgagauggaguuaucuuau

SEQ ID NO: 31142 - RNA, 23 nt, Artificial Sequence
  Synthetic
gggcgagauggaguuaucuuauu

SEQ ID NO: 31143 - RNA, 23 nt, Artificial Sequence
  Synthetic
ggcgagauggaguuaucuuauuu

SEQ ID NO: 31144 - RNA, 23 nt, Artificial Sequence
  Synthetic
gcgagauggaguuaucuuauuuc

SEQ ID NO: 31145 - RNA, 23 nt, Artificial Sequence
  Synthetic
cgagauggaguuaucuuauuucu

SEQ ID NO: 31146 - RNA, 23 nt, Artificial Sequence
  Synthetic
gagauggaguuaucuuauuucug

SEQ ID NO: 31147 - RNA, 23 nt, Artificial Sequence
  Synthetic
agauggaguuaucuuauuucugg

SEQ ID NO: 31148 - RNA, 23 nt, Artificial Sequence
  Synthetic
gauggaguuaucuuauuucuggg

SEQ ID NO: 31149 - RNA, 23 nt, Artificial Sequence
  Synthetic
auggaguuaucuuauuucugggu

SEQ ID NO: 31150 - RNA, 23 nt, Artificial Sequence
  Synthetic
uggaguuaucuuauuucugggua

SEQ ID NO: 31151 - RNA, 23 nt, Artificial Sequence
  Synthetic
ggaguuaucuuauuucuggguaa

SEQ ID NO: 31152 - RNA, 23 nt, Artificial Sequence
  Synthetic
gaguuaucuuauuucuggguaaa

SEQ ID NO: 31153 - RNA, 23 nt, Artificial Sequence
  Synthetic
aguuaucuuauuucuggguaaaa

SEQ ID NO: 31154 - RNA, 23 nt, Artificial Sequence
  Synthetic
guuaucuuauuucuggguaaaac

SEQ ID NO: 31155 - RNA, 23 nt, Artificial Sequence
  Synthetic
uuaucuuauuucuggguaaaaca

SEQ ID NO: 31156 - RNA, 23 nt, Artificial Sequence
  Synthetic
uaucuuauuucuggguaaaacaa

SEQ ID NO: 31157 - RNA, 23 nt, Artificial Sequence
  Synthetic
aucuuauuucuggguaaaacaaa

SEQ ID NO: 31158 - RNA, 23 nt, Artificial Sequence
  Synthetic
ucuuauuucuggguaaaacaaaa

SEQ ID NO: 31159 - RNA, 23 nt, Artificial Sequence
  Synthetic
cuuauuucuggguaaaacaaaac

SEQ ID NO: 31160 - RNA, 23 nt, Artificial Sequence
  Synthetic
uuauuucuggguaaaacaaaaca

SEQ ID NO: 31161 - RNA, 23 nt, Artificial Sequence
  Synthetic
uauuucuggguaaaacaaaacaa

SEQ ID NO: 31162 - RNA, 23 nt, Artificial Sequence
  Synthetic
auuucuggguaaaacaaaacaaa

SEQ ID NO: 31163 - RNA, 23 nt, Artificial Sequence
  Synthetic
uuucuggguaaaacaaaacaaac

SEQ ID NO: 31164 - RNA, 23 nt, Artificial Sequence
  Synthetic
uucuggguaaaacaaaacaaaca

SEQ ID NO: 31165 - RNA, 23 nt, Artificial Sequence
  Synthetic
ucuggguaaaacaaaacaaacaa

SEQ ID NO: 31166 - RNA, 23 nt, Artificial Sequence
  Synthetic
cuggguaaaacaaaacaaacaaa

SEQ ID NO: 31167 - RNA, 23 nt, Artificial Sequence
  Synthetic
uggguaaaacaaaacaaacaaac

SEQ ID NO: 31168 - RNA, 23 nt, Artificial Sequence
  Synthetic
ggguaaaacaaaacaaacaaaca

SEQ ID NO: 31169 - RNA, 23 nt, Artificial Sequence
  Synthetic
gguaaaacaaaacaaacaaacaa

SEQ ID NO: 31170 - RNA, 23 nt, Artificial Sequence
  Synthetic
guaaaacaaaacaaacaaacaaa

SEQ ID NO: 31171 - RNA, 23 nt, Artificial Sequence
  Synthetic
uaaaacaaaacaaacaaacaaaa

SEQ ID NO: 31172 - RNA, 23 nt, Artificial Sequence
  Synthetic
aaaacaaaacaaacaaacaaaaa

SEQ ID NO: 31173 - RNA, 23 nt, Artificial Sequence
  Synthetic
aaacaaaacaaacaaacaaaaaa

SEQ ID NO: 31174 - RNA, 23 nt, Artificial Sequence
  Synthetic
aacaaaacaaacaaacaaaaaac

SEQ ID NO: 31175 - RNA, 23 nt, Artificial Sequence
  Synthetic
acaaaacaaacaaacaaaaaaca

SEQ ID NO: 31176 - RNA, 23 nt, Artificial Sequence
  Synthetic
caaaacaaacaaacaaaaaacaa

SEQ ID NO: 31177 - RNA, 23 nt, Artificial Sequence
  Synthetic
aaaacaaacaaacaaaaaacaaa

SEQ ID NO: 31178 - RNA, 23 nt, Artificial Sequence
  Synthetic
aaacaaacaaacaaaaaacaaaa

SEQ ID NO: 31179 - RNA, 23 nt, Artificial Sequence
  Synthetic
aacaaacaaacaaaaaacaaaac

SEQ ID NO: 31180 - RNA, 23 nt, Artificial Sequence
  Synthetic
acaaacaaacaaaaaacaaaaca

SEQ ID NO: 31181 - RNA, 23 nt, Artificial Sequence
  Synthetic
caaacaaacaaaaaacaaaacaa

SEQ ID NO: 31182 - RNA, 23 nt, Artificial Sequence
  Synthetic
aaacaaacaaaaaacaaaacaaa

SEQ ID NO: 31183 - RNA, 23 nt, Artificial Sequence
  Synthetic
aacaaacaaaaaacaaaacaaaa

SEQ ID NO: 31184 - RNA, 23 nt, Artificial Sequence
  Synthetic
acaaacaaaaaacaaaacaaaaa

SEQ ID NO: 31185 - RNA, 23 nt, Artificial Sequence
  Synthetic
caaacaaaaaacaaaacaaaaau

SEQ ID NO: 31186 - RNA, 23 nt, Artificial Sequence
  Synthetic
aaacaaaaaacaaaacaaaaaua

SEQ ID NO: 31187 - RNA, 23 nt, Artificial Sequence
  Synthetic
aacaaaaaacaaaacaaaaauac

SEQ ID NO: 31188 - RNA, 23 nt, Artificial Sequence
  Synthetic
acaaaaaacaaaacaaaaauacu

SEQ ID NO: 31189 - RNA, 23 nt, Artificial Sequence
  Synthetic
caaaaaacaaaacaaaaauacug

SEQ ID NO: 31190 - RNA, 23 nt, Artificial Sequence
  Synthetic
aaaaaacaaaacaaaaauacuga

SEQ ID NO: 31191 - RNA, 23 nt, Artificial Sequence
  Synthetic
aaaaacaaaacaaaaauacugag

SEQ ID NO: 31192 - RNA, 23 nt, Artificial Sequence
  Synthetic
aaaacaaaacaaaaauacugagc

SEQ ID NO: 31193 - RNA, 23 nt, Artificial Sequence
  Synthetic
aaacaaaacaaaaauacugagcu

SEQ ID NO: 31194 - RNA, 23 nt, Artificial Sequence
  Synthetic
aacaaaacaaaaauacugagcug

SEQ ID NO: 31195 - RNA, 23 nt, Artificial Sequence
  Synthetic
acaaaacaaaaauacugagcugg

SEQ ID NO: 31196 - RNA, 23 nt, Artificial Sequence
  Synthetic
caaaacaaaaauacugagcugga

SEQ ID NO: 31197 - RNA, 23 nt, Artificial Sequence
  Synthetic
aaaacaaaaauacugagcuggau

SEQ ID NO: 31198 - RNA, 23 nt, Artificial Sequence
  Synthetic
aaacaaaaauacugagcuggauu

SEQ ID NO: 31199 - RNA, 23 nt, Artificial Sequence
  Synthetic
aacaaaaauacugagcuggauua

SEQ ID NO: 31200 - RNA, 23 nt, Artificial Sequence
  Synthetic
acaaaaauacugagcuggauuau

SEQ ID NO: 31201 - RNA, 23 nt, Artificial Sequence
  Synthetic
caaaaauacugagcuggauuaua

SEQ ID NO: 31202 - RNA, 23 nt, Artificial Sequence
  Synthetic
aaaaauacugagcuggauuauac

SEQ ID NO: 31203 - RNA, 23 nt, Artificial Sequence
  Synthetic
aaaauacugagcuggauuauacu

SEQ ID NO: 31204 - RNA, 23 nt, Artificial Sequence
  Synthetic
aaauacugagcuggauuauacug

SEQ ID NO: 31205 - RNA, 23 nt, Artificial Sequence
  Synthetic
aauacugagcuggauuauacugu

SEQ ID NO: 31206 - RNA, 23 nt, Artificial Sequence
  Synthetic
auacugagcuggauuauacuguu

SEQ ID NO: 31207 - RNA, 23 nt, Artificial Sequence
  Synthetic
uacugagcuggauuauacuguua

SEQ ID NO: 31208 - RNA, 23 nt, Artificial Sequence
  Synthetic
acugagcuggauuauacuguuag

SEQ ID NO: 31209 - RNA, 23 nt, Artificial Sequence
  Synthetic
cugagcuggauuauacuguuagg

SEQ ID NO: 31210 - RNA, 23 nt, Artificial Sequence
  Synthetic
ugagcuggauuauacuguuagga

SEQ ID NO: 31211 - RNA, 23 nt, Artificial Sequence
  Synthetic
gagcuggauuauacuguuaggau

SEQ ID NO: 31212 - RNA, 23 nt, Artificial Sequence
  Synthetic
agcuggauuauacuguuaggaug

SEQ ID NO: 31213 - RNA, 23 nt, Artificial Sequence
  Synthetic
gcuggauuauacuguuaggaugu

SEQ ID NO: 31214 - RNA, 23 nt, Artificial Sequence
  Synthetic
cuggauuauacuguuaggaugua

SEQ ID NO: 31215 - RNA, 23 nt, Artificial Sequence
  Synthetic
uggauuauacuguuaggauguaa

SEQ ID NO: 31216 - RNA, 23 nt, Artificial Sequence
  Synthetic
ggauuauacuguuaggauguaaa

SEQ ID NO: 31217 - RNA, 23 nt, Artificial Sequence
  Synthetic
gauuauacuguuaggauguaaag

SEQ ID NO: 31218 - RNA, 23 nt, Artificial Sequence
  Synthetic
auuauacuguuaggauguaaagu

SEQ ID NO: 31219 - RNA, 23 nt, Artificial Sequence
  Synthetic
uuauacuguuaggauguaaaguu

SEQ ID NO: 31220 - RNA, 23 nt, Artificial Sequence
  Synthetic
uauacuguuaggauguaaaguuc

SEQ ID NO: 31221 - RNA, 23 nt, Artificial Sequence
  Synthetic
auacuguuaggauguaaaguucc

SEQ ID NO: 31222 - RNA, 23 nt, Artificial Sequence
  Synthetic
uacuguuaggauguaaaguuccu

SEQ ID NO: 31223 - RNA, 23 nt, Artificial Sequence
  Synthetic
acuguuaggauguaaaguuccuu

SEQ ID NO: 31224 - RNA, 23 nt, Artificial Sequence
  Synthetic
cuguuaggauguaaaguuccuua

SEQ ID NO: 31225 - RNA, 23 nt, Artificial Sequence
  Synthetic
uguuaggauguaaaguuccuuag

SEQ ID NO: 31226 - RNA, 23 nt, Artificial Sequence
  Synthetic
guuaggauguaaaguuccuuagc

SEQ ID NO: 31227 - RNA, 23 nt, Artificial Sequence
  Synthetic
uuaggauguaaaguuccuuagcu

SEQ ID NO: 31228 - RNA, 23 nt, Artificial Sequence
  Synthetic
uaggauguaaaguuccuuagcua

SEQ ID NO: 31229 - RNA, 23 nt, Artificial Sequence
  Synthetic
aggauguaaaguuccuuagcuac

SEQ ID NO: 31230 - RNA, 23 nt, Artificial Sequence
  Synthetic
ggauguaaaguuccuuagcuacu

SEQ ID NO: 31231 - RNA, 23 nt, Artificial Sequence
  Synthetic
gauguaaaguuccuuagcuacuu

SEQ ID NO: 31232 - RNA, 23 nt, Artificial Sequence
  Synthetic
auguaaaguuccuuagcuacuuc

SEQ ID NO: 31233 - RNA, 23 nt, Artificial Sequence
  Synthetic
uguaaaguuccuuagcuacuucu

SEQ ID NO: 31234 - RNA, 23 nt, Artificial Sequence
  Synthetic
guaaaguuccuuagcuacuucuu

SEQ ID NO: 31235 - RNA, 23 nt, Artificial Sequence
  Synthetic
uaaaguuccuuagcuacuucuuu

SEQ ID NO: 31236 - RNA, 23 nt, Artificial Sequence
  Synthetic
aaaguuccuuagcuacuucuuua

SEQ ID NO: 31237 - RNA, 23 nt, Artificial Sequence
  Synthetic
aaguuccuuagcuacuucuuuaa

SEQ ID NO: 31238 - RNA, 23 nt, Artificial Sequence
  Synthetic
aguuccuuagcuacuucuuuaag

SEQ ID NO: 31239 - RNA, 23 nt, Artificial Sequence
  Synthetic
guuccuuagcuacuucuuuaagg

SEQ ID NO: 31240 - RNA, 23 nt, Artificial Sequence
  Synthetic
uuccuuagcuacuucuuuaaggc

SEQ ID NO: 31241 - RNA, 23 nt, Artificial Sequence
  Synthetic
uccuuagcuacuucuuuaaggcu

SEQ ID NO: 31242 - RNA, 23 nt, Artificial Sequence
  Synthetic
ccuuagcuacuucuuuaaggcuc

SEQ ID NO: 31243 - RNA, 23 nt, Artificial Sequence
  Synthetic
cuuagcuacuucuuuaaggcuca

SEQ ID NO: 31244 - RNA, 23 nt, Artificial Sequence
  Synthetic
uuagcuacuucuuuaaggcucaa

SEQ ID NO: 31245 - RNA, 23 nt, Artificial Sequence
  Synthetic
uagcuacuucuuuaaggcucaac

SEQ ID NO: 31246 - RNA, 23 nt, Artificial Sequence
  Synthetic
agcuacuucuuuaaggcucaaca

SEQ ID NO: 31247 - RNA, 23 nt, Artificial Sequence
  Synthetic
gcuacuucuuuaaggcucaacac

SEQ ID NO: 31248 - RNA, 23 nt, Artificial Sequence
  Synthetic
cuacuucuuuaaggcucaacacg

SEQ ID NO: 31249 - RNA, 23 nt, Artificial Sequence
  Synthetic
uacuucuuuaaggcucaacacga

SEQ ID NO: 31250 - RNA, 23 nt, Artificial Sequence
  Synthetic
acuucuuuaaggcucaacacgag

SEQ ID NO: 31251 - RNA, 23 nt, Artificial Sequence
  Synthetic
cuucuuuaaggcucaacacgagg

SEQ ID NO: 31252 - RNA, 23 nt, Artificial Sequence
  Synthetic
uucuuuaaggcucaacacgaggc

SEQ ID NO: 31253 - RNA, 23 nt, Artificial Sequence
  Synthetic
ucuuuaaggcucaacacgaggcu

SEQ ID NO: 31254 - RNA, 23 nt, Artificial Sequence
  Synthetic
cuuuaaggcucaacacgaggcug

SEQ ID NO: 31255 - RNA, 23 nt, Artificial Sequence
  Synthetic
uuuaaggcucaacacgaggcuga

SEQ ID NO: 31256 - RNA, 23 nt, Artificial Sequence
  Synthetic
uuaaggcucaacacgaggcugau

SEQ ID NO: 31257 - RNA, 23 nt, Artificial Sequence
  Synthetic
uaaggcucaacacgaggcugaug

SEQ ID NO: 31258 - RNA, 23 nt, Artificial Sequence
  Synthetic
aaggcucaacacgaggcugaugg

SEQ ID NO: 31259 - RNA, 23 nt, Artificial Sequence
  Synthetic
aggcucaacacgaggcugauggu

SEQ ID NO: 31260 - RNA, 23 nt, Artificial Sequence
  Synthetic
ggcucaacacgaggcugaugguc

SEQ ID NO: 31261 - RNA, 23 nt, Artificial Sequence
  Synthetic
gcucaacacgaggcugaugguca

SEQ ID NO: 31262 - RNA, 23 nt, Artificial Sequence
  Synthetic
cucaacacgaggcugauggucaa

SEQ ID NO: 31263 - RNA, 23 nt, Artificial Sequence
  Synthetic
ucaacacgaggcugauggucaac

SEQ ID NO: 31264 - RNA, 23 nt, Artificial Sequence
  Synthetic
caacacgaggcugauggucaaca

SEQ ID NO: 31265 - RNA, 23 nt, Artificial Sequence
  Synthetic
aacacgaggcugauggucaacau

SEQ ID NO: 31266 - RNA, 23 nt, Artificial Sequence
  Synthetic
acacgaggcugauggucaacaua

SEQ ID NO: 31267 - RNA, 23 nt, Artificial Sequence
  Synthetic
cacgaggcugauggucaacauaa

SEQ ID NO: 31268 - RNA, 23 nt, Artificial Sequence
  Synthetic
acgaggcugauggucaacauaaa

SEQ ID NO: 31269 - RNA, 23 nt, Artificial Sequence
  Synthetic
cgaggcugauggucaacauaaaa

SEQ ID NO: 31270 - RNA, 23 nt, Artificial Sequence
  Synthetic
gaggcugauggucaacauaaaaa

SEQ ID NO: 31271 - RNA, 23 nt, Artificial Sequence
  Synthetic
aggcugauggucaacauaaaaag

SEQ ID NO: 31272 - RNA, 23 nt, Artificial Sequence
  Synthetic
ggcugauggucaacauaaaaagc

SEQ ID NO: 31273 - RNA, 23 nt, Artificial Sequence
  Synthetic
gcugauggucaacauaaaaagca

SEQ ID NO: 31274 - RNA, 23 nt, Artificial Sequence
  Synthetic
cugauggucaacauaaaaagcaa

SEQ ID NO: 31275 - RNA, 23 nt, Artificial Sequence
  Synthetic
ugauggucaacauaaaaagcaaa

SEQ ID NO: 31276 - RNA, 23 nt, Artificial Sequence
  Synthetic
gauggucaacauaaaaagcaaac

SEQ ID NO: 31277 - RNA, 23 nt, Artificial Sequence
  Synthetic
auggucaacauaaaaagcaaaca

SEQ ID NO: 31278 - RNA, 23 nt, Artificial Sequence
  Synthetic
uggucaacauaaaaagcaaacaa

SEQ ID NO: 31279 - RNA, 23 nt, Artificial Sequence
  Synthetic
ggucaacauaaaaagcaaacaau

SEQ ID NO: 31280 - RNA, 23 nt, Artificial Sequence
  Synthetic
gucaacauaaaaagcaaacaaua

SEQ ID NO: 31281 - RNA, 23 nt, Artificial Sequence
  Synthetic
ucaacauaaaaagcaaacaauac

SEQ ID NO: 31282 - RNA, 23 nt, Artificial Sequence
  Synthetic
caacauaaaaagcaaacaauacu

SEQ ID NO: 31283 - RNA, 23 nt, Artificial Sequence
  Synthetic
aacauaaaaagcaaacaauacua

SEQ ID NO: 31284 - RNA, 23 nt, Artificial Sequence
  Synthetic
acauaaaaagcaaacaauacuau

SEQ ID NO: 31285 - RNA, 23 nt, Artificial Sequence
  Synthetic
cauaaaaagcaaacaauacuaug

SEQ ID NO: 31286 - RNA, 23 nt, Artificial Sequence
  Synthetic
auaaaaagcaaacaauacuaugu

SEQ ID NO: 31287 - RNA, 23 nt, Artificial Sequence
  Synthetic
uaaaaagcaaacaauacuaugua

SEQ ID NO: 31288 - RNA, 23 nt, Artificial Sequence
  Synthetic
aaaaagcaaacaauacuauguac

SEQ ID NO: 31289 - RNA, 23 nt, Artificial Sequence
  Synthetic
aaaagcaaacaauacuauguaca

SEQ ID NO: 31290 - RNA, 23 nt, Artificial Sequence
  Synthetic
aaagcaaacaauacuauguacau

SEQ ID NO: 31291 - RNA, 23 nt, Artificial Sequence
  Synthetic
aagcaaacaauacuauguacaua

SEQ ID NO: 31292 - RNA, 23 nt, Artificial Sequence
  Synthetic
agcaaacaauacuauguacauau

SEQ ID NO: 31293 - RNA, 23 nt, Artificial Sequence
  Synthetic
gcaaacaauacuauguacauaua

SEQ ID NO: 31294 - RNA, 23 nt, Artificial Sequence
  Synthetic
caaacaauacuauguacauauau

SEQ ID NO: 31295 - RNA, 23 nt, Artificial Sequence
  Synthetic
aaacaauacuauguacauauaug

SEQ ID NO: 31296 - RNA, 23 nt, Artificial Sequence
  Synthetic
aacaauacuauguacauauaugu

SEQ ID NO: 31297 - RNA, 23 nt, Artificial Sequence
  Synthetic
acaauacuauguacauauaugua

SEQ ID NO: 31298 - RNA, 23 nt, Artificial Sequence
  Synthetic
caauacuauguacauauauguaa

SEQ ID NO: 31299 - RNA, 23 nt, Artificial Sequence
  Synthetic
aauacuauguacauauauguaaa

SEQ ID NO: 31300 - RNA, 23 nt, Artificial Sequence
  Synthetic
auacuauguacauauauguaaaa

SEQ ID NO: 31301 - RNA, 23 nt, Artificial Sequence
  Synthetic
uacuauguacauauauguaaaaa

SEQ ID NO: 31302 - RNA, 23 nt, Artificial Sequence
  Synthetic
acuauguacauauauguaaaaag

SEQ ID NO: 31303 - RNA, 23 nt, Artificial Sequence
  Synthetic
cuauguacauauauguaaaaagu

SEQ ID NO: 31304 - RNA, 23 nt, Artificial Sequence
  Synthetic
uauguacauauauguaaaaagug

SEQ ID NO: 31305 - RNA, 23 nt, Artificial Sequence
  Synthetic
auguacauauauguaaaaagugu

SEQ ID NO: 31306 - RNA, 23 nt, Artificial Sequence
  Synthetic
uguacauauauguaaaaaguguu

SEQ ID NO: 31307 - RNA, 23 nt, Artificial Sequence
  Synthetic
guacauauauguaaaaaguguua

SEQ ID NO: 31308 - RNA, 23 nt, Artificial Sequence
  Synthetic
uacauauauguaaaaaguguuau

SEQ ID NO: 31309 - RNA, 23 nt, Artificial Sequence
  Synthetic
acauauauguaaaaaguguuaua

SEQ ID NO: 31310 - RNA, 23 nt, Artificial Sequence
  Synthetic
cauauauguaaaaaguguuauaa

SEQ ID NO: 31311 - RNA, 23 nt, Artificial Sequence
  Synthetic
auauauguaaaaaguguuauaaa

SEQ ID NO: 31312 - RNA, 23 nt, Artificial Sequence
  Synthetic
uauauguaaaaaguguuauaaau

SEQ ID NO: 31313 - RNA, 23 nt, Artificial Sequence
  Synthetic
auauguaaaaaguguuauaaaua

SEQ ID NO: 31314 - RNA, 23 nt, Artificial Sequence
  Synthetic
uauguaaaaaguguuauaaauag

SEQ ID NO: 31315 - RNA, 23 nt, Artificial Sequence
  Synthetic
auguaaaaaguguuauaaauagg

SEQ ID NO: 31316 - RNA, 23 nt, Artificial Sequence
  Synthetic
uguaaaaaguguuauaaauaggu

SEQ ID NO: 31317 - RNA, 23 nt, Artificial Sequence
  Synthetic
guaaaaaguguuauaaauagguu

SEQ ID NO: 31318 - RNA, 23 nt, Artificial Sequence
  Synthetic
uaaaaaguguuauaaauagguuu

SEQ ID NO: 31319 - RNA, 23 nt, Artificial Sequence
  Synthetic
aaaaaguguuauaaauagguuuu

SEQ ID NO: 31320 - RNA, 23 nt, Artificial Sequence
  Synthetic
aaaaguguuauaaauagguuuua

SEQ ID NO: 31321 - RNA, 23 nt, Artificial Sequence
  Synthetic
aaaguguuauaaauagguuuuau

SEQ ID NO: 31322 - RNA, 23 nt, Artificial Sequence
  Synthetic
aaguguuauaaauagguuuuaua

SEQ ID NO: 31323 - RNA, 23 nt, Artificial Sequence
  Synthetic
aguguuauaaauagguuuuauaa

SEQ ID NO: 31324 - RNA, 23 nt, Artificial Sequence
  Synthetic
guguuauaaauagguuuuauaaa

SEQ ID NO: 31325 - RNA, 23 nt, Artificial Sequence
  Synthetic
uguuauaaauagguuuuauaaac

SEQ ID NO: 31326 - RNA, 23 nt, Artificial Sequence
  Synthetic
guuauaaauagguuuuauaaacc

SEQ ID NO: 31327 - RNA, 23 nt, Artificial Sequence
  Synthetic
uuauaaauagguuuuauaaaccg

SEQ ID NO: 31328 - RNA, 23 nt, Artificial Sequence
  Synthetic
uauaaauagguuuuauaaaccgg

SEQ ID NO: 31329 - RNA, 23 nt, Artificial Sequence
  Synthetic
auaaauagguuuuauaaaccgga

SEQ ID NO: 31330 - RNA, 23 nt, Artificial Sequence
  Synthetic
uaaauagguuuuauaaaccggag

SEQ ID NO: 31331 - RNA, 23 nt, Artificial Sequence
  Synthetic
aaauagguuuuauaaaccggaga

SEQ ID NO: 31332 - RNA, 23 nt, Artificial Sequence
  Synthetic
aauagguuuuauaaaccggagau

SEQ ID NO: 31333 - RNA, 23 nt, Artificial Sequence
  Synthetic
auagguuuuauaaaccggagaua

SEQ ID NO: 31334 - RNA, 23 nt, Artificial Sequence
  Synthetic
uagguuuuauaaaccggagauau

SEQ ID NO: 31335 - RNA, 23 nt, Artificial Sequence
  Synthetic
agguuuuauaaaccggagauauu

SEQ ID NO: 31336 - RNA, 23 nt, Artificial Sequence
  Synthetic
gguuuuauaaaccggagauauua

SEQ ID NO: 31337 - RNA, 23 nt, Artificial Sequence
  Synthetic
guuuuauaaaccggagauauuau

SEQ ID NO: 31338 - RNA, 23 nt, Artificial Sequence
  Synthetic
uuuuauaaaccggagauauuaua

SEQ ID NO: 31339 - RNA, 23 nt, Artificial Sequence
  Synthetic
uuuauaaaccggagauauuauau

SEQ ID NO: 31340 - RNA, 23 nt, Artificial Sequence
  Synthetic
uuauaaaccggagauauuauaua

SEQ ID NO: 31341 - RNA, 23 nt, Artificial Sequence
  Synthetic
uauaaaccggagauauuauauac

SEQ ID NO: 31342 - RNA, 23 nt, Artificial Sequence
  Synthetic
auaaaccggagauauuauauaca

SEQ ID NO: 31343 - RNA, 23 nt, Artificial Sequence
  Synthetic
uaaaccggagauauuauauacau

SEQ ID NO: 31344 - RNA, 23 nt, Artificial Sequence
  Synthetic
aaaccggagauauuauauacauc

SEQ ID NO: 31345 - RNA, 23 nt, Artificial Sequence
  Synthetic
aaccggagauauuauauacaucu

SEQ ID NO: 31346 - RNA, 23 nt, Artificial Sequence
  Synthetic
accggagauauuauauacaucuu

SEQ ID NO: 31347 - RNA, 23 nt, Artificial Sequence
  Synthetic
ccggagauauuauauacaucuuc

SEQ ID NO: 31348 - RNA, 23 nt, Artificial Sequence
  Synthetic
cggagauauuauauacaucuuca

SEQ ID NO: 31349 - RNA, 23 nt, Artificial Sequence
  Synthetic
ggagauauuauauacaucuucaa

SEQ ID NO: 31350 - RNA, 23 nt, Artificial Sequence
  Synthetic
gagauauuauauacaucuucaau

SEQ ID NO: 31351 - RNA, 23 nt, Artificial Sequence
  Synthetic
agauauuauauacaucuucaauc

SEQ ID NO: 31352 - RNA, 23 nt, Artificial Sequence
  Synthetic
gauauuauauacaucuucaauca

SEQ ID NO: 31353 - RNA, 23 nt, Artificial Sequence
  Synthetic
auauuauauacaucuucaaucaa

SEQ ID NO: 31354 - RNA, 23 nt, Artificial Sequence
  Synthetic
uauuauauacaucuucaaucaac

SEQ ID NO: 31355 - RNA, 23 nt, Artificial Sequence
  Synthetic
auuauauacaucuucaaucaaca

SEQ ID NO: 31356 - RNA, 23 nt, Artificial Sequence
  Synthetic
uuauauacaucuucaaucaacag

SEQ ID NO: 31357 - RNA, 23 nt, Artificial Sequence
  Synthetic
uauauacaucuucaaucaacagc

SEQ ID NO: 31358 - RNA, 23 nt, Artificial Sequence
  Synthetic
auauacaucuucaaucaacagca

SEQ ID NO: 31359 - RNA, 23 nt, Artificial Sequence
  Synthetic
uauacaucuucaaucaacagcaa

SEQ ID NO: 31360 - RNA, 23 nt, Artificial Sequence
  Synthetic
auacaucuucaaucaacagcaac

SEQ ID NO: 31361 - RNA, 23 nt, Artificial Sequence
  Synthetic
uacaucuucaaucaacagcaacc

SEQ ID NO: 31362 - RNA, 23 nt, Artificial Sequence
  Synthetic
acaucuucaaucaacagcaaccc

SEQ ID NO: 31363 - RNA, 23 nt, Artificial Sequence
  Synthetic
caucuucaaucaacagcaacccc

SEQ ID NO: 31364 - RNA, 23 nt, Artificial Sequence
  Synthetic
aucuucaaucaacagcaaccccc

SEQ ID NO: 31365 - RNA, 23 nt, Artificial Sequence
  Synthetic
ucuucaaucaacagcaaccccca

SEQ ID NO: 31366 - RNA, 23 nt, Artificial Sequence
  Synthetic
cuucaaucaacagcaacccccac

SEQ ID NO: 31367 - RNA, 23 nt, Artificial Sequence
  Synthetic
uucaaucaacagcaacccccacc

SEQ ID NO: 31368 - RNA, 23 nt, Artificial Sequence
  Synthetic
ucaaucaacagcaacccccaccu

SEQ ID NO: 31369 - RNA, 23 nt, Artificial Sequence
  Synthetic
caaucaacagcaacccccaccuc

SEQ ID NO: 31370 - RNA, 23 nt, Artificial Sequence
  Synthetic
aaucaacagcaacccccaccucc

SEQ ID NO: 31371 - RNA, 23 nt, Artificial Sequence
  Synthetic
aucaacagcaacccccaccucca

SEQ ID NO: 31372 - RNA, 23 nt, Artificial Sequence
  Synthetic
ucaacagcaacccccaccuccac

SEQ ID NO: 31373 - RNA, 23 nt, Artificial Sequence
  Synthetic
caacagcaacccccaccuccacu

SEQ ID NO: 31374 - RNA, 23 nt, Artificial Sequence
  Synthetic
aacagcaacccccaccuccacug

SEQ ID NO: 31375 - RNA, 23 nt, Artificial Sequence
  Synthetic
acagcaacccccaccuccacugc

SEQ ID NO: 31376 - RNA, 23 nt, Artificial Sequence
  Synthetic
cagcaacccccaccuccacugcu

SEQ ID NO: 31377 - RNA, 23 nt, Artificial Sequence
  Synthetic
agcaacccccaccuccacugcuu

SEQ ID NO: 31378 - RNA, 23 nt, Artificial Sequence
  Synthetic
gcaacccccaccuccacugcuuu

SEQ ID NO: 31379 - RNA, 23 nt, Artificial Sequence
  Synthetic
caacccccaccuccacugcuuuc

SEQ ID NO: 31380 - RNA, 23 nt, Artificial Sequence
  Synthetic
aacccccaccuccacugcuuucu

SEQ ID NO: 31381 - RNA, 23 nt, Artificial Sequence
  Synthetic
acccccaccuccacugcuuucug

SEQ ID NO: 31382 - RNA, 23 nt, Artificial Sequence
  Synthetic
cccccaccuccacugcuuucugu

SEQ ID NO: 31383 - RNA, 23 nt, Artificial Sequence
  Synthetic
ccccaccuccacugcuuucuguu

SEQ ID NO: 31384 - RNA, 23 nt, Artificial Sequence
  Synthetic
cccaccuccacugcuuucuguuu

SEQ ID NO: 31385 - RNA, 23 nt, Artificial Sequence
  Synthetic
ccaccuccacugcuuucuguuug

SEQ ID NO: 31386 - RNA, 23 nt, Artificial Sequence
  Synthetic
caccuccacugcuuucuguuugg

SEQ ID NO: 31387 - RNA, 23 nt, Artificial Sequence
  Synthetic
accuccacugcuuucuguuuggu

SEQ ID NO: 31388 - RNA, 23 nt, Artificial Sequence
  Synthetic
ccuccacugcuuucuguuugguu

SEQ ID NO: 31389 - RNA, 23 nt, Artificial Sequence
  Synthetic
cuccacugcuuucuguuugguuu

SEQ ID NO: 31390 - RNA, 23 nt, Artificial Sequence
  Synthetic
uccacugcuuucuguuugguuug

SEQ ID NO: 31391 - RNA, 23 nt, Artificial Sequence
  Synthetic
ccacugcuuucuguuugguuugg

SEQ ID NO: 31392 - RNA, 23 nt, Artificial Sequence
  Synthetic
cacugcuuucuguuugguuuggu

SEQ ID NO: 31393 - RNA, 23 nt, Artificial Sequence
  Synthetic
acugcuuucuguuugguuugguu

SEQ ID NO: 31394 - RNA, 23 nt, Artificial Sequence
  Synthetic
cugcuuucuguuugguuugguuu

SEQ ID NO: 31395 - RNA, 23 nt, Artificial Sequence
  Synthetic
ugcuuucuguuugguuugguuug

SEQ ID NO: 31396 - RNA, 23 nt, Artificial Sequence
  Synthetic
gcuuucuguuugguuugguuuga

SEQ ID NO: 31397 - RNA, 23 nt, Artificial Sequence
  Synthetic
cuuucuguuugguuugguuugag

SEQ ID NO: 31398 - RNA, 23 nt, Artificial Sequence
  Synthetic
uuucuguuugguuugguuugagu

SEQ ID NO: 31399 - RNA, 23 nt, Artificial Sequence
  Synthetic
uucuguuugguuugguuugaguu

SEQ ID NO: 31400 - RNA, 23 nt, Artificial Sequence
  Synthetic
ucuguuugguuugguuugaguuu

SEQ ID NO: 31401 - RNA, 23 nt, Artificial Sequence
  Synthetic
cuguuugguuugguuugaguuug

SEQ ID NO: 31402 - RNA, 23 nt, Artificial Sequence
  Synthetic
uguuugguuugguuugaguuugg

SEQ ID NO: 31403 - RNA, 23 nt, Artificial Sequence
  Synthetic
guuugguuugguuugaguuuggg

SEQ ID NO: 31404 - RNA, 23 nt, Artificial Sequence
  Synthetic
uuugguuugguuugaguuuggga

SEQ ID NO: 31405 - RNA, 23 nt, Artificial Sequence
  Synthetic
uugguuugguuugaguuugggau

SEQ ID NO: 31406 - RNA, 23 nt, Artificial Sequence
  Synthetic
ugguuugguuugaguuugggauu

SEQ ID NO: 31407 - RNA, 23 nt, Artificial Sequence
  Synthetic
gguuugguuugaguuugggauuu

SEQ ID NO: 31408 - RNA, 23 nt, Artificial Sequence
  Synthetic
guuugguuugaguuugggauuuu

SEQ ID NO: 31409 - RNA, 23 nt, Artificial Sequence
  Synthetic
uuugguuugaguuugggauuuug

SEQ ID NO: 31410 - RNA, 23 nt, Artificial Sequence
  Synthetic
uugguuugaguuugggauuuugg

SEQ ID NO: 31411 - RNA, 23 nt, Artificial Sequence
  Synthetic
ugguuugaguuugggauuuuggg

SEQ ID NO: 31412 - RNA, 23 nt, Artificial Sequence
  Synthetic
gguuugaguuugggauuuugggc

SEQ ID NO: 31413 - RNA, 23 nt, Artificial Sequence
  Synthetic
guuugaguuugggauuuugggcu

SEQ ID NO: 31414 - RNA, 23 nt, Artificial Sequence
  Synthetic
uuugaguuugggauuuugggcua

SEQ ID NO: 31415 - RNA, 23 nt, Artificial Sequence
  Synthetic
uugaguuugggauuuugggcuag

SEQ ID NO: 31416 - RNA, 23 nt, Artificial Sequence
  Synthetic
ugaguuugggauuuugggcuagc

SEQ ID NO: 31417 - RNA, 23 nt, Artificial Sequence
  Synthetic
gaguuugggauuuugggcuagcu

SEQ ID NO: 31418 - RNA, 23 nt, Artificial Sequence
  Synthetic
aguuugggauuuugggcuagcuc

SEQ ID NO: 31419 - RNA, 23 nt, Artificial Sequence
  Synthetic
guuugggauuuugggcuagcucu

SEQ ID NO: 31420 - RNA, 23 nt, Artificial Sequence
  Synthetic
uuugggauuuugggcuagcucuu

SEQ ID NO: 31421 - RNA, 23 nt, Artificial Sequence
  Synthetic
uugggauuuugggcuagcucuuu

SEQ ID NO: 31422 - RNA, 23 nt, Artificial Sequence
  Synthetic
ugggauuuugggcuagcucuuuu

SEQ ID NO: 31423 - RNA, 23 nt, Artificial Sequence
  Synthetic
gggauuuugggcuagcucuuuuu

SEQ ID NO: 31424 - RNA, 23 nt, Artificial Sequence
  Synthetic
ggauuuugggcuagcucuuuuuu

SEQ ID NO: 31425 - RNA, 23 nt, Artificial Sequence
  Synthetic
gauuuugggcuagcucuuuuuuc

SEQ ID NO: 31426 - RNA, 23 nt, Artificial Sequence
  Synthetic
auuuugggcuagcucuuuuuucu

SEQ ID NO: 31427 - RNA, 23 nt, Artificial Sequence
  Synthetic
uuuugggcuagcucuuuuuucuu

SEQ ID NO: 31428 - RNA, 23 nt, Artificial Sequence
  Synthetic
uuugggcuagcucuuuuuucuuu

SEQ ID NO: 31429 - RNA, 23 nt, Artificial Sequence
  Synthetic
uugggcuagcucuuuuuucuuug

SEQ ID NO: 31430 - RNA, 23 nt, Artificial Sequence
  Synthetic
ugggcuagcucuuuuuucuuugu

SEQ ID NO: 31431 - RNA, 23 nt, Artificial Sequence
  Synthetic
gggcuagcucuuuuuucuuuguc

SEQ ID NO: 31432 - RNA, 23 nt, Artificial Sequence
  Synthetic
ggcuagcucuuuuuucuuugucu

SEQ ID NO: 31433 - RNA, 23 nt, Artificial Sequence
  Synthetic
gcuagcucuuuuuucuuugucug

SEQ ID NO: 31434 - RNA, 23 nt, Artificial Sequence
  Synthetic
cuagcucuuuuuucuuugucugc

SEQ ID NO: 31435 - RNA, 23 nt, Artificial Sequence
  Synthetic
uagcucuuuuuucuuugucugcu

SEQ ID NO: 31436 - RNA, 23 nt, Artificial Sequence
  Synthetic
agcucuuuuuucuuugucugcuu

SEQ ID NO: 31437 - RNA, 23 nt, Artificial Sequence
  Synthetic
gcucuuuuuucuuugucugcuuu

SEQ ID NO: 31438 - RNA, 23 nt, Artificial Sequence
  Synthetic
cucuuuuuucuuugucugcuuuc

SEQ ID NO: 31439 - RNA, 23 nt, Artificial Sequence
  Synthetic
ucuuuuuucuuugucugcuuucu

SEQ ID NO: 31440 - RNA, 23 nt, Artificial Sequence
  Synthetic
cuuuuuucuuugucugcuuucug

SEQ ID NO: 31441 - RNA, 23 nt, Artificial Sequence
  Synthetic
uuuuuucuuugucugcuuucugu

SEQ ID NO: 31442 - RNA, 23 nt, Artificial Sequence
  Synthetic
uuuuucuuugucugcuuucuguu

SEQ ID NO: 31443 - RNA, 23 nt, Artificial Sequence
  Synthetic
uuuucuuugucugcuuucuguuu

SEQ ID NO: 31444 - RNA, 23 nt, Artificial Sequence
  Synthetic
uuucuuugucugcuuucuguuuu

SEQ ID NO: 31445 - RNA, 23 nt, Artificial Sequence
  Synthetic
uucuuugucugcuuucuguuuuc

SEQ ID NO: 31446 - RNA, 23 nt, Artificial Sequence
  Synthetic
ucuuugucugcuuucuguuuucc

SEQ ID NO: 31447 - RNA, 23 nt, Artificial Sequence
  Synthetic
cuuugucugcuuucuguuuuccc

SEQ ID NO: 31448 - RNA, 23 nt, Artificial Sequence
  Synthetic
uuugucugcuuucuguuuucccu

SEQ ID NO: 31449 - RNA, 23 nt, Artificial Sequence
  Synthetic
uugucugcuuucuguuuucccuu

SEQ ID NO: 31450 - RNA, 23 nt, Artificial Sequence
  Synthetic
ugucugcuuucuguuuucccuuc

SEQ ID NO: 31451 - RNA, 23 nt, Artificial Sequence
  Synthetic
gucugcuuucuguuuucccuucc

SEQ ID NO: 31452 - RNA, 23 nt, Artificial Sequence
  Synthetic
ucugcuuucuguuuucccuuccu

SEQ ID NO: 31453 - RNA, 23 nt, Artificial Sequence
  Synthetic
cugcuuucuguuuucccuuccuc

SEQ ID NO: 31454 - RNA, 23 nt, Artificial Sequence
  Synthetic
ugcuuucuguuuucccuuccucc

SEQ ID NO: 31455 - RNA, 23 nt, Artificial Sequence
  Synthetic
gcuuucuguuuucccuuccuccc

SEQ ID NO: 31456 - RNA, 23 nt, Artificial Sequence
  Synthetic
cuuucuguuuucccuuccucccu

SEQ ID NO: 31457 - RNA, 23 nt, Artificial Sequence
  Synthetic
uuucuguuuucccuuccucccuu

SEQ ID NO: 31458 - RNA, 23 nt, Artificial Sequence
  Synthetic
uucuguuuucccuuccucccuuc

SEQ ID NO: 31459 - RNA, 23 nt, Artificial Sequence
  Synthetic
ucuguuuucccuuccucccuucc

SEQ ID NO: 31460 - RNA, 23 nt, Artificial Sequence
  Synthetic
cuguuuucccuuccucccuuccc

SEQ ID NO: 31461 - RNA, 23 nt, Artificial Sequence
  Synthetic
uguuuucccuuccucccuucccu

SEQ ID NO: 31462 - RNA, 23 nt, Artificial Sequence
  Synthetic
guuuucccuuccucccuucccua

SEQ ID NO: 31463 - RNA, 23 nt, Artificial Sequence
  Synthetic
uuuucccuuccucccuucccuau

SEQ ID NO: 31464 - RNA, 23 nt, Artificial Sequence
  Synthetic
uuucccuuccucccuucccuaug

SEQ ID NO: 31465 - RNA, 23 nt, Artificial Sequence
  Synthetic
uucccuuccucccuucccuaugu

SEQ ID NO: 31466 - RNA, 23 nt, Artificial Sequence
  Synthetic
ucccuuccucccuucccuaugua

SEQ ID NO: 31467 - RNA, 23 nt, Artificial Sequence
  Synthetic
cccuuccucccuucccuauguac

SEQ ID NO: 31468 - RNA, 23 nt, Artificial Sequence
  Synthetic
ccuuccucccuucccuauguacg

SEQ ID NO: 31469 - RNA, 23 nt, Artificial Sequence
  Synthetic
cuuccucccuucccuauguacgc

SEQ ID NO: 31470 - RNA, 23 nt, Artificial Sequence
  Synthetic
uuccucccuucccuauguacgcu

SEQ ID NO: 31471 - RNA, 23 nt, Artificial Sequence
  Synthetic
uccucccuucccuauguacgcuc

SEQ ID NO: 31472 - RNA, 23 nt, Artificial Sequence
  Synthetic
ccucccuucccuauguacgcuca

SEQ ID NO: 31473 - RNA, 23 nt, Artificial Sequence
  Synthetic
cucccuucccuauguacgcucag

SEQ ID NO: 31474 - RNA, 23 nt, Artificial Sequence
  Synthetic
ucccuucccuauguacgcucaga

SEQ ID NO: 31475 - RNA, 23 nt, Artificial Sequence
  Synthetic
cccuucccuauguacgcucagag

SEQ ID NO: 31476 - RNA, 23 nt, Artificial Sequence
  Synthetic
ccuucccuauguacgcucagagc

SEQ ID NO: 31477 - RNA, 23 nt, Artificial Sequence
  Synthetic
cuucccuauguacgcucagagcc

SEQ ID NO: 31478 - RNA, 23 nt, Artificial Sequence
  Synthetic
uucccuauguacgcucagagccu

SEQ ID NO: 31479 - RNA, 23 nt, Artificial Sequence
  Synthetic
ucccuauguacgcucagagccuc

SEQ ID NO: 31480 - RNA, 23 nt, Artificial Sequence
  Synthetic
cccuauguacgcucagagccuca

SEQ ID NO: 31481 - RNA, 23 nt, Artificial Sequence
  Synthetic
ccuauguacgcucagagccucag

SEQ ID NO: 31482 - RNA, 23 nt, Artificial Sequence
  Synthetic
cuauguacgcucagagccucaga

SEQ ID NO: 31483 - RNA, 23 nt, Artificial Sequence
  Synthetic
uauguacgcucagagccucagac

SEQ ID NO: 31484 - RNA, 23 nt, Artificial Sequence
  Synthetic
auguacgcucagagccucagaca

SEQ ID NO: 31485 - RNA, 23 nt, Artificial Sequence
  Synthetic
uguacgcucagagccucagacag

SEQ ID NO: 31486 - RNA, 23 nt, Artificial Sequence
  Synthetic
guacgcucagagccucagacaga

SEQ ID NO: 31487 - RNA, 23 nt, Artificial Sequence
  Synthetic
uacgcucagagccucagacagac

SEQ ID NO: 31488 - RNA, 23 nt, Artificial Sequence
  Synthetic
acgcucagagccucagacagacc

SEQ ID NO: 31489 - RNA, 23 nt, Artificial Sequence
  Synthetic
cgcucagagccucagacagaccg

SEQ ID NO: 31490 - RNA, 23 nt, Artificial Sequence
  Synthetic
gcucagagccucagacagaccgu

SEQ ID NO: 31491 - RNA, 23 nt, Artificial Sequence
  Synthetic
cucagagccucagacagaccguc

SEQ ID NO: 31492 - RNA, 23 nt, Artificial Sequence
  Synthetic
ucagagccucagacagaccgucu

SEQ ID NO: 31493 - RNA, 23 nt, Artificial Sequence
  Synthetic
cagagccucagacagaccgucug

SEQ ID NO: 31494 - RNA, 23 nt, Artificial Sequence
  Synthetic
agagccucagacagaccgucugg

SEQ ID NO: 31495 - RNA, 23 nt, Artificial Sequence
  Synthetic
gagccucagacagaccgucuggg

SEQ ID NO: 31496 - RNA, 23 nt, Artificial Sequence
  Synthetic
agccucagacagaccgucugggc

SEQ ID NO: 31497 - RNA, 23 nt, Artificial Sequence
  Synthetic
gccucagacagaccgucugggcg

SEQ ID NO: 31498 - RNA, 23 nt, Artificial Sequence
  Synthetic
ccucagacagaccgucugggcgc

SEQ ID NO: 31499 - RNA, 23 nt, Artificial Sequence
  Synthetic
cucagacagaccgucugggcgcc

SEQ ID NO: 31500 - RNA, 23 nt, Artificial Sequence
  Synthetic
ucagacagaccgucugggcgccu

SEQ ID NO: 31501 - RNA, 23 nt, Artificial Sequence
  Synthetic
cagacagaccgucugggcgccuc

SEQ ID NO: 31502 - RNA, 23 nt, Artificial Sequence
  Synthetic
agacagaccgucugggcgccuca

SEQ ID NO: 31503 - RNA, 23 nt, Artificial Sequence
  Synthetic
gacagaccgucugggcgccucau

SEQ ID NO: 31504 - RNA, 23 nt, Artificial Sequence
  Synthetic
acagaccgucugggcgccucauu

SEQ ID NO: 31505 - RNA, 23 nt, Artificial Sequence
  Synthetic
cagaccgucugggcgccucauuc

SEQ ID NO: 31506 - RNA, 23 nt, Artificial Sequence
  Synthetic
agaccgucugggcgccucauucg

SEQ ID NO: 31507 - RNA, 23 nt, Artificial Sequence
  Synthetic
gaccgucugggcgccucauucgc

SEQ ID NO: 31508 - RNA, 23 nt, Artificial Sequence
  Synthetic
accgucugggcgccucauucgcg

SEQ ID NO: 31509 - RNA, 23 nt, Artificial Sequence
  Synthetic
ccgucugggcgccucauucgcgu

SEQ ID NO: 31510 - RNA, 23 nt, Artificial Sequence
  Synthetic
cgucugggcgccucauucgcguu

SEQ ID NO: 31511 - RNA, 23 nt, Artificial Sequence
  Synthetic
gucugggcgccucauucgcguuu

SEQ ID NO: 31512 - RNA, 23 nt, Artificial Sequence
  Synthetic
ucugggcgccucauucgcguuuc

SEQ ID NO: 31513 - RNA, 23 nt, Artificial Sequence
  Synthetic
cugggcgccucauucgcguuucc

SEQ ID NO: 31514 - RNA, 23 nt, Artificial Sequence
  Synthetic
ugggcgccucauucgcguuuccg

SEQ ID NO: 31515 - RNA, 23 nt, Artificial Sequence
  Synthetic
gggcgccucauucgcguuuccgc

SEQ ID NO: 31516 - RNA, 23 nt, Artificial Sequence
  Synthetic
ggcgccucauucgcguuuccgca

SEQ ID NO: 31517 - RNA, 23 nt, Artificial Sequence
  Synthetic
gcgccucauucgcguuuccgcaa

SEQ ID NO: 31518 - RNA, 23 nt, Artificial Sequence
  Synthetic
cgccucauucgcguuuccgcaag

SEQ ID NO: 31519 - RNA, 23 nt, Artificial Sequence
  Synthetic
gccucauucgcguuuccgcaaga

SEQ ID NO: 31520 - RNA, 23 nt, Artificial Sequence
  Synthetic
ccucauucgcguuuccgcaagau

SEQ ID NO: 31521 - RNA, 23 nt, Artificial Sequence
  Synthetic
cucauucgcguuuccgcaagauc

SEQ ID NO: 31522 - RNA, 23 nt, Artificial Sequence
  Synthetic
ucauucgcguuuccgcaagauca

SEQ ID NO: 31523 - RNA, 23 nt, Artificial Sequence
  Synthetic
cauucgcguuuccgcaagaucac

SEQ ID NO: 31524 - RNA, 23 nt, Artificial Sequence
  Synthetic
auucgcguuuccgcaagaucaca

SEQ ID NO: 31525 - RNA, 23 nt, Artificial Sequence
  Synthetic
uucgcguuuccgcaagaucacau

SEQ ID NO: 31526 - RNA, 23 nt, Artificial Sequence
  Synthetic
ucgcguuuccgcaagaucacaua

SEQ ID NO: 31527 - RNA, 23 nt, Artificial Sequence
  Synthetic
cgcguuuccgcaagaucacauag

SEQ ID NO: 31528 - RNA, 23 nt, Artificial Sequence
  Synthetic
gcguuuccgcaagaucacauaga

SEQ ID NO: 31529 - RNA, 23 nt, Artificial Sequence
  Synthetic
cguuuccgcaagaucacauagau

SEQ ID NO: 31530 - RNA, 23 nt, Artificial Sequence
  Synthetic
guuuccgcaagaucacauagaug

SEQ ID NO: 31531 - RNA, 23 nt, Artificial Sequence
  Synthetic
uuuccgcaagaucacauagauga

SEQ ID NO: 31532 - RNA, 23 nt, Artificial Sequence
  Synthetic
uuccgcaagaucacauagaugac

SEQ ID NO: 31533 - RNA, 23 nt, Artificial Sequence
  Synthetic
uccgcaagaucacauagaugaca

SEQ ID NO: 31534 - RNA, 23 nt, Artificial Sequence
  Synthetic
ccgcaagaucacauagaugacac

SEQ ID NO: 31535 - RNA, 23 nt, Artificial Sequence
  Synthetic
cgcaagaucacauagaugacacc

SEQ ID NO: 31536 - RNA, 23 nt, Artificial Sequence
  Synthetic
gcaagaucacauagaugacaccg

SEQ ID NO: 31537 - RNA, 23 nt, Artificial Sequence
  Synthetic
caagaucacauagaugacaccgc

SEQ ID NO: 31538 - RNA, 23 nt, Artificial Sequence
  Synthetic
aagaucacauagaugacaccgcu

SEQ ID NO: 31539 - RNA, 23 nt, Artificial Sequence
  Synthetic
agaucacauagaugacaccgcug

SEQ ID NO: 31540 - RNA, 23 nt, Artificial Sequence
  Synthetic
gaucacauagaugacaccgcuga

SEQ ID NO: 31541 - RNA, 23 nt, Artificial Sequence
  Synthetic
aucacauagaugacaccgcugag

SEQ ID NO: 31542 - RNA, 23 nt, Artificial Sequence
  Synthetic
ucacauagaugacaccgcugaga

SEQ ID NO: 31543 - RNA, 23 nt, Artificial Sequence
  Synthetic
cacauagaugacaccgcugagaa

SEQ ID NO: 31544 - RNA, 23 nt, Artificial Sequence
  Synthetic
acauagaugacaccgcugagaag

SEQ ID NO: 31545 - RNA, 23 nt, Artificial Sequence
  Synthetic
cauagaugacaccgcugagaagg

SEQ ID NO: 31546 - RNA, 23 nt, Artificial Sequence
  Synthetic
auagaugacaccgcugagaaggg

SEQ ID NO: 31547 - RNA, 23 nt, Artificial Sequence
  Synthetic
uagaugacaccgcugagaagggc

SEQ ID NO: 31548 - RNA, 23 nt, Artificial Sequence
  Synthetic
agaugacaccgcugagaagggcc

SEQ ID NO: 31549 - RNA, 23 nt, Artificial Sequence
  Synthetic
gaugacaccgcugagaagggcca

SEQ ID NO: 31550 - RNA, 23 nt, Artificial Sequence
  Synthetic
augacaccgcugagaagggccag

SEQ ID NO: 31551 - RNA, 23 nt, Artificial Sequence
  Synthetic
ugacaccgcugagaagggccagg

SEQ ID NO: 31552 - RNA, 23 nt, Artificial Sequence
  Synthetic
gacaccgcugagaagggccaggg

SEQ ID NO: 31553 - RNA, 23 nt, Artificial Sequence
  Synthetic
acaccgcugagaagggccagggg

SEQ ID NO: 31554 - RNA, 23 nt, Artificial Sequence
  Synthetic
caccgcugagaagggccaggggg

SEQ ID NO: 31555 - RNA, 23 nt, Artificial Sequence
  Synthetic
accgcugagaagggccaggggga

SEQ ID NO: 31556 - RNA, 23 nt, Artificial Sequence
  Synthetic
ccgcugagaagggccagggggaa

SEQ ID NO: 31557 - RNA, 23 nt, Artificial Sequence
  Synthetic
cgcugagaagggccagggggaag

SEQ ID NO: 31558 - RNA, 23 nt, Artificial Sequence
  Synthetic
gcugagaagggccagggggaagg

SEQ ID NO: 31559 - RNA, 23 nt, Artificial Sequence
  Synthetic
cugagaagggccagggggaaggc

SEQ ID NO: 31560 - RNA, 23 nt, Artificial Sequence
  Synthetic
ugagaagggccagggggaaggcc

SEQ ID NO: 31561 - RNA, 23 nt, Artificial Sequence
  Synthetic
gagaagggccagggggaaggcca

SEQ ID NO: 31562 - RNA, 23 nt, Artificial Sequence
  Synthetic
agaagggccagggggaaggccac

SEQ ID NO: 31563 - RNA, 23 nt, Artificial Sequence
  Synthetic
gaagggccagggggaaggccacc

SEQ ID NO: 31564 - RNA, 23 nt, Artificial Sequence
  Synthetic
aagggccagggggaaggccaccc

SEQ ID NO: 31565 - RNA, 23 nt, Artificial Sequence
  Synthetic
agggccagggggaaggccaccca

SEQ ID NO: 31566 - RNA, 23 nt, Artificial Sequence
  Synthetic
gggccagggggaaggccacccag

SEQ ID NO: 31567 - RNA, 23 nt, Artificial Sequence
  Synthetic
ggccagggggaaggccacccagg

SEQ ID NO: 31568 - RNA, 23 nt, Artificial Sequence
  Synthetic
gccagggggaaggccacccaggc

SEQ ID NO: 31569 - RNA, 23 nt, Artificial Sequence
  Synthetic
ccagggggaaggccacccaggcc

SEQ ID NO: 31570 - RNA, 23 nt, Artificial Sequence
  Synthetic
cagggggaaggccacccaggcca

SEQ ID NO: 31571 - RNA, 23 nt, Artificial Sequence
  Synthetic
agggggaaggccacccaggccag

SEQ ID NO: 31572 - RNA, 23 nt, Artificial Sequence
  Synthetic
gggggaaggccacccaggccagg

SEQ ID NO: 31573 - RNA, 23 nt, Artificial Sequence
  Synthetic
ggggaaggccacccaggccagga

SEQ ID NO: 31574 - RNA, 23 nt, Artificial Sequence
  Synthetic
gggaaggccacccaggccaggau

SEQ ID NO: 31575 - RNA, 23 nt, Artificial Sequence
  Synthetic
ggaaggccacccaggccaggaug

SEQ ID NO: 31576 - RNA, 23 nt, Artificial Sequence
  Synthetic
gaaggccacccaggccaggaugu

SEQ ID NO: 31577 - RNA, 23 nt, Artificial Sequence
  Synthetic
aaggccacccaggccaggaugua

SEQ ID NO: 31578 - RNA, 23 nt, Artificial Sequence
  Synthetic
aggccacccaggccaggauguag

SEQ ID NO: 31579 - RNA, 23 nt, Artificial Sequence
  Synthetic
ggccacccaggccaggauguagg

SEQ ID NO: 31580 - RNA, 23 nt, Artificial Sequence
  Synthetic
gccacccaggccaggauguaggc

SEQ ID NO: 31581 - RNA, 23 nt, Artificial Sequence
  Synthetic
ccacccaggccaggauguaggcg

SEQ ID NO: 31582 - RNA, 23 nt, Artificial Sequence
  Synthetic
cacccaggccaggauguaggcga

SEQ ID NO: 31583 - RNA, 23 nt, Artificial Sequence
  Synthetic
acccaggccaggauguaggcgaa

SEQ ID NO: 31584 - RNA, 23 nt, Artificial Sequence
  Synthetic
cccaggccaggauguaggcgaaa

SEQ ID NO: 31585 - RNA, 23 nt, Artificial Sequence
  Synthetic
ccaggccaggauguaggcgaaac

SEQ ID NO: 31586 - RNA, 23 nt, Artificial Sequence
  Synthetic
caggccaggauguaggcgaaacc

SEQ ID NO: 31587 - RNA, 23 nt, Artificial Sequence
  Synthetic
aggccaggauguaggcgaaaccg

SEQ ID NO: 31588 - RNA, 23 nt, Artificial Sequence
  Synthetic
ggccaggauguaggcgaaaccgu

SEQ ID NO: 31589 - RNA, 23 nt, Artificial Sequence
  Synthetic
gccaggauguaggcgaaaccgua

SEQ ID NO: 31590 - RNA, 23 nt, Artificial Sequence
  Synthetic
ccaggauguaggcgaaaccguag

SEQ ID NO: 31591 - RNA, 23 nt, Artificial Sequence
  Synthetic
caggauguaggcgaaaccguagg

SEQ ID NO: 31592 - RNA, 23 nt, Artificial Sequence
  Synthetic
aggauguaggcgaaaccguagga

SEQ ID NO: 31593 - RNA, 23 nt, Artificial Sequence
  Synthetic
ggauguaggcgaaaccguaggag

SEQ ID NO: 31594 - RNA, 23 nt, Artificial Sequence
  Synthetic
gauguaggcgaaaccguaggagu

SEQ ID NO: 31595 - RNA, 23 nt, Artificial Sequence
  Synthetic
auguaggcgaaaccguaggagua

SEQ ID NO: 31596 - RNA, 23 nt, Artificial Sequence
  Synthetic
uguaggcgaaaccguaggaguaa

SEQ ID NO: 31597 - RNA, 23 nt, Artificial Sequence
  Synthetic
guaggcgaaaccguaggaguaau

SEQ ID NO: 31598 - RNA, 23 nt, Artificial Sequence
  Synthetic
uaggcgaaaccguaggaguaauc

SEQ ID NO: 31599 - RNA, 23 nt, Artificial Sequence
  Synthetic
aggcgaaaccguaggaguaaucc

SEQ ID NO: 31600 - RNA, 23 nt, Artificial Sequence
  Synthetic
ggcgaaaccguaggaguaauccg

SEQ ID NO: 31601 - RNA, 23 nt, Artificial Sequence
  Synthetic
gcgaaaccguaggaguaauccga

SEQ ID NO: 31602 - RNA, 23 nt, Artificial Sequence
  Synthetic
cgaaaccguaggaguaauccgag

SEQ ID NO: 31603 - RNA, 23 nt, Artificial Sequence
  Synthetic
gaaaccguaggaguaauccgagu

SEQ ID NO: 31604 - RNA, 23 nt, Artificial Sequence
  Synthetic
aaaccguaggaguaauccgaguu

SEQ ID NO: 31605 - RNA, 23 nt, Artificial Sequence
  Synthetic
aaccguaggaguaauccgaguug

SEQ ID NO: 31606 - RNA, 23 nt, Artificial Sequence
  Synthetic
accguaggaguaauccgaguuga

SEQ ID NO: 31607 - RNA, 23 nt, Artificial Sequence
  Synthetic
ccguaggaguaauccgaguugag

SEQ ID NO: 31608 - RNA, 23 nt, Artificial Sequence
  Synthetic
cguaggaguaauccgaguugaga

SEQ ID NO: 31609 - RNA, 23 nt, Artificial Sequence
  Synthetic
guaggaguaauccgaguugagau

SEQ ID NO: 31610 - RNA, 23 nt, Artificial Sequence
  Synthetic
uaggaguaauccgaguugagaug

SEQ ID NO: 31611 - RNA, 23 nt, Artificial Sequence
  Synthetic
aggaguaauccgaguugagaugc

SEQ ID NO: 31612 - RNA, 23 nt, Artificial Sequence
  Synthetic
ggaguaauccgaguugagaugcc

SEQ ID NO: 31613 - RNA, 23 nt, Artificial Sequence
  Synthetic
gaguaauccgaguugagaugcca

SEQ ID NO: 31614 - RNA, 23 nt, Artificial Sequence
  Synthetic
aguaauccgaguugagaugccac

SEQ ID NO: 31615 - RNA, 23 nt, Artificial Sequence
  Synthetic
guaauccgaguugagaugccacu

SEQ ID NO: 31616 - RNA, 23 nt, Artificial Sequence
  Synthetic
uaauccgaguugagaugccacuc

SEQ ID NO: 31617 - RNA, 23 nt, Artificial Sequence
  Synthetic
aauccgaguugagaugccacucc

SEQ ID NO: 31618 - RNA, 23 nt, Artificial Sequence
  Synthetic
auccgaguugagaugccacuccg

SEQ ID NO: 31619 - RNA, 23 nt, Artificial Sequence
  Synthetic
uccgaguugagaugccacuccgg

SEQ ID NO: 31620 - RNA, 23 nt, Artificial Sequence
  Synthetic
ccgaguugagaugccacuccggg

SEQ ID NO: 31621 - RNA, 23 nt, Artificial Sequence
  Synthetic
cgaguugagaugccacuccgggu

SEQ ID NO: 31622 - RNA, 23 nt, Artificial Sequence
  Synthetic
gaguugagaugccacuccgggug

SEQ ID NO: 31623 - RNA, 23 nt, Artificial Sequence
  Synthetic
aguugagaugccacuccgggugc

SEQ ID NO: 31624 - RNA, 23 nt, Artificial Sequence
  Synthetic
guugagaugccacuccgggugcc

SEQ ID NO: 31625 - RNA, 23 nt, Artificial Sequence
  Synthetic
uugagaugccacuccgggugccu

SEQ ID NO: 31626 - RNA, 23 nt, Artificial Sequence
  Synthetic
ugagaugccacuccgggugccuc

SEQ ID NO: 31627 - RNA, 23 nt, Artificial Sequence
  Synthetic
gagaugccacuccgggugccuca

SEQ ID NO: 31628 - RNA, 23 nt, Artificial Sequence
  Synthetic
agaugccacuccgggugccucac

SEQ ID NO: 31629 - RNA, 23 nt, Artificial Sequence
  Synthetic
gaugccacuccgggugccucacc

SEQ ID NO: 31630 - RNA, 23 nt, Artificial Sequence
  Synthetic
augccacuccgggugccucaccg

SEQ ID NO: 31631 - RNA, 23 nt, Artificial Sequence
  Synthetic
ugccacuccgggugccucaccgu

SEQ ID NO: 31632 - RNA, 23 nt, Artificial Sequence
  Synthetic
gccacuccgggugccucaccgug

SEQ ID NO: 31633 - RNA, 23 nt, Artificial Sequence
  Synthetic
ccacuccgggugccucaccgugu

SEQ ID NO: 31634 - RNA, 23 nt, Artificial Sequence
  Synthetic
cacuccgggugccucaccgugua

SEQ ID NO: 31635 - RNA, 23 nt, Artificial Sequence
  Synthetic
acuccgggugccucaccguguag

SEQ ID NO: 31636 - RNA, 23 nt, Artificial Sequence
  Synthetic
cuccgggugccucaccguguaga

SEQ ID NO: 31637 - RNA, 23 nt, Artificial Sequence
  Synthetic
uccgggugccucaccguguagau

SEQ ID NO: 31638 - RNA, 23 nt, Artificial Sequence
  Synthetic
ccgggugccucaccguguagaug

SEQ ID NO: 31639 - RNA, 23 nt, Artificial Sequence
  Synthetic
cgggugccucaccguguagaugg

SEQ ID NO: 31640 - RNA, 23 nt, Artificial Sequence
  Synthetic
gggugccucaccguguagauggc

SEQ ID NO: 31641 - RNA, 23 nt, Artificial Sequence
  Synthetic
ggugccucaccguguagauggcc

SEQ ID NO: 31642 - RNA, 23 nt, Artificial Sequence
  Synthetic
gugccucaccguguagauggccg

SEQ ID NO: 31643 - RNA, 23 nt, Artificial Sequence
  Synthetic
ugccucaccguguagauggccgc

SEQ ID NO: 31644 - RNA, 23 nt, Artificial Sequence
  Synthetic
gccucaccguguagauggccgca

SEQ ID NO: 31645 - RNA, 23 nt, Artificial Sequence
  Synthetic
ccucaccguguagauggccgcag

SEQ ID NO: 31646 - RNA, 23 nt, Artificial Sequence
  Synthetic
cucaccguguagauggccgcagc

SEQ ID NO: 31647 - RNA, 23 nt, Artificial Sequence
  Synthetic
ucaccguguagauggccgcagca

SEQ ID NO: 31648 - RNA, 23 nt, Artificial Sequence
  Synthetic
caccguguagauggccgcagcac

SEQ ID NO: 31649 - RNA, 23 nt, Artificial Sequence
  Synthetic
accguguagauggccgcagcacu

SEQ ID NO: 31650 - RNA, 23 nt, Artificial Sequence
  Synthetic
ccguguagauggccgcagcacuc

SEQ ID NO: 31651 - RNA, 23 nt, Artificial Sequence
  Synthetic
cguguagauggccgcagcacuca

SEQ ID NO: 31652 - RNA, 23 nt, Artificial Sequence
  Synthetic
guguagauggccgcagcacucau

SEQ ID NO: 31653 - RNA, 23 nt, Artificial Sequence
  Synthetic
uguagauggccgcagcacucauc

SEQ ID NO: 31654 - RNA, 23 nt, Artificial Sequence
  Synthetic
guagauggccgcagcacucauca

SEQ ID NO: 31655 - RNA, 23 nt, Artificial Sequence
  Synthetic
uagauggccgcagcacucaucac

SEQ ID NO: 31656 - RNA, 23 nt, Artificial Sequence
  Synthetic
agauggccgcagcacucaucacg

SEQ ID NO: 31657 - RNA, 23 nt, Artificial Sequence
  Synthetic
gauggccgcagcacucaucacgc

SEQ ID NO: 31658 - RNA, 23 nt, Artificial Sequence
  Synthetic
auggccgcagcacucaucacgca

SEQ ID NO: 31659 - RNA, 23 nt, Artificial Sequence
  Synthetic
uggccgcagcacucaucacgcac

SEQ ID NO: 31660 - RNA, 23 nt, Artificial Sequence
  Synthetic
ggccgcagcacucaucacgcaca

SEQ ID NO: 31661 - RNA, 23 nt, Artificial Sequence
  Synthetic
gccgcagcacucaucacgcacag

SEQ ID NO: 31662 - RNA, 23 nt, Artificial Sequence
  Synthetic
ccgcagcacucaucacgcacaga

SEQ ID NO: 31663 - RNA, 23 nt, Artificial Sequence
  Synthetic
cgcagcacucaucacgcacagac

SEQ ID NO: 31664 - RNA, 23 nt, Artificial Sequence
  Synthetic
gcagcacucaucacgcacagacc

SEQ ID NO: 31665 - RNA, 23 nt, Artificial Sequence
  Synthetic
cagcacucaucacgcacagacca

SEQ ID NO: 31666 - RNA, 23 nt, Artificial Sequence
  Synthetic
agcacucaucacgcacagaccag

SEQ ID NO: 31667 - RNA, 23 nt, Artificial Sequence
  Synthetic
gcacucaucacgcacagaccagc

SEQ ID NO: 31668 - RNA, 23 nt, Artificial Sequence
  Synthetic
cacucaucacgcacagaccagca

SEQ ID NO: 31669 - RNA, 23 nt, Artificial Sequence
  Synthetic
acucaucacgcacagaccagcaa

SEQ ID NO: 31670 - RNA, 23 nt, Artificial Sequence
  Synthetic
cucaucacgcacagaccagcaag

SEQ ID NO: 31671 - RNA, 23 nt, Artificial Sequence
  Synthetic
ucaucacgcacagaccagcaaga

SEQ ID NO: 31672 - RNA, 23 nt, Artificial Sequence
  Synthetic
caucacgcacagaccagcaagaa

SEQ ID NO: 31673 - RNA, 23 nt, Artificial Sequence
  Synthetic
aucacgcacagaccagcaagaau

SEQ ID NO: 31674 - RNA, 23 nt, Artificial Sequence
  Synthetic
ucacgcacagaccagcaagaauu

SEQ ID NO: 31675 - RNA, 23 nt, Artificial Sequence
  Synthetic
cacgcacagaccagcaagaauuu

SEQ ID NO: 31676 - RNA, 23 nt, Artificial Sequence
  Synthetic
acgcacagaccagcaagaauuug

SEQ ID NO: 31677 - RNA, 23 nt, Artificial Sequence
  Synthetic
cgcacagaccagcaagaauuugg

SEQ ID NO: 31678 - RNA, 23 nt, Artificial Sequence
  Synthetic
gcacagaccagcaagaauuugga

SEQ ID NO: 31679 - RNA, 23 nt, Artificial Sequence
  Synthetic
cacagaccagcaagaauuuggaa

SEQ ID NO: 31680 - RNA, 23 nt, Artificial Sequence
  Synthetic
acagaccagcaagaauuuggaag

SEQ ID NO: 31681 - RNA, 23 nt, Artificial Sequence
  Synthetic
cagaccagcaagaauuuggaaga

SEQ ID NO: 31682 - RNA, 23 nt, Artificial Sequence
  Synthetic
agaccagcaagaauuuggaagau

SEQ ID NO: 31683 - RNA, 23 nt, Artificial Sequence
  Synthetic
gaccagcaagaauuuggaagauu

SEQ ID NO: 31684 - RNA, 23 nt, Artificial Sequence
  Synthetic
accagcaagaauuuggaagauuc

SEQ ID NO: 31685 - RNA, 23 nt, Artificial Sequence
  Synthetic
ccagcaagaauuuggaagauucc

SEQ ID NO: 31686 - RNA, 23 nt, Artificial Sequence
  Synthetic
cagcaagaauuuggaagauucca

SEQ ID NO: 31687 - RNA, 23 nt, Artificial Sequence
  Synthetic
agcaagaauuuggaagauuccag

SEQ ID NO: 31688 - RNA, 23 nt, Artificial Sequence
  Synthetic
gcaagaauuuggaagauuccagu

SEQ ID NO: 31689 - RNA, 23 nt, Artificial Sequence
  Synthetic
caagaauuuggaagauuccagug

SEQ ID NO: 31690 - RNA, 23 nt, Artificial Sequence
  Synthetic
aagaauuuggaagauuccaguga

SEQ ID NO: 31691 - RNA, 23 nt, Artificial Sequence
  Synthetic
agaauuuggaagauuccagugau

SEQ ID NO: 31692 - RNA, 23 nt, Artificial Sequence
  Synthetic
gaauuuggaagauuccagugaug

SEQ ID NO: 31693 - RNA, 23 nt, Artificial Sequence
  Synthetic
aauuuggaagauuccagugaugu

SEQ ID NO: 31694 - RNA, 23 nt, Artificial Sequence
  Synthetic
auuuggaagauuccagugaugua

SEQ ID NO: 31695 - RNA, 23 nt, Artificial Sequence
  Synthetic
uuuggaagauuccagugauguaa

SEQ ID NO: 31696 - RNA, 23 nt, Artificial Sequence
  Synthetic
uuggaagauuccagugauguaaa

SEQ ID NO: 31697 - RNA, 23 nt, Artificial Sequence
  Synthetic
uggaagauuccagugauguaaaa

SEQ ID NO: 31698 - RNA, 23 nt, Artificial Sequence
  Synthetic
ggaagauuccagugauguaaaac

SEQ ID NO: 31699 - RNA, 23 nt, Artificial Sequence
  Synthetic
gaagauuccagugauguaaaacc

SEQ ID NO: 31700 - RNA, 23 nt, Artificial Sequence
  Synthetic
aagauuccagugauguaaaaccu

SEQ ID NO: 31701 - RNA, 23 nt, Artificial Sequence
  Synthetic
agauuccagugauguaaaaccug

SEQ ID NO: 31702 - RNA, 23 nt, Artificial Sequence
  Synthetic
gauuccagugauguaaaaccugc

SEQ ID NO: 31703 - RNA, 23 nt, Artificial Sequence
  Synthetic
auuccagugauguaaaaccugcc

SEQ ID NO: 31704 - RNA, 23 nt, Artificial Sequence
  Synthetic
uuccagugauguaaaaccugccc

SEQ ID NO: 31705 - RNA, 23 nt, Artificial Sequence
  Synthetic
uccagugauguaaaaccugcccc

SEQ ID NO: 31706 - RNA, 23 nt, Artificial Sequence
  Synthetic
ccagugauguaaaaccugccccc

SEQ ID NO: 31707 - RNA, 23 nt, Artificial Sequence
  Synthetic
cagugauguaaaaccugcccccc

SEQ ID NO: 31708 - RNA, 23 nt, Artificial Sequence
  Synthetic
agugauguaaaaccugccccccu

SEQ ID NO: 31709 - RNA, 23 nt, Artificial Sequence
  Synthetic
gugauguaaaaccugccccccuu

SEQ ID NO: 31710 - RNA, 23 nt, Artificial Sequence
  Synthetic
ugauguaaaaccugccccccuug

SEQ ID NO: 31711 - RNA, 23 nt, Artificial Sequence
  Synthetic
gauguaaaaccugccccccuugg

SEQ ID NO: 31712 - RNA, 23 nt, Artificial Sequence
  Synthetic
auguaaaaccugccccccuuggu

SEQ ID NO: 31713 - RNA, 23 nt, Artificial Sequence
  Synthetic
uguaaaaccugccccccuuggug

SEQ ID NO: 31714 - RNA, 23 nt, Artificial Sequence
  Synthetic
guaaaaccugccccccuugguga

SEQ ID NO: 31715 - RNA, 23 nt, Artificial Sequence
  Synthetic
uaaaaccugccccccuuggugag

SEQ ID NO: 31716 - RNA, 23 nt, Artificial Sequence
  Synthetic
aaaaccugccccccuuggugagg

SEQ ID NO: 31717 - RNA, 23 nt, Artificial Sequence
  Synthetic
aaaccugccccccuuggugaggg

SEQ ID NO: 31718 - RNA, 23 nt, Artificial Sequence
  Synthetic
aaccugccccccuuggugagggu

SEQ ID NO: 31719 - RNA, 23 nt, Artificial Sequence
  Synthetic
accugccccccuuggugagggug

SEQ ID NO: 31720 - RNA, 23 nt, Artificial Sequence
  Synthetic
ccugccccccuuggugaggguga

SEQ ID NO: 31721 - RNA, 23 nt, Artificial Sequence
  Synthetic
cugccccccuuggugagggugaa

SEQ ID NO: 31722 - RNA, 23 nt, Artificial Sequence
  Synthetic
ugccccccuuggugagggugaag

SEQ ID NO: 31723 - RNA, 23 nt, Artificial Sequence
  Synthetic
gccccccuuggugagggugaaga

SEQ ID NO: 31724 - RNA, 23 nt, Artificial Sequence
  Synthetic
ccccccuuggugagggugaagag

SEQ ID NO: 31725 - RNA, 23 nt, Artificial Sequence
  Synthetic
cccccuuggugagggugaagagu

SEQ ID NO: 31726 - RNA, 23 nt, Artificial Sequence
  Synthetic
ccccuuggugagggugaagaguu

SEQ ID NO: 31727 - RNA, 23 nt, Artificial Sequence
  Synthetic
cccuuggugagggugaagaguug

SEQ ID NO: 31728 - RNA, 23 nt, Artificial Sequence
  Synthetic
ccuuggugagggugaagaguugg

SEQ ID NO: 31729 - RNA, 23 nt, Artificial Sequence
  Synthetic
cuuggugagggugaagaguuggc

SEQ ID NO: 31730 - RNA, 23 nt, Artificial Sequence
  Synthetic
uuggugagggugaagaguuggca

SEQ ID NO: 31731 - RNA, 23 nt, Artificial Sequence
  Synthetic
uggugagggugaagaguuggcag

SEQ ID NO: 31732 - RNA, 23 nt, Artificial Sequence
  Synthetic
ggugagggugaagaguuggcaga

SEQ ID NO: 31733 - RNA, 23 nt, Artificial Sequence
  Synthetic
gugagggugaagaguuggcagaa

SEQ ID NO: 31734 - RNA, 23 nt, Artificial Sequence
  Synthetic
ugagggugaagaguuggcagaag

SEQ ID NO: 31735 - RNA, 23 nt, Artificial Sequence
  Synthetic
gagggugaagaguuggcagaaga

SEQ ID NO: 31736 - RNA, 23 nt, Artificial Sequence
  Synthetic
agggugaagaguuggcagaagaa

SEQ ID NO: 31737 - RNA, 23 nt, Artificial Sequence
  Synthetic
gggugaagaguuggcagaagaac

SEQ ID NO: 31738 - RNA, 23 nt, Artificial Sequence
  Synthetic
ggugaagaguuggcagaagaaca

SEQ ID NO: 31739 - RNA, 23 nt, Artificial Sequence
  Synthetic
gugaagaguuggcagaagaacag

SEQ ID NO: 31740 - RNA, 23 nt, Artificial Sequence
  Synthetic
ugaagaguuggcagaagaacagg

SEQ ID NO: 31741 - RNA, 23 nt, Artificial Sequence
  Synthetic
gaagaguuggcagaagaacagga

SEQ ID NO: 31742 - RNA, 23 nt, Artificial Sequence
  Synthetic
aagaguuggcagaagaacaggaa

SEQ ID NO: 31743 - RNA, 23 nt, Artificial Sequence
  Synthetic
agaguuggcagaagaacaggaac

SEQ ID NO: 31744 - RNA, 23 nt, Artificial Sequence
  Synthetic
gaguuggcagaagaacaggaaca

SEQ ID NO: 31745 - RNA, 23 nt, Artificial Sequence
  Synthetic
aguuggcagaagaacaggaacag

SEQ ID NO: 31746 - RNA, 23 nt, Artificial Sequence
  Synthetic
guuggcagaagaacaggaacaga

SEQ ID NO: 31747 - RNA, 23 nt, Artificial Sequence
  Synthetic
uuggcagaagaacaggaacagag

SEQ ID NO: 31748 - RNA, 23 nt, Artificial Sequence
  Synthetic
uggcagaagaacaggaacagaga

SEQ ID NO: 31749 - RNA, 23 nt, Artificial Sequence
  Synthetic
ggcagaagaacaggaacagagac

SEQ ID NO: 31750 - RNA, 23 nt, Artificial Sequence
  Synthetic
gcagaagaacaggaacagagaca

SEQ ID NO: 31751 - RNA, 23 nt, Artificial Sequence
  Synthetic
cagaagaacaggaacagagacag

SEQ ID NO: 31752 - RNA, 23 nt, Artificial Sequence
  Synthetic
agaagaacaggaacagagacaga

SEQ ID NO: 31753 - RNA, 23 nt, Artificial Sequence
  Synthetic
gaagaacaggaacagagacagaa

SEQ ID NO: 31754 - RNA, 23 nt, Artificial Sequence
  Synthetic
aagaacaggaacagagacagaau

SEQ ID NO: 31755 - RNA, 23 nt, Artificial Sequence
  Synthetic
agaacaggaacagagacagaaug

SEQ ID NO: 31756 - RNA, 23 nt, Artificial Sequence
  Synthetic
gaacaggaacagagacagaaugc

SEQ ID NO: 31757 - RNA, 23 nt, Artificial Sequence
  Synthetic
aacaggaacagagacagaaugcu

SEQ ID NO: 31758 - RNA, 23 nt, Artificial Sequence
  Synthetic
acaggaacagagacagaaugcug

SEQ ID NO: 31759 - RNA, 23 nt, Artificial Sequence
  Synthetic
caggaacagagacagaaugcuga

SEQ ID NO: 31760 - RNA, 23 nt, Artificial Sequence
  Synthetic
aggaacagagacagaaugcugaa

SEQ ID NO: 31761 - RNA, 23 nt, Artificial Sequence
  Synthetic
ggaacagagacagaaugcugaag

SEQ ID NO: 31762 - RNA, 23 nt, Artificial Sequence
  Synthetic
gaacagagacagaaugcugaaga

SEQ ID NO: 31763 - RNA, 23 nt, Artificial Sequence
  Synthetic
aacagagacagaaugcugaagau

SEQ ID NO: 31764 - RNA, 23 nt, Artificial Sequence
  Synthetic
acagagacagaaugcugaagaug

SEQ ID NO: 31765 - RNA, 23 nt, Artificial Sequence
  Synthetic
cagagacagaaugcugaagauga

SEQ ID NO: 31766 - RNA, 23 nt, Artificial Sequence
  Synthetic
agagacagaaugcugaagaugau

SEQ ID NO: 31767 - RNA, 23 nt, Artificial Sequence
  Synthetic
gagacagaaugcugaagaugauc

SEQ ID NO: 31768 - RNA, 23 nt, Artificial Sequence
  Synthetic
agacagaaugcugaagaugaucg

SEQ ID NO: 31769 - RNA, 23 nt, Artificial Sequence
  Synthetic
gacagaaugcugaagaugaucga

SEQ ID NO: 31770 - RNA, 23 nt, Artificial Sequence
  Synthetic
acagaaugcugaagaugaucgac

SEQ ID NO: 31771 - RNA, 23 nt, Artificial Sequence
  Synthetic
cagaaugcugaagaugaucgaca

SEQ ID NO: 31772 - RNA, 23 nt, Artificial Sequence
  Synthetic
agaaugcugaagaugaucgacag

SEQ ID NO: 31773 - RNA, 23 nt, Artificial Sequence
  Synthetic
gaaugcugaagaugaucgacagg

SEQ ID NO: 31774 - RNA, 23 nt, Artificial Sequence
  Synthetic
aaugcugaagaugaucgacagga

SEQ ID NO: 31775 - RNA, 23 nt, Artificial Sequence
  Synthetic
augcugaagaugaucgacaggau

SEQ ID NO: 31776 - RNA, 23 nt, Artificial Sequence
  Synthetic
ugcugaagaugaucgacaggauc

SEQ ID NO: 31777 - RNA, 23 nt, Artificial Sequence
  Synthetic
gcugaagaugaucgacaggauca

SEQ ID NO: 31778 - RNA, 23 nt, Artificial Sequence
  Synthetic
cugaagaugaucgacaggaucau

SEQ ID NO: 31779 - RNA, 23 nt, Artificial Sequence
  Synthetic
ugaagaugaucgacaggaucaug

SEQ ID NO: 31780 - RNA, 23 nt, Artificial Sequence
  Synthetic
gaagaugaucgacaggaucaugg

SEQ ID NO: 31781 - RNA, 23 nt, Artificial Sequence
  Synthetic
aagaugaucgacaggaucauggu

SEQ ID NO: 31782 - RNA, 23 nt, Artificial Sequence
  Synthetic
agaugaucgacaggaucauggug

SEQ ID NO: 31783 - RNA, 23 nt, Artificial Sequence
  Synthetic
gaugaucgacaggaucauggugg

SEQ ID NO: 31784 - RNA, 23 nt, Artificial Sequence
  Synthetic
augaucgacaggaucaugguggc

SEQ ID NO: 31785 - RNA, 23 nt, Artificial Sequence
  Synthetic
ugaucgacaggaucaugguggcc

SEQ ID NO: 31786 - RNA, 23 nt, Artificial Sequence
  Synthetic
gaucgacaggaucaugguggccu

SEQ ID NO: 31787 - RNA, 23 nt, Artificial Sequence
  Synthetic
aucgacaggaucaugguggccug

SEQ ID NO: 31788 - RNA, 23 nt, Artificial Sequence
  Synthetic
ucgacaggaucaugguggccugg

SEQ ID NO: 31789 - RNA, 23 nt, Artificial Sequence
  Synthetic
cgacaggaucaugguggccugga

SEQ ID NO: 31790 - RNA, 23 nt, Artificial Sequence
  Synthetic
gacaggaucaugguggccuggac

SEQ ID NO: 31791 - RNA, 23 nt, Artificial Sequence
  Synthetic
acaggaucaugguggccuggaca

SEQ ID NO: 31792 - RNA, 23 nt, Artificial Sequence
  Synthetic
caggaucaugguggccuggacag

SEQ ID NO: 31793 - RNA, 23 nt, Artificial Sequence
  Synthetic
aggaucaugguggccuggacaga

SEQ ID NO: 31794 - RNA, 23 nt, Artificial Sequence
  Synthetic
ggaucaugguggccuggacagac

SEQ ID NO: 31795 - RNA, 23 nt, Artificial Sequence
  Synthetic
gaucaugguggccuggacagacu

SEQ ID NO: 31796 - RNA, 23 nt, Artificial Sequence
  Synthetic
aucaugguggccuggacagacug

SEQ ID NO: 31797 - RNA, 23 nt, Artificial Sequence
  Synthetic
ucaugguggccuggacagacugc

SEQ ID NO: 31798 - RNA, 23 nt, Artificial Sequence
  Synthetic
caugguggccuggacagacugca

SEQ ID NO: 31799 - RNA, 23 nt, Artificial Sequence
  Synthetic
augguggccuggacagacugcag

SEQ ID NO: 31800 - RNA, 23 nt, Artificial Sequence
  Synthetic
ugguggccuggacagacugcagc

SEQ ID NO: 31801 - RNA, 23 nt, Artificial Sequence
  Synthetic
gguggccuggacagacugcagcc

SEQ ID NO: 31802 - RNA, 23 nt, Artificial Sequence
  Synthetic
guggccuggacagacugcagcca

SEQ ID NO: 31803 - RNA, 23 nt, Artificial Sequence
  Synthetic
uggccuggacagacugcagccau

SEQ ID NO: 31804 - RNA, 23 nt, Artificial Sequence
  Synthetic
ggccuggacagacugcagccauu

SEQ ID NO: 31805 - RNA, 23 nt, Artificial Sequence
  Synthetic
gccuggacagacugcagccauuc

SEQ ID NO: 31806 - RNA, 23 nt, Artificial Sequence
  Synthetic
ccuggacagacugcagccauucg

SEQ ID NO: 31807 - RNA, 23 nt, Artificial Sequence
  Synthetic
cuggacagacugcagccauucgu

SEQ ID NO: 31808 - RNA, 23 nt, Artificial Sequence
  Synthetic
uggacagacugcagccauucguu

SEQ ID NO: 31809 - RNA, 23 nt, Artificial Sequence
  Synthetic
ggacagacugcagccauucguuu

SEQ ID NO: 31810 - RNA, 23 nt, Artificial Sequence
  Synthetic
gacagacugcagccauucguuug

SEQ ID NO: 31811 - RNA, 23 nt, Artificial Sequence
  Synthetic
acagacugcagccauucguuugg

SEQ ID NO: 31812 - RNA, 23 nt, Artificial Sequence
  Synthetic
cagacugcagccauucguuuggu

SEQ ID NO: 31813 - RNA, 23 nt, Artificial Sequence
  Synthetic
agacugcagccauucguuuggug

SEQ ID NO: 31814 - RNA, 23 nt, Artificial Sequence
  Synthetic
gacugcagccauucguuugguga

SEQ ID NO: 31815 - RNA, 23 nt, Artificial Sequence
  Synthetic
acugcagccauucguuuggugau

SEQ ID NO: 31816 - RNA, 23 nt, Artificial Sequence
  Synthetic
cugcagccauucguuuggugaug

SEQ ID NO: 31817 - RNA, 23 nt, Artificial Sequence
  Synthetic
ugcagccauucguuuggugauga

SEQ ID NO: 31818 - RNA, 23 nt, Artificial Sequence
  Synthetic
gcagccauucguuuggugaugau

SEQ ID NO: 31819 - RNA, 23 nt, Artificial Sequence
  Synthetic
cagccauucguuuggugaugaug

SEQ ID NO: 31820 - RNA, 23 nt, Artificial Sequence
  Synthetic
agccauucguuuggugaugauga

SEQ ID NO: 31821 - RNA, 23 nt, Artificial Sequence
  Synthetic
gccauucguuuggugaugaugag

SEQ ID NO: 31822 - RNA, 23 nt, Artificial Sequence
  Synthetic
ccauucguuuggugaugaugaga

SEQ ID NO: 31823 - RNA, 23 nt, Artificial Sequence
  Synthetic
cauucguuuggugaugaugagaa

SEQ ID NO: 31824 - RNA, 23 nt, Artificial Sequence
  Synthetic
auucguuuggugaugaugagaaa

SEQ ID NO: 31825 - RNA, 23 nt, Artificial Sequence
  Synthetic
uucguuuggugaugaugagaaac

SEQ ID NO: 31826 - RNA, 23 nt, Artificial Sequence
  Synthetic
ucguuuggugaugaugagaaaca

SEQ ID NO: 31827 - RNA, 23 nt, Artificial Sequence
  Synthetic
cguuuggugaugaugagaaacag

SEQ ID NO: 31828 - RNA, 23 nt, Artificial Sequence
  Synthetic
guuuggugaugaugagaaacagu

SEQ ID NO: 31829 - RNA, 23 nt, Artificial Sequence
  Synthetic
uuuggugaugaugagaaacagug

SEQ ID NO: 31830 - RNA, 23 nt, Artificial Sequence
  Synthetic
uuggugaugaugagaaacagugg

SEQ ID NO: 31831 - RNA, 23 nt, Artificial Sequence
  Synthetic
uggugaugaugagaaacaguggu

SEQ ID NO: 31832 - RNA, 23 nt, Artificial Sequence
  Synthetic
ggugaugaugagaaacaguggug

SEQ ID NO: 31833 - RNA, 23 nt, Artificial Sequence
  Synthetic
gugaugaugagaaacaguggugg

SEQ ID NO: 31834 - RNA, 23 nt, Artificial Sequence
  Synthetic
ugaugaugagaaacaguggugga

SEQ ID NO: 31835 - RNA, 23 nt, Artificial Sequence
  Synthetic
gaugaugagaaacagugguggac

SEQ ID NO: 31836 - RNA, 23 nt, Artificial Sequence
  Synthetic
augaugagaaacagugguggaca

SEQ ID NO: 31837 - RNA, 23 nt, Artificial Sequence
  Synthetic
ugaugagaaacagugguggacau

SEQ ID NO: 31838 - RNA, 23 nt, Artificial Sequence
  Synthetic
gaugagaaacagugguggacauu

SEQ ID NO: 31839 - RNA, 23 nt, Artificial Sequence
  Synthetic
augagaaacagugguggacauuu

SEQ ID NO: 31840 - RNA, 23 nt, Artificial Sequence
  Synthetic
ugagaaacagugguggacauuuc

SEQ ID NO: 31841 - RNA, 23 nt, Artificial Sequence
  Synthetic
gagaaacagugguggacauuucc

SEQ ID NO: 31842 - RNA, 23 nt, Artificial Sequence
  Synthetic
agaaacagugguggacauuuccu

SEQ ID NO: 31843 - RNA, 23 nt, Artificial Sequence
  Synthetic
gaaacagugguggacauuuccug

SEQ ID NO: 31844 - RNA, 23 nt, Artificial Sequence
  Synthetic
aaacagugguggacauuuccuga

SEQ ID NO: 31845 - RNA, 23 nt, Artificial Sequence
  Synthetic
aacagugguggacauuuccugag

SEQ ID NO: 31846 - RNA, 23 nt, Artificial Sequence
  Synthetic
acagugguggacauuuccugagg

SEQ ID NO: 31847 - RNA, 23 nt, Artificial Sequence
  Synthetic
cagugguggacauuuccugagga

SEQ ID NO: 31848 - RNA, 23 nt, Artificial Sequence
  Synthetic
agugguggacauuuccugaggaa

SEQ ID NO: 31849 - RNA, 23 nt, Artificial Sequence
  Synthetic
gugguggacauuuccugaggaag

SEQ ID NO: 31850 - RNA, 23 nt, Artificial Sequence
  Synthetic
ugguggacauuuccugaggaaga

SEQ ID NO: 31851 - RNA, 23 nt, Artificial Sequence
  Synthetic
gguggacauuuccugaggaagag

SEQ ID NO: 31852 - RNA, 23 nt, Artificial Sequence
  Synthetic
guggacauuuccugaggaagagg

SEQ ID NO: 31853 - RNA, 23 nt, Artificial Sequence
  Synthetic
uggacauuuccugaggaagaggu

SEQ ID NO: 31854 - RNA, 23 nt, Artificial Sequence
  Synthetic
ggacauuuccugaggaagaggug

SEQ ID NO: 31855 - RNA, 23 nt, Artificial Sequence
  Synthetic
gacauuuccugaggaagaggugc

SEQ ID NO: 31856 - RNA, 23 nt, Artificial Sequence
  Synthetic
acauuuccugaggaagaggugcu

SEQ ID NO: 31857 - RNA, 23 nt, Artificial Sequence
  Synthetic
cauuuccugaggaagaggugcua

SEQ ID NO: 31858 - RNA, 23 nt, Artificial Sequence
  Synthetic
auuuccugaggaagaggugcuac

SEQ ID NO: 31859 - RNA, 23 nt, Artificial Sequence
  Synthetic
uuuccugaggaagaggugcuaca

SEQ ID NO: 31860 - RNA, 23 nt, Artificial Sequence
  Synthetic
uuccugaggaagaggugcuacag

SEQ ID NO: 31861 - RNA, 23 nt, Artificial Sequence
  Synthetic
uccugaggaagaggugcuacagu

SEQ ID NO: 31862 - RNA, 23 nt, Artificial Sequence
  Synthetic
ccugaggaagaggugcuacaguu

SEQ ID NO: 31863 - RNA, 23 nt, Artificial Sequence
  Synthetic
cugaggaagaggugcuacaguuc

SEQ ID NO: 31864 - RNA, 23 nt, Artificial Sequence
  Synthetic
ugaggaagaggugcuacaguucu

SEQ ID NO: 31865 - RNA, 23 nt, Artificial Sequence
  Synthetic
gaggaagaggugcuacaguucug

SEQ ID NO: 31866 - RNA, 23 nt, Artificial Sequence
  Synthetic
aggaagaggugcuacaguucugc

SEQ ID NO: 31867 - RNA, 23 nt, Artificial Sequence
  Synthetic
ggaagaggugcuacaguucugcc

SEQ ID NO: 31868 - RNA, 23 nt, Artificial Sequence
  Synthetic
gaagaggugcuacaguucugcca

SEQ ID NO: 31869 - RNA, 23 nt, Artificial Sequence
  Synthetic
aagaggugcuacaguucugccag

SEQ ID NO: 31870 - RNA, 23 nt, Artificial Sequence
  Synthetic
agaggugcuacaguucugccaga

SEQ ID NO: 31871 - RNA, 23 nt, Artificial Sequence
  Synthetic
gaggugcuacaguucugccagag

SEQ ID NO: 31872 - RNA, 23 nt, Artificial Sequence
  Synthetic
aggugcuacaguucugccagaga

SEQ ID NO: 31873 - RNA, 23 nt, Artificial Sequence
  Synthetic
ggugcuacaguucugccagagau

SEQ ID NO: 31874 - RNA, 23 nt, Artificial Sequence
  Synthetic
gugcuacaguucugccagagauc

SEQ ID NO: 31875 - RNA, 23 nt, Artificial Sequence
  Synthetic
ugcuacaguucugccagagauca

SEQ ID NO: 31876 - RNA, 23 nt, Artificial Sequence
  Synthetic
gcuacaguucugccagagaucag

SEQ ID NO: 31877 - RNA, 23 nt, Artificial Sequence
  Synthetic
cuacaguucugccagagaucagu

SEQ ID NO: 31878 - RNA, 23 nt, Artificial Sequence
  Synthetic
uacaguucugccagagaucaguu

SEQ ID NO: 31879 - RNA, 23 nt, Artificial Sequence
  Synthetic
acaguucugccagagaucaguug

SEQ ID NO: 31880 - RNA, 23 nt, Artificial Sequence
  Synthetic
caguucugccagagaucaguugc

SEQ ID NO: 31881 - RNA, 23 nt, Artificial Sequence
  Synthetic
aguucugccagagaucaguugcg

SEQ ID NO: 31882 - RNA, 23 nt, Artificial Sequence
  Synthetic
guucugccagagaucaguugcgu

SEQ ID NO: 31883 - RNA, 23 nt, Artificial Sequence
  Synthetic
uucugccagagaucaguugcgug

SEQ ID NO: 31884 - RNA, 23 nt, Artificial Sequence
  Synthetic
ucugccagagaucaguugcgugu

SEQ ID NO: 31885 - RNA, 23 nt, Artificial Sequence
  Synthetic
cugccagagaucaguugcguguc

SEQ ID NO: 31886 - RNA, 23 nt, Artificial Sequence
  Synthetic
ugccagagaucaguugcgugucc

SEQ ID NO: 31887 - RNA, 23 nt, Artificial Sequence
  Synthetic
gccagagaucaguugcgugucca

SEQ ID NO: 31888 - RNA, 23 nt, Artificial Sequence
  Synthetic
ccagagaucaguugcguguccau

SEQ ID NO: 31889 - RNA, 23 nt, Artificial Sequence
  Synthetic
cagagaucaguugcguguccauu

SEQ ID NO: 31890 - RNA, 23 nt, Artificial Sequence
  Synthetic
agagaucaguugcguguccauug

SEQ ID NO: 31891 - RNA, 23 nt, Artificial Sequence
  Synthetic
gagaucaguugcguguccauugc

SEQ ID NO: 31892 - RNA, 23 nt, Artificial Sequence
  Synthetic
agaucaguugcguguccauugcc

SEQ ID NO: 31893 - RNA, 23 nt, Artificial Sequence
  Synthetic
gaucaguugcguguccauugccc

SEQ ID NO: 31894 - RNA, 23 nt, Artificial Sequence
  Synthetic
aucaguugcguguccauugccca

SEQ ID NO: 31895 - RNA, 23 nt, Artificial Sequence
  Synthetic
ucaguugcguguccauugcccac

SEQ ID NO: 31896 - RNA, 23 nt, Artificial Sequence
  Synthetic
caguugcguguccauugcccacg

SEQ ID NO: 31897 - RNA, 23 nt, Artificial Sequence
  Synthetic
aguugcguguccauugcccacga

SEQ ID NO: 31898 - RNA, 23 nt, Artificial Sequence
  Synthetic
guugcguguccauugcccacgau

SEQ ID NO: 31899 - RNA, 23 nt, Artificial Sequence
  Synthetic
uugcguguccauugcccacgauc

SEQ ID NO: 31900 - RNA, 23 nt, Artificial Sequence
  Synthetic
ugcguguccauugcccacgaucc

SEQ ID NO: 31901 - RNA, 23 nt, Artificial Sequence
  Synthetic
gcguguccauugcccacgaucca

SEQ ID NO: 31902 - RNA, 23 nt, Artificial Sequence
  Synthetic
cguguccauugcccacgauccau

SEQ ID NO: 31903 - RNA, 23 nt, Artificial Sequence
  Synthetic
guguccauugcccacgauccauu

SEQ ID NO: 31904 - RNA, 23 nt, Artificial Sequence
  Synthetic
uguccauugcccacgauccauug

SEQ ID NO: 31905 - RNA, 23 nt, Artificial Sequence
  Synthetic
guccauugcccacgauccauugg

SEQ ID NO: 31906 - RNA, 23 nt, Artificial Sequence
  Synthetic
uccauugcccacgauccauuggc

SEQ ID NO: 31907 - RNA, 23 nt, Artificial Sequence
  Synthetic
ccauugcccacgauccauuggcu

SEQ ID NO: 31908 - RNA, 23 nt, Artificial Sequence
  Synthetic
cauugcccacgauccauuggcug

SEQ ID NO: 31909 - RNA, 23 nt, Artificial Sequence
  Synthetic
auugcccacgauccauuggcuga

SEQ ID NO: 31910 - RNA, 23 nt, Artificial Sequence
  Synthetic
uugcccacgauccauuggcugac

SEQ ID NO: 31911 - RNA, 23 nt, Artificial Sequence
  Synthetic
ugcccacgauccauuggcugacg

SEQ ID NO: 31912 - RNA, 23 nt, Artificial Sequence
  Synthetic
gcccacgauccauuggcugacga

SEQ ID NO: 31913 - RNA, 23 nt, Artificial Sequence
  Synthetic
cccacgauccauuggcugacgau

SEQ ID NO: 31914 - RNA, 23 nt, Artificial Sequence
  Synthetic
ccacgauccauuggcugacgauc

SEQ ID NO: 31915 - RNA, 23 nt, Artificial Sequence
  Synthetic
cacgauccauuggcugacgaucg

SEQ ID NO: 31916 - RNA, 23 nt, Artificial Sequence
  Synthetic
acgauccauuggcugacgaucgu

SEQ ID NO: 31917 - RNA, 23 nt, Artificial Sequence
  Synthetic
cgauccauuggcugacgaucgug

SEQ ID NO: 31918 - RNA, 23 nt, Artificial Sequence
  Synthetic
gauccauuggcugacgaucgugg

SEQ ID NO: 31919 - RNA, 23 nt, Artificial Sequence
  Synthetic
auccauuggcugacgaucgugga

SEQ ID NO: 31920 - RNA, 23 nt, Artificial Sequence
  Synthetic
uccauuggcugacgaucguggag

SEQ ID NO: 31921 - RNA, 23 nt, Artificial Sequence
  Synthetic
ccauuggcugacgaucguggaga

SEQ ID NO: 31922 - RNA, 23 nt, Artificial Sequence
  Synthetic
cauuggcugacgaucguggagac

SEQ ID NO: 31923 - RNA, 23 nt, Artificial Sequence
  Synthetic
auuggcugacgaucguggagacg

SEQ ID NO: 31924 - RNA, 23 nt, Artificial Sequence
  Synthetic
uuggcugacgaucguggagacga

SEQ ID NO: 31925 - RNA, 23 nt, Artificial Sequence
  Synthetic
uggcugacgaucguggagacgaa

SEQ ID NO: 31926 - RNA, 23 nt, Artificial Sequence
  Synthetic
ggcugacgaucguggagacgaac

SEQ ID NO: 31927 - RNA, 23 nt, Artificial Sequence
  Synthetic
gcugacgaucguggagacgaaca

SEQ ID NO: 31928 - RNA, 23 nt, Artificial Sequence
  Synthetic
cugacgaucguggagacgaacag

SEQ ID NO: 31929 - RNA, 23 nt, Artificial Sequence
  Synthetic
ugacgaucguggagacgaacagc

SEQ ID NO: 31930 - RNA, 23 nt, Artificial Sequence
  Synthetic
gacgaucguggagacgaacagca

SEQ ID NO: 31931 - RNA, 23 nt, Artificial Sequence
  Synthetic
acgaucguggagacgaacagcag

SEQ ID NO: 31932 - RNA, 23 nt, Artificial Sequence
  Synthetic
cgaucguggagacgaacagcagc

SEQ ID NO: 31933 - RNA, 23 nt, Artificial Sequence
  Synthetic
gaucguggagacgaacagcagca

SEQ ID NO: 31934 - RNA, 23 nt, Artificial Sequence
  Synthetic
aucguggagacgaacagcagcac

SEQ ID NO: 31935 - RNA, 23 nt, Artificial Sequence
  Synthetic
ucguggagacgaacagcagcacc

SEQ ID NO: 31936 - RNA, 23 nt, Artificial Sequence
  Synthetic
cguggagacgaacagcagcacca

SEQ ID NO: 31937 - RNA, 23 nt, Artificial Sequence
  Synthetic
guggagacgaacagcagcaccag

SEQ ID NO: 31938 - RNA, 23 nt, Artificial Sequence
  Synthetic
uggagacgaacagcagcaccagc

SEQ ID NO: 31939 - RNA, 23 nt, Artificial Sequence
  Synthetic
ggagacgaacagcagcaccagca

SEQ ID NO: 31940 - RNA, 23 nt, Artificial Sequence
  Synthetic
gagacgaacagcagcaccagcac

SEQ ID NO: 31941 - RNA, 23 nt, Artificial Sequence
  Synthetic
agacgaacagcagcaccagcacc

SEQ ID NO: 31942 - RNA, 23 nt, Artificial Sequence
  Synthetic
gacgaacagcagcaccagcaccg

SEQ ID NO: 31943 - RNA, 23 nt, Artificial Sequence
  Synthetic
acgaacagcagcaccagcaccgc

SEQ ID NO: 31944 - RNA, 23 nt, Artificial Sequence
  Synthetic
cgaacagcagcaccagcaccgcg

SEQ ID NO: 31945 - RNA, 23 nt, Artificial Sequence
  Synthetic
gaacagcagcaccagcaccgcga

SEQ ID NO: 31946 - RNA, 23 nt, Artificial Sequence
  Synthetic
aacagcagcaccagcaccgcgac

SEQ ID NO: 31947 - RNA, 23 nt, Artificial Sequence
  Synthetic
acagcagcaccagcaccgcgacg

SEQ ID NO: 31948 - RNA, 23 nt, Artificial Sequence
  Synthetic
cagcagcaccagcaccgcgacgu

SEQ ID NO: 31949 - RNA, 23 nt, Artificial Sequence
  Synthetic
agcagcaccagcaccgcgacgug

SEQ ID NO: 31950 - RNA, 23 nt, Artificial Sequence
  Synthetic
gcagcaccagcaccgcgacgugg

SEQ ID NO: 31951 - RNA, 23 nt, Artificial Sequence
  Synthetic
cagcaccagcaccgcgacgugga

SEQ ID NO: 31952 - RNA, 23 nt, Artificial Sequence
  Synthetic
agcaccagcaccgcgacguggag

SEQ ID NO: 31953 - RNA, 23 nt, Artificial Sequence
  Synthetic
gcaccagcaccgcgacguggagg

SEQ ID NO: 31954 - RNA, 23 nt, Artificial Sequence
  Synthetic
caccagcaccgcgacguggagga

SEQ ID NO: 31955 - RNA, 23 nt, Artificial Sequence
  Synthetic
accagcaccgcgacguggaggac

SEQ ID NO: 31956 - RNA, 23 nt, Artificial Sequence
  Synthetic
ccagcaccgcgacguggaggacg

SEQ ID NO: 31957 - RNA, 23 nt, Artificial Sequence
  Synthetic
cagcaccgcgacguggaggacga

SEQ ID NO: 31958 - RNA, 23 nt, Artificial Sequence
  Synthetic
agcaccgcgacguggaggacgau

SEQ ID NO: 31959 - RNA, 23 nt, Artificial Sequence
  Synthetic
gcaccgcgacguggaggacgaug

SEQ ID NO: 31960 - RNA, 23 nt, Artificial Sequence
  Synthetic
caccgcgacguggaggacgauga

SEQ ID NO: 31961 - RNA, 23 nt, Artificial Sequence
  Synthetic
accgcgacguggaggacgaugau

SEQ ID NO: 31962 - RNA, 23 nt, Artificial Sequence
  Synthetic
ccgcgacguggaggacgaugaua

SEQ ID NO: 31963 - RNA, 23 nt, Artificial Sequence
  Synthetic
cgcgacguggaggacgaugauac

SEQ ID NO: 31964 - RNA, 23 nt, Artificial Sequence
  Synthetic
gcgacguggaggacgaugauacu

SEQ ID NO: 31965 - RNA, 23 nt, Artificial Sequence
  Synthetic
cgacguggaggacgaugauacuc

SEQ ID NO: 31966 - RNA, 23 nt, Artificial Sequence
  Synthetic
gacguggaggacgaugauacuca

SEQ ID NO: 31967 - RNA, 23 nt, Artificial Sequence
  Synthetic
acguggaggacgaugauacucag

SEQ ID NO: 31968 - RNA, 23 nt, Artificial Sequence
  Synthetic
cguggaggacgaugauacucagc

SEQ ID NO: 31969 - RNA, 23 nt, Artificial Sequence
  Synthetic
guggaggacgaugauacucagca

SEQ ID NO: 31970 - RNA, 23 nt, Artificial Sequence
  Synthetic
uggaggacgaugauacucagcaa

SEQ ID NO: 31971 - RNA, 23 nt, Artificial Sequence
  Synthetic
ggaggacgaugauacucagcaac

SEQ ID NO: 31972 - RNA, 23 nt, Artificial Sequence
  Synthetic
gaggacgaugauacucagcaaca

SEQ ID NO: 31973 - RNA, 23 nt, Artificial Sequence
  Synthetic
aggacgaugauacucagcaacag

SEQ ID NO: 31974 - RNA, 23 nt, Artificial Sequence
  Synthetic
ggacgaugauacucagcaacagg

SEQ ID NO: 31975 - RNA, 23 nt, Artificial Sequence
  Synthetic
gacgaugauacucagcaacagga

SEQ ID NO: 31976 - RNA, 23 nt, Artificial Sequence
  Synthetic
acgaugauacucagcaacaggag

SEQ ID NO: 31977 - RNA, 23 nt, Artificial Sequence
  Synthetic
cgaugauacucagcaacaggagg

SEQ ID NO: 31978 - RNA, 23 nt, Artificial Sequence
  Synthetic
gaugauacucagcaacaggagga

SEQ ID NO: 31979 - RNA, 23 nt, Artificial Sequence
  Synthetic
augauacucagcaacaggaggag

SEQ ID NO: 31980 - RNA, 23 nt, Artificial Sequence
  Synthetic
ugauacucagcaacaggaggagc

SEQ ID NO: 31981 - RNA, 23 nt, Artificial Sequence
  Synthetic
gauacucagcaacaggaggagca

SEQ ID NO: 31982 - RNA, 23 nt, Artificial Sequence
  Synthetic
auacucagcaacaggaggagcau

SEQ ID NO: 31983 - RNA, 23 nt, Artificial Sequence
  Synthetic
uacucagcaacaggaggagcauu

SEQ ID NO: 31984 - RNA, 23 nt, Artificial Sequence
  Synthetic
acucagcaacaggaggagcauuc

SEQ ID NO: 31985 - RNA, 23 nt, Artificial Sequence
  Synthetic
cucagcaacaggaggagcauucu

SEQ ID NO: 31986 - RNA, 23 nt, Artificial Sequence
  Synthetic
ucagcaacaggaggagcauucug

SEQ ID NO: 31987 - RNA, 23 nt, Artificial Sequence
  Synthetic
cagcaacaggaggagcauucugg

SEQ ID NO: 31988 - RNA, 23 nt, Artificial Sequence
  Synthetic
agcaacaggaggagcauucuggc

SEQ ID NO: 31989 - RNA, 23 nt, Artificial Sequence
  Synthetic
gcaacaggaggagcauucuggcg

SEQ ID NO: 31990 - RNA, 23 nt, Artificial Sequence
  Synthetic
caacaggaggagcauucuggcgg

SEQ ID NO: 31991 - RNA, 23 nt, Artificial Sequence
  Synthetic
aacaggaggagcauucuggcggc

SEQ ID NO: 31992 - RNA, 23 nt, Artificial Sequence
  Synthetic
acaggaggagcauucuggcggca

SEQ ID NO: 31993 - RNA, 23 nt, Artificial Sequence
  Synthetic
caggaggagcauucuggcggcaa

SEQ ID NO: 31994 - RNA, 23 nt, Artificial Sequence
  Synthetic
aggaggagcauucuggcggcaag

SEQ ID NO: 31995 - RNA, 23 nt, Artificial Sequence
  Synthetic
ggaggagcauucuggcggcaagu

SEQ ID NO: 31996 - RNA, 23 nt, Artificial Sequence
  Synthetic
gaggagcauucuggcggcaaguu

SEQ ID NO: 31997 - RNA, 23 nt, Artificial Sequence
  Synthetic
aggagcauucuggcggcaaguuc

SEQ ID NO: 31998 - RNA, 23 nt, Artificial Sequence
  Synthetic
ggagcauucuggcggcaaguucu

SEQ ID NO: 31999 - RNA, 23 nt, Artificial Sequence
  Synthetic
gagcauucuggcggcaaguucug

SEQ ID NO: 32000 - RNA, 23 nt, Artificial Sequence
  Synthetic
agcauucuggcggcaaguucugc

SEQ ID NO: 32001 - RNA, 23 nt, Artificial Sequence
  Synthetic
gcauucuggcggcaaguucugcu

SEQ ID NO: 32002 - RNA, 23 nt, Artificial Sequence
  Synthetic
cauucuggcggcaaguucugcuc

SEQ ID NO: 32003 - RNA, 23 nt, Artificial Sequence
  Synthetic
auucuggcggcaaguucugcuca

SEQ ID NO: 32004 - RNA, 23 nt, Artificial Sequence
  Synthetic
uucuggcggcaaguucugcucag

SEQ ID NO: 32005 - RNA, 23 nt, Artificial Sequence
  Synthetic
ucuggcggcaaguucugcucagc

SEQ ID NO: 32006 - RNA, 23 nt, Artificial Sequence
  Synthetic
cuggcggcaaguucugcucagcg

SEQ ID NO: 32007 - RNA, 23 nt, Artificial Sequence
  Synthetic
uggcggcaaguucugcucagcgg

SEQ ID NO: 32008 - RNA, 23 nt, Artificial Sequence
  Synthetic
ggcggcaaguucugcucagcgga

SEQ ID NO: 32009 - RNA, 23 nt, Artificial Sequence
  Synthetic
gcggcaaguucugcucagcggag

SEQ ID NO: 32010 - RNA, 23 nt, Artificial Sequence
  Synthetic
cggcaaguucugcucagcggagu

SEQ ID NO: 32011 - RNA, 23 nt, Artificial Sequence
  Synthetic
ggcaaguucugcucagcggaguu

SEQ ID NO: 32012 - RNA, 23 nt, Artificial Sequence
  Synthetic
gcaaguucugcucagcggaguuu

SEQ ID NO: 32013 - RNA, 23 nt, Artificial Sequence
  Synthetic
caaguucugcucagcggaguuuc

SEQ ID NO: 32014 - RNA, 23 nt, Artificial Sequence
  Synthetic
aaguucugcucagcggaguuucu

SEQ ID NO: 32015 - RNA, 23 nt, Artificial Sequence
  Synthetic
aguucugcucagcggaguuucug

SEQ ID NO: 32016 - RNA, 23 nt, Artificial Sequence
  Synthetic
guucugcucagcggaguuucugc

SEQ ID NO: 32017 - RNA, 23 nt, Artificial Sequence
  Synthetic
uucugcucagcggaguuucugca

SEQ ID NO: 32018 - RNA, 23 nt, Artificial Sequence
  Synthetic
ucugcucagcggaguuucugcag

SEQ ID NO: 32019 - RNA, 23 nt, Artificial Sequence
  Synthetic
cugcucagcggaguuucugcagc

SEQ ID NO: 32020 - RNA, 23 nt, Artificial Sequence
  Synthetic
ugcucagcggaguuucugcagcc

SEQ ID NO: 32021 - RNA, 23 nt, Artificial Sequence
  Synthetic
gcucagcggaguuucugcagccc

SEQ ID NO: 32022 - RNA, 23 nt, Artificial Sequence
  Synthetic
cucagcggaguuucugcagccca

SEQ ID NO: 32023 - RNA, 23 nt, Artificial Sequence
  Synthetic
ucagcggaguuucugcagcccaa

SEQ ID NO: 32024 - RNA, 23 nt, Artificial Sequence
  Synthetic
cagcggaguuucugcagcccaaa

SEQ ID NO: 32025 - RNA, 23 nt, Artificial Sequence
  Synthetic
agcggaguuucugcagcccaaag

SEQ ID NO: 32026 - RNA, 23 nt, Artificial Sequence
  Synthetic
gcggaguuucugcagcccaaagg

SEQ ID NO: 32027 - RNA, 23 nt, Artificial Sequence
  Synthetic
cggaguuucugcagcccaaagga

SEQ ID NO: 32028 - RNA, 23 nt, Artificial Sequence
  Synthetic
ggaguuucugcagcccaaaggaa

SEQ ID NO: 32029 - RNA, 23 nt, Artificial Sequence
  Synthetic
gaguuucugcagcccaaaggaac

SEQ ID NO: 32030 - RNA, 23 nt, Artificial Sequence
  Synthetic
aguuucugcagcccaaaggaaca

SEQ ID NO: 32031 - RNA, 23 nt, Artificial Sequence
  Synthetic
guuucugcagcccaaaggaacag

SEQ ID NO: 32032 - RNA, 23 nt, Artificial Sequence
  Synthetic
uuucugcagcccaaaggaacagc

SEQ ID NO: 32033 - RNA, 23 nt, Artificial Sequence
  Synthetic
uucugcagcccaaaggaacagcu

SEQ ID NO: 32034 - RNA, 23 nt, Artificial Sequence
  Synthetic
ucugcagcccaaaggaacagcug

SEQ ID NO: 32035 - RNA, 23 nt, Artificial Sequence
  Synthetic
cugcagcccaaaggaacagcugu

SEQ ID NO: 32036 - RNA, 23 nt, Artificial Sequence
  Synthetic
ugcagcccaaaggaacagcuguc

SEQ ID NO: 32037 - RNA, 23 nt, Artificial Sequence
  Synthetic
gcagcccaaaggaacagcugucc

SEQ ID NO: 32038 - RNA, 23 nt, Artificial Sequence
  Synthetic
cagcccaaaggaacagcuguccc

SEQ ID NO: 32039 - RNA, 23 nt, Artificial Sequence
  Synthetic
agcccaaaggaacagcugucccg

SEQ ID NO: 32040 - RNA, 23 nt, Artificial Sequence
  Synthetic
gcccaaaggaacagcugucccga

SEQ ID NO: 32041 - RNA, 23 nt, Artificial Sequence
  Synthetic
cccaaaggaacagcugucccgau

SEQ ID NO: 32042 - RNA, 23 nt, Artificial Sequence
  Synthetic
ccaaaggaacagcugucccgauc

SEQ ID NO: 32043 - RNA, 23 nt, Artificial Sequence
  Synthetic
caaaggaacagcugucccgaucc

SEQ ID NO: 32044 - RNA, 23 nt, Artificial Sequence
  Synthetic
aaaggaacagcugucccgauccu

SEQ ID NO: 32045 - RNA, 23 nt, Artificial Sequence
  Synthetic
aaggaacagcugucccgauccuc

SEQ ID NO: 32046 - RNA, 23 nt, Artificial Sequence
  Synthetic
aggaacagcugucccgauccuca

SEQ ID NO: 32047 - RNA, 23 nt, Artificial Sequence
  Synthetic
ggaacagcugucccgauccucag

SEQ ID NO: 32048 - RNA, 23 nt, Artificial Sequence
  Synthetic
gaacagcugucccgauccucagg

SEQ ID NO: 32049 - RNA, 23 nt, Artificial Sequence
  Synthetic
aacagcugucccgauccucaggg

SEQ ID NO: 32050 - RNA, 23 nt, Artificial Sequence
  Synthetic
acagcugucccgauccucagggu

SEQ ID NO: 32051 - RNA, 23 nt, Artificial Sequence
  Synthetic
cagcugucccgauccucagggug

SEQ ID NO: 32052 - RNA, 23 nt, Artificial Sequence
  Synthetic
agcugucccgauccucagggugg

SEQ ID NO: 32053 - RNA, 23 nt, Artificial Sequence
  Synthetic
gcugucccgauccucaggguggc

SEQ ID NO: 32054 - RNA, 23 nt, Artificial Sequence
  Synthetic
cugucccgauccucaggguggcc

SEQ ID NO: 32055 - RNA, 23 nt, Artificial Sequence
  Synthetic
ugucccgauccucaggguggccu

SEQ ID NO: 32056 - RNA, 23 nt, Artificial Sequence
  Synthetic
gucccgauccucaggguggccuc

SEQ ID NO: 32057 - RNA, 23 nt, Artificial Sequence
  Synthetic
ucccgauccucaggguggccuca

SEQ ID NO: 32058 - RNA, 23 nt, Artificial Sequence
  Synthetic
cccgauccucaggguggccucaa

SEQ ID NO: 32059 - RNA, 23 nt, Artificial Sequence
  Synthetic
ccgauccucaggguggccucaaa

SEQ ID NO: 32060 - RNA, 23 nt, Artificial Sequence
  Synthetic
cgauccucaggguggccucaaac

SEQ ID NO: 32061 - RNA, 23 nt, Artificial Sequence
  Synthetic
gauccucaggguggccucaaaca

SEQ ID NO: 32062 - RNA, 23 nt, Artificial Sequence
  Synthetic
auccucaggguggccucaaacac

SEQ ID NO: 32063 - RNA, 23 nt, Artificial Sequence
  Synthetic
uccucaggguggccucaaacaca

SEQ ID NO: 32064 - RNA, 23 nt, Artificial Sequence
  Synthetic
ccucaggguggccucaaacacaa

SEQ ID NO: 32065 - RNA, 23 nt, Artificial Sequence
  Synthetic
cucaggguggccucaaacacaaa

SEQ ID NO: 32066 - RNA, 23 nt, Artificial Sequence
  Synthetic
ucaggguggccucaaacacaaac

SEQ ID NO: 32067 - RNA, 23 nt, Artificial Sequence
  Synthetic
caggguggccucaaacacaaacu

SEQ ID NO: 32068 - RNA, 23 nt, Artificial Sequence
  Synthetic
aggguggccucaaacacaaacuc

SEQ ID NO: 32069 - RNA, 23 nt, Artificial Sequence
  Synthetic
ggguggccucaaacacaaacucg

SEQ ID NO: 32070 - RNA, 23 nt, Artificial Sequence
  Synthetic
gguggccucaaacacaaacucgg

SEQ ID NO: 32071 - RNA, 23 nt, Artificial Sequence
  Synthetic
guggccucaaacacaaacucggg

SEQ ID NO: 32072 - RNA, 23 nt, Artificial Sequence
  Synthetic
uggccucaaacacaaacucgggu

SEQ ID NO: 32073 - RNA, 23 nt, Artificial Sequence
  Synthetic
ggccucaaacacaaacucgggug

SEQ ID NO: 32074 - RNA, 23 nt, Artificial Sequence
  Synthetic
gccucaaacacaaacucgggugc

SEQ ID NO: 32075 - RNA, 23 nt, Artificial Sequence
  Synthetic
ccucaaacacaaacucgggugcg

SEQ ID NO: 32076 - RNA, 23 nt, Artificial Sequence
  Synthetic
cucaaacacaaacucgggugcgu

SEQ ID NO: 32077 - RNA, 23 nt, Artificial Sequence
  Synthetic
ucaaacacaaacucgggugcguu

SEQ ID NO: 32078 - RNA, 23 nt, Artificial Sequence
  Synthetic
caaacacaaacucgggugcguug

SEQ ID NO: 32079 - RNA, 23 nt, Artificial Sequence
  Synthetic
aaacacaaacucgggugcguugg

SEQ ID NO: 32080 - RNA, 23 nt, Artificial Sequence
  Synthetic
aacacaaacucgggugcguuggc

SEQ ID NO: 32081 - RNA, 23 nt, Artificial Sequence
  Synthetic
acacaaacucgggugcguuggcu

SEQ ID NO: 32082 - RNA, 23 nt, Artificial Sequence
  Synthetic
cacaaacucgggugcguuggcuc

SEQ ID NO: 32083 - RNA, 23 nt, Artificial Sequence
  Synthetic
acaaacucgggugcguuggcucc

SEQ ID NO: 32084 - RNA, 23 nt, Artificial Sequence
  Synthetic
caaacucgggugcguuggcuccg

SEQ ID NO: 32085 - RNA, 23 nt, Artificial Sequence
  Synthetic
aaacucgggugcguuggcuccgc

SEQ ID NO: 32086 - RNA, 23 nt, Artificial Sequence
  Synthetic
aacucgggugcguuggcuccgcu

SEQ ID NO: 32087 - RNA, 23 nt, Artificial Sequence
  Synthetic
acucgggugcguuggcuccgcug

SEQ ID NO: 32088 - RNA, 23 nt, Artificial Sequence
  Synthetic
cucgggugcguuggcuccgcugc

SEQ ID NO: 32089 - RNA, 23 nt, Artificial Sequence
  Synthetic
ucgggugcguuggcuccgcugcu

SEQ ID NO: 32090 - RNA, 23 nt, Artificial Sequence
  Synthetic
cgggugcguuggcuccgcugcug

SEQ ID NO: 32091 - RNA, 23 nt, Artificial Sequence
  Synthetic
gggugcguuggcuccgcugcugg

SEQ ID NO: 32092 - RNA, 23 nt, Artificial Sequence
  Synthetic
ggugcguuggcuccgcugcuggc

SEQ ID NO: 32093 - RNA, 23 nt, Artificial Sequence
  Synthetic
gugcguuggcuccgcugcuggcg

SEQ ID NO: 32094 - RNA, 23 nt, Artificial Sequence
  Synthetic
ugcguuggcuccgcugcuggcgc

SEQ ID NO: 32095 - RNA, 23 nt, Artificial Sequence
  Synthetic
gcguuggcuccgcugcuggcgcc

SEQ ID NO: 32096 - RNA, 23 nt, Artificial Sequence
  Synthetic
cguuggcuccgcugcuggcgccg

SEQ ID NO: 32097 - RNA, 23 nt, Artificial Sequence
  Synthetic
guuggcuccgcugcuggcgccgc

SEQ ID NO: 32098 - RNA, 23 nt, Artificial Sequence
  Synthetic
uuggcuccgcugcuggcgccgcc

SEQ ID NO: 32099 - RNA, 23 nt, Artificial Sequence
  Synthetic
uggcuccgcugcuggcgccgcca

SEQ ID NO: 32100 - RNA, 23 nt, Artificial Sequence
  Synthetic
ggcuccgcugcuggcgccgccaa

SEQ ID NO: 32101 - RNA, 23 nt, Artificial Sequence
  Synthetic
gcuccgcugcuggcgccgccaaa

SEQ ID NO: 32102 - RNA, 23 nt, Artificial Sequence
  Synthetic
cuccgcugcuggcgccgccaaag

SEQ ID NO: 32103 - RNA, 23 nt, Artificial Sequence
  Synthetic
uccgcugcuggcgccgccaaagc

SEQ ID NO: 32104 - RNA, 23 nt, Artificial Sequence
  Synthetic
ccgcugcuggcgccgccaaagcu

SEQ ID NO: 32105 - RNA, 23 nt, Artificial Sequence
  Synthetic
cgcugcuggcgccgccaaagcug

SEQ ID NO: 32106 - RNA, 23 nt, Artificial Sequence
  Synthetic
gcugcuggcgccgccaaagcugc

SEQ ID NO: 32107 - RNA, 23 nt, Artificial Sequence
  Synthetic
cugcuggcgccgccaaagcugcg

SEQ ID NO: 32108 - RNA, 23 nt, Artificial Sequence
  Synthetic
ugcuggcgccgccaaagcugcgc

SEQ ID NO: 32109 - RNA, 23 nt, Artificial Sequence
  Synthetic
gcuggcgccgccaaagcugcgcu

SEQ ID NO: 32110 - RNA, 23 nt, Artificial Sequence
  Synthetic
cuggcgccgccaaagcugcgcug

SEQ ID NO: 32111 - RNA, 23 nt, Artificial Sequence
  Synthetic
uggcgccgccaaagcugcgcugc

SEQ ID NO: 32112 - RNA, 23 nt, Artificial Sequence
  Synthetic
ggcgccgccaaagcugcgcugcg

SEQ ID NO: 32113 - RNA, 23 nt, Artificial Sequence
  Synthetic
gcgccgccaaagcugcgcugcgg

SEQ ID NO: 32114 - RNA, 23 nt, Artificial Sequence
  Synthetic
cgccgccaaagcugcgcugcggg

SEQ ID NO: 32115 - RNA, 23 nt, Artificial Sequence
  Synthetic
gccgccaaagcugcgcugcgggg

SEQ ID NO: 32116 - RNA, 23 nt, Artificial Sequence
  Synthetic
ccgccaaagcugcgcugcggggc

SEQ ID NO: 32117 - RNA, 23 nt, Artificial Sequence
  Synthetic
cgccaaagcugcgcugcggggcu

SEQ ID NO: 32118 - RNA, 23 nt, Artificial Sequence
  Synthetic
gccaaagcugcgcugcggggcug

SEQ ID NO: 32119 - RNA, 23 nt, Artificial Sequence
  Synthetic
ccaaagcugcgcugcggggcugc

SEQ ID NO: 32120 - RNA, 23 nt, Artificial Sequence
  Synthetic
caaagcugcgcugcggggcugcg

SEQ ID NO: 32121 - RNA, 23 nt, Artificial Sequence
  Synthetic
aaagcugcgcugcggggcugcgc

SEQ ID NO: 32122 - RNA, 23 nt, Artificial Sequence
  Synthetic
aagcugcgcugcggggcugcgcg

SEQ ID NO: 32123 - RNA, 23 nt, Artificial Sequence
  Synthetic
agcugcgcugcggggcugcgcgc

SEQ ID NO: 32124 - RNA, 23 nt, Artificial Sequence
  Synthetic
gcugcgcugcggggcugcgcgcg

SEQ ID NO: 32125 - RNA, 23 nt, Artificial Sequence
  Synthetic
cugcgcugcggggcugcgcgcgc

SEQ ID NO: 32126 - RNA, 23 nt, Artificial Sequence
  Synthetic
ugcgcugcggggcugcgcgcgcg

SEQ ID NO: 32127 - RNA, 23 nt, Artificial Sequence
  Synthetic
gcgcugcggggcugcgcgcgcgc

SEQ ID NO: 32128 - RNA, 23 nt, Artificial Sequence
  Synthetic
cgcugcggggcugcgcgcgcgcg

SEQ ID NO: 32129 - RNA, 23 nt, Artificial Sequence
  Synthetic
gcugcggggcugcgcgcgcgcga

SEQ ID NO: 32130 - RNA, 23 nt, Artificial Sequence
  Synthetic
cugcggggcugcgcgcgcgcgaa

SEQ ID NO: 32131 - RNA, 23 nt, Artificial Sequence
  Synthetic
ugcggggcugcgcgcgcgcgaag

SEQ ID NO: 32132 - RNA, 23 nt, Artificial Sequence
  Synthetic
gcggggcugcgcgcgcgcgaagc

SEQ ID NO: 32133 - RNA, 23 nt, Artificial Sequence
  Synthetic
cggggcugcgcgcgcgcgaagca

SEQ ID NO: 32134 - RNA, 23 nt, Artificial Sequence
  Synthetic
ggggcugcgcgcgcgcgaagcaa

SEQ ID NO: 32135 - RNA, 23 nt, Artificial Sequence
  Synthetic
gggcugcgcgcgcgcgaagcaag

SEQ ID NO: 32136 - RNA, 23 nt, Artificial Sequence
  Synthetic
ggcugcgcgcgcgcgaagcaagg

SEQ ID NO: 32137 - RNA, 23 nt, Artificial Sequence
  Synthetic
gcugcgcgcgcgcgaagcaaggg

SEQ ID NO: 32138 - RNA, 23 nt, Artificial Sequence
  Synthetic
cugcgcgcgcgcgaagcaagggg

SEQ ID NO: 32139 - RNA, 23 nt, Artificial Sequence
  Synthetic
ugcgcgcgcgcgaagcaaggggg

SEQ ID NO: 32140 - RNA, 23 nt, Artificial Sequence
  Synthetic
gcgcgcgcgcgaagcaagggggc

SEQ ID NO: 32141 - RNA, 23 nt, Artificial Sequence
  Synthetic
cgcgcgcgcgaagcaagggggca

SEQ ID NO: 32142 - RNA, 23 nt, Artificial Sequence
  Synthetic
gcgcgcgcgaagcaagggggcag

SEQ ID NO: 32143 - RNA, 23 nt, Artificial Sequence
  Synthetic
cgcgcgcgaagcaagggggcagu

SEQ ID NO: 32144 - RNA, 23 nt, Artificial Sequence
  Synthetic
gcgcgcgaagcaagggggcagug

SEQ ID NO: 32145 - RNA, 23 nt, Artificial Sequence
  Synthetic
cgcgcgaagcaagggggcagugg

SEQ ID NO: 32146 - RNA, 23 nt, Artificial Sequence
  Synthetic
gcgcgaagcaagggggcaguggg

SEQ ID NO: 32147 - RNA, 23 nt, Artificial Sequence
  Synthetic
cgcgaagcaagggggcaguggga

SEQ ID NO: 32148 - RNA, 23 nt, Artificial Sequence
  Synthetic
gcgaagcaagggggcagugggag

SEQ ID NO: 32149 - RNA, 23 nt, Artificial Sequence
  Synthetic
cgaagcaagggggcagugggagg

SEQ ID NO: 32150 - RNA, 23 nt, Artificial Sequence
  Synthetic
gaagcaagggggcagugggaggc

SEQ ID NO: 32151 - RNA, 23 nt, Artificial Sequence
  Synthetic
aagcaagggggcagugggaggcu

SEQ ID NO: 32152 - RNA, 23 nt, Artificial Sequence
  Synthetic
agcaagggggcagugggaggcuc

SEQ ID NO: 32153 - RNA, 23 nt, Artificial Sequence
  Synthetic
gcaagggggcagugggaggcucc

SEQ ID NO: 32154 - RNA, 23 nt, Artificial Sequence
  Synthetic
caagggggcagugggaggcuccu

SEQ ID NO: 32155 - RNA, 23 nt, Artificial Sequence
  Synthetic
aagggggcagugggaggcuccug

SEQ ID NO: 32156 - RNA, 23 nt, Artificial Sequence
  Synthetic
agggggcagugggaggcuccugg

SEQ ID NO: 32157 - RNA, 23 nt, Artificial Sequence
  Synthetic
gggggcagugggaggcuccuggc

SEQ ID NO: 32158 - RNA, 23 nt, Artificial Sequence
  Synthetic
ggggcagugggaggcuccuggcg

SEQ ID NO: 32159 - RNA, 23 nt, Artificial Sequence
  Synthetic
gggcagugggaggcuccuggcgu

SEQ ID NO: 32160 - RNA, 23 nt, Artificial Sequence
  Synthetic
ggcagugggaggcuccuggcguu

SEQ ID NO: 32161 - RNA, 23 nt, Artificial Sequence
  Synthetic
gcagugggaggcuccuggcguuc

SEQ ID NO: 32162 - RNA, 23 nt, Artificial Sequence
  Synthetic
cagugggaggcuccuggcguucc

SEQ ID NO: 32163 - RNA, 23 nt, Artificial Sequence
  Synthetic
agugggaggcuccuggcguuccc

SEQ ID NO: 32164 - RNA, 23 nt, Artificial Sequence
  Synthetic
gugggaggcuccuggcguucccc

SEQ ID NO: 32165 - RNA, 23 nt, Artificial Sequence
  Synthetic
ugggaggcuccuggcguuccccu

SEQ ID NO: 32166 - RNA, 23 nt, Artificial Sequence
  Synthetic
gggaggcuccuggcguuccccuu

SEQ ID NO: 32167 - RNA, 23 nt, Artificial Sequence
  Synthetic
ggaggcuccuggcguuccccuuu

SEQ ID NO: 32168 - RNA, 23 nt, Artificial Sequence
  Synthetic
gaggcuccuggcguuccccuuua

SEQ ID NO: 32169 - RNA, 23 nt, Artificial Sequence
  Synthetic
aggcuccuggcguuccccuuuaa

SEQ ID NO: 32170 - RNA, 23 nt, Artificial Sequence
  Synthetic
ggcuccuggcguuccccuuuaac

SEQ ID NO: 32171 - RNA, 23 nt, Artificial Sequence
  Synthetic
gcuccuggcguuccccuuuaacg

SEQ ID NO: 32172 - RNA, 23 nt, Artificial Sequence
  Synthetic
cuccuggcguuccccuuuaacgg

SEQ ID NO: 32173 - RNA, 23 nt, Artificial Sequence
  Synthetic
uccuggcguuccccuuuaacggg

SEQ ID NO: 32174 - RNA, 23 nt, Artificial Sequence
  Synthetic
ccuggcguuccccuuuaacggga

SEQ ID NO: 32175 - RNA, 23 nt, Artificial Sequence
  Synthetic
cuggcguuccccuuuaacgggaa

SEQ ID NO: 32176 - RNA, 23 nt, Artificial Sequence
  Synthetic
uggcguuccccuuuaacgggaac

SEQ ID NO: 32177 - RNA, 23 nt, Artificial Sequence
  Synthetic
ggcguuccccuuuaacgggaaca

SEQ ID NO: 32178 - RNA, 23 nt, Artificial Sequence
  Synthetic
gcguuccccuuuaacgggaacaa

SEQ ID NO: 32179 - RNA, 23 nt, Artificial Sequence
  Synthetic
cguuccccuuuaacgggaacaac

SEQ ID NO: 32180 - RNA, 23 nt, Artificial Sequence
  Synthetic
guuccccuuuaacgggaacaacg

SEQ ID NO: 32181 - RNA, 23 nt, Artificial Sequence
  Synthetic
uuccccuuuaacgggaacaacgc

SEQ ID NO: 32182 - RNA, 23 nt, Artificial Sequence
  Synthetic
uccccuuuaacgggaacaacgcc

SEQ ID NO: 32183 - RNA, 23 nt, Artificial Sequence
  Synthetic
ccccuuuaacgggaacaacgccc

SEQ ID NO: 32184 - RNA, 23 nt, Artificial Sequence
  Synthetic
cccuuuaacgggaacaacgcccu

SEQ ID NO: 32185 - RNA, 23 nt, Artificial Sequence
  Synthetic
ccuuuaacgggaacaacgcccug

SEQ ID NO: 32186 - RNA, 23 nt, Artificial Sequence
  Synthetic
cuuuaacgggaacaacgcccugu

SEQ ID NO: 32187 - RNA, 23 nt, Artificial Sequence
  Synthetic
uuuaacgggaacaacgcccuguu

SEQ ID NO: 32188 - RNA, 23 nt, Artificial Sequence
  Synthetic
uuaacgggaacaacgcccuguuu

SEQ ID NO: 32189 - RNA, 23 nt, Artificial Sequence
  Synthetic
uaacgggaacaacgcccuguuug

SEQ ID NO: 32190 - RNA, 23 nt, Artificial Sequence
  Synthetic
aacgggaacaacgcccuguuugc

SEQ ID NO: 32191 - RNA, 23 nt, Artificial Sequence
  Synthetic
acgggaacaacgcccuguuugcg

SEQ ID NO: 32192 - RNA, 23 nt, Artificial Sequence
  Synthetic
cgggaacaacgcccuguuugcgu

SEQ ID NO: 32193 - RNA, 23 nt, Artificial Sequence
  Synthetic
gggaacaacgcccuguuugcguc

SEQ ID NO: 32194 - RNA, 23 nt, Artificial Sequence
  Synthetic
ggaacaacgcccuguuugcgucg

SEQ ID NO: 32195 - RNA, 23 nt, Artificial Sequence
  Synthetic
gaacaacgcccuguuugcgucgc

SEQ ID NO: 32196 - RNA, 23 nt, Artificial Sequence
  Synthetic
aacaacgcccuguuugcgucgcu

SEQ ID NO: 32197 - RNA, 23 nt, Artificial Sequence
  Synthetic
acaacgcccuguuugcgucgcug

SEQ ID NO: 32198 - RNA, 23 nt, Artificial Sequence
  Synthetic
caacgcccuguuugcgucgcugc

SEQ ID NO: 32199 - RNA, 23 nt, Artificial Sequence
  Synthetic
aacgcccuguuugcgucgcugca

SEQ ID NO: 32200 - RNA, 23 nt, Artificial Sequence
  Synthetic
acgcccuguuugcgucgcugcag

SEQ ID NO: 32201 - RNA, 23 nt, Artificial Sequence
  Synthetic
cgcccuguuugcgucgcugcagu

SEQ ID NO: 32202 - RNA, 23 nt, Artificial Sequence
  Synthetic
gcccuguuugcgucgcugcagua

SEQ ID NO: 32203 - RNA, 23 nt, Artificial Sequence
  Synthetic
cccuguuugcgucgcugcaguag

SEQ ID NO: 32204 - RNA, 23 nt, Artificial Sequence
  Synthetic
ccuguuugcgucgcugcaguagg

SEQ ID NO: 32205 - RNA, 23 nt, Artificial Sequence
  Synthetic
cuguuugcgucgcugcaguaggg

SEQ ID NO: 32206 - RNA, 23 nt, Artificial Sequence
  Synthetic
uguuugcgucgcugcaguagggu

SEQ ID NO: 32207 - RNA, 23 nt, Artificial Sequence
  Synthetic
guuugcgucgcugcaguagggug

SEQ ID NO: 32208 - RNA, 23 nt, Artificial Sequence
  Synthetic
uuugcgucgcugcaguagggugu

SEQ ID NO: 32209 - RNA, 23 nt, Artificial Sequence
  Synthetic
uugcgucgcugcaguagggugug

SEQ ID NO: 32210 - RNA, 23 nt, Artificial Sequence
  Synthetic
ugcgucgcugcaguagggugugu

SEQ ID NO: 32211 - RNA, 23 nt, Artificial Sequence
  Synthetic
gcgucgcugcaguaggguguguc

SEQ ID NO: 32212 - RNA, 23 nt, Artificial Sequence
  Synthetic
cgucgcugcaguagggugugucc

SEQ ID NO: 32213 - RNA, 23 nt, Artificial Sequence
  Synthetic
gucgcugcaguaggguguguccc

SEQ ID NO: 32214 - RNA, 23 nt, Artificial Sequence
  Synthetic
ucgcugcaguagggugugucccu

SEQ ID NO: 32215 - RNA, 23 nt, Artificial Sequence
  Synthetic
cgcugcaguagggugugucccug

SEQ ID NO: 32216 - RNA, 23 nt, Artificial Sequence
  Synthetic
gcugcaguagggugugucccugg

SEQ ID NO: 32217 - RNA, 23 nt, Artificial Sequence
  Synthetic
cugcaguagggugugucccuggg

SEQ ID NO: 32218 - RNA, 23 nt, Artificial Sequence
  Synthetic
ugcaguagggugugucccugggu

SEQ ID NO: 32219 - RNA, 23 nt, Artificial Sequence
  Synthetic
gcaguagggugugucccuggguc

SEQ ID NO: 32220 - RNA, 23 nt, Artificial Sequence
  Synthetic
caguagggugugucccuggguca

SEQ ID NO: 32221 - RNA, 23 nt, Artificial Sequence
  Synthetic
aguagggugugucccugggucag

SEQ ID NO: 32222 - RNA, 23 nt, Artificial Sequence
  Synthetic
guagggugugucccugggucagc

SEQ ID NO: 32223 - RNA, 23 nt, Artificial Sequence
  Synthetic
uagggugugucccugggucagcg

SEQ ID NO: 32224 - RNA, 23 nt, Artificial Sequence
  Synthetic
agggugugucccugggucagcgu

SEQ ID NO: 32225 - RNA, 23 nt, Artificial Sequence
  Synthetic
gggugugucccugggucagcgug

SEQ ID NO: 32226 - RNA, 23 nt, Artificial Sequence
  Synthetic
ggugugucccugggucagcgugu

SEQ ID NO: 32227 - RNA, 23 nt, Artificial Sequence
  Synthetic
gugugucccugggucagcgugug

SEQ ID NO: 32228 - RNA, 23 nt, Artificial Sequence
  Synthetic
ugugucccugggucagcgugugc

SEQ ID NO: 32229 - RNA, 23 nt, Artificial Sequence
  Synthetic
gugucccugggucagcgugugcg

SEQ ID NO: 32230 - RNA, 23 nt, Artificial Sequence
  Synthetic
ugucccugggucagcgugugcgg

SEQ ID NO: 32231 - RNA, 23 nt, Artificial Sequence
  Synthetic
gucccugggucagcgugugcggg

SEQ ID NO: 32232 - RNA, 23 nt, Artificial Sequence
  Synthetic
ucccugggucagcgugugcggga

SEQ ID NO: 32233 - RNA, 23 nt, Artificial Sequence
  Synthetic
cccugggucagcgugugcgggag

SEQ ID NO: 32234 - RNA, 23 nt, Artificial Sequence
  Synthetic
ccugggucagcgugugcgggagg

SEQ ID NO: 32235 - RNA, 23 nt, Artificial Sequence
  Synthetic
cugggucagcgugugcgggaggg

SEQ ID NO: 32236 - RNA, 23 nt, Artificial Sequence
  Synthetic
ugggucagcgugugcgggagggc

SEQ ID NO: 32237 - RNA, 23 nt, Artificial Sequence
  Synthetic
gggucagcgugugcgggagggcg

SEQ ID NO: 32238 - RNA, 23 nt, Artificial Sequence
  Synthetic
ggucagcgugugcgggagggcgg

SEQ ID NO: 32239 - RNA, 23 nt, Artificial Sequence
  Synthetic
gucagcgugugcgggagggcggg

SEQ ID NO: 32240 - RNA, 23 nt, Artificial Sequence
  Synthetic
ucagcgugugcgggagggcggga

SEQ ID NO: 32241 - RNA, 23 nt, Artificial Sequence
  Synthetic
cagcgugugcgggagggcgggac

SEQ ID NO: 32242 - RNA, 23 nt, Artificial Sequence
  Synthetic
agcgugugcgggagggcgggacu

SEQ ID NO: 32243 - RNA, 23 nt, Artificial Sequence
  Synthetic
gcgugugcgggagggcgggacuc

SEQ ID NO: 32244 - RNA, 23 nt, Artificial Sequence
  Synthetic
cgugugcgggagggcgggacuca

SEQ ID NO: 32245 - RNA, 23 nt, Artificial Sequence
  Synthetic
gugugcgggagggcgggacucag

SEQ ID NO: 32246 - RNA, 23 nt, Artificial Sequence
  Synthetic
ugugcgggagggcgggacucagg

SEQ ID NO: 32247 - RNA, 23 nt, Artificial Sequence
  Synthetic
gugcgggagggcgggacucaggg

SEQ ID NO: 32248 - RNA, 23 nt, Artificial Sequence
  Synthetic
ugcgggagggcgggacucaggga

SEQ ID NO: 32249 - RNA, 23 nt, Artificial Sequence
  Synthetic
gcgggagggcgggacucagggag

SEQ ID NO: 32250 - RNA, 23 nt, Artificial Sequence
  Synthetic
cgggagggcgggacucagggagg

SEQ ID NO: 32251 - RNA, 23 nt, Artificial Sequence
  Synthetic
gggagggcgggacucagggagga

SEQ ID NO: 32252 - RNA, 23 nt, Artificial Sequence
  Synthetic
ggagggcgggacucagggaggag

SEQ ID NO: 32253 - RNA, 23 nt, Artificial Sequence
  Synthetic
gagggcgggacucagggaggaga

SEQ ID NO: 32254 - RNA, 23 nt, Artificial Sequence
  Synthetic
agggcgggacucagggaggagag

SEQ ID NO: 32255 - RNA, 23 nt, Artificial Sequence
  Synthetic
gggcgggacucagggaggagagg

SEQ ID NO: 32256 - RNA, 23 nt, Artificial Sequence
  Synthetic
ggcgggacucagggaggagaggg

SEQ ID NO: 32257 - RNA, 23 nt, Artificial Sequence
  Synthetic
gcgggacucagggaggagagggg

SEQ ID NO: 32258 - RNA, 23 nt, Artificial Sequence
  Synthetic
cgggacucagggaggagaggggg

SEQ ID NO: 32259 - RNA, 23 nt, Artificial Sequence
  Synthetic
gggacucagggaggagagggggc

SEQ ID NO: 32260 - RNA, 23 nt, Artificial Sequence
  Synthetic
ggacucagggaggagagggggca

SEQ ID NO: 32261 - RNA, 23 nt, Artificial Sequence
  Synthetic
gacucagggaggagagggggcag

SEQ ID NO: 32262 - RNA, 23 nt, Artificial Sequence
  Synthetic
acucagggaggagagggggcagg

SEQ ID NO: 32263 - RNA, 23 nt, Artificial Sequence
  Synthetic
cucagggaggagagggggcagga

SEQ ID NO: 32264 - RNA, 23 nt, Artificial Sequence
  Synthetic
ucagggaggagagggggcaggag

SEQ ID NO: 32265 - RNA, 23 nt, Artificial Sequence
  Synthetic
cagggaggagagggggcaggaga

SEQ ID NO: 32266 - RNA, 23 nt, Artificial Sequence
  Synthetic
agggaggagagggggcaggagag

SEQ ID NO: 32267 - RNA, 23 nt, Artificial Sequence
  Synthetic
gggaggagagggggcaggagaga

SEQ ID NO: 32268 - RNA, 23 nt, Artificial Sequence
  Synthetic
ggaggagagggggcaggagagag

SEQ ID NO: 32269 - RNA, 23 nt, Artificial Sequence
  Synthetic
gaggagagggggcaggagagagg

SEQ ID NO: 32270 - RNA, 23 nt, Artificial Sequence
  Synthetic
aggagagggggcaggagagaggg

SEQ ID NO: 32271 - RNA, 23 nt, Artificial Sequence
  Synthetic
ggagagggggcaggagagaggga

SEQ ID NO: 32272 - RNA, 23 nt, Artificial Sequence
  Synthetic
gagagggggcaggagagagggag

SEQ ID NO: 32273 - RNA, 23 nt, Artificial Sequence
  Synthetic
agagggggcaggagagagggagg

SEQ ID NO: 32274 - RNA, 23 nt, Artificial Sequence
  Synthetic
gagggggcaggagagagggaggg

SEQ ID NO: 32275 - RNA, 23 nt, Artificial Sequence
  Synthetic
agggggcaggagagagggagggc

SEQ ID NO: 32276 - RNA, 23 nt, Artificial Sequence
  Synthetic
gggggcaggagagagggagggca

SEQ ID NO: 32277 - RNA, 23 nt, Artificial Sequence
  Synthetic
ggggcaggagagagggagggcag

SEQ ID NO: 32278 - RNA, 23 nt, Artificial Sequence
  Synthetic
gggcaggagagagggagggcagg

SEQ ID NO: 32279 - RNA, 23 nt, Artificial Sequence
  Synthetic
ggcaggagagagggagggcagga

SEQ ID NO: 32280 - RNA, 23 nt, Artificial Sequence
  Synthetic
gcaggagagagggagggcaggag

SEQ ID NO: 32281 - RNA, 23 nt, Artificial Sequence
  Synthetic
caggagagagggagggcaggaga

SEQ ID NO: 32282 - RNA, 23 nt, Artificial Sequence
  Synthetic
aggagagagggagggcaggagac

SEQ ID NO: 32283 - RNA, 23 nt, Artificial Sequence
  Synthetic
ggagagagggagggcaggagaca

SEQ ID NO: 32284 - RNA, 23 nt, Artificial Sequence
  Synthetic
gagagagggagggcaggagacag

SEQ ID NO: 32285 - RNA, 23 nt, Artificial Sequence
  Synthetic
agagagggagggcaggagacagu

SEQ ID NO: 32286 - RNA, 23 nt, Artificial Sequence
  Synthetic
gagagggagggcaggagacaguc

SEQ ID NO: 32287 - RNA, 23 nt, Artificial Sequence
  Synthetic
agagggagggcaggagacaguca

SEQ ID NO: 32288 - RNA, 23 nt, Artificial Sequence
  Synthetic
gagggagggcaggagacagucac

SEQ ID NO: 32289 - RNA, 23 nt, Artificial Sequence
  Synthetic
agggagggcaggagacagucacu

SEQ ID NO: 32290 - RNA, 23 nt, Artificial Sequence
  Synthetic
gggagggcaggagacagucacuu

SEQ ID NO: 32291 - RNA, 23 nt, Artificial Sequence
  Synthetic
ggagggcaggagacagucacuug

SEQ ID NO: 32292 - RNA, 23 nt, Artificial Sequence
  Synthetic
gagggcaggagacagucacuugg

SEQ ID NO: 32293 - RNA, 23 nt, Artificial Sequence
  Synthetic
agggcaggagacagucacuuggc

SEQ ID NO: 32294 - RNA, 23 nt, Artificial Sequence
  Synthetic
gggcaggagacagucacuuggcc

SEQ ID NO: 32295 - RNA, 23 nt, Artificial Sequence
  Synthetic
ggcaggagacagucacuuggccu

SEQ ID NO: 32296 - RNA, 23 nt, Artificial Sequence
  Synthetic
gcaggagacagucacuuggccuu

SEQ ID NO: 32297 - RNA, 23 nt, Artificial Sequence
  Synthetic
caggagacagucacuuggccuua

SEQ ID NO: 32298 - RNA, 23 nt, Artificial Sequence
  Synthetic
aggagacagucacuuggccuuaa

SEQ ID NO: 32299 - RNA, 23 nt, Artificial Sequence
  Synthetic
ggagacagucacuuggccuuaaa

SEQ ID NO: 32300 - RNA, 23 nt, Artificial Sequence
  Synthetic
gagacagucacuuggccuuaaau

SEQ ID NO: 32301 - RNA, 23 nt, Artificial Sequence
  Synthetic
agacagucacuuggccuuaaaug

SEQ ID NO: 32302 - RNA, 23 nt, Artificial Sequence
  Synthetic
gacagucacuuggccuuaaaugc

SEQ ID NO: 32303 - RNA, 23 nt, Artificial Sequence
  Synthetic
acagucacuuggccuuaaaugcg

SEQ ID NO: 32304 - RNA, 23 nt, Artificial Sequence
  Synthetic
cagucacuuggccuuaaaugcgc

SEQ ID NO: 32305 - RNA, 23 nt, Artificial Sequence
  Synthetic
agucacuuggccuuaaaugcgcc

SEQ ID NO: 32306 - RNA, 23 nt, Artificial Sequence
  Synthetic
gucacuuggccuuaaaugcgccu

SEQ ID NO: 32307 - RNA, 23 nt, Artificial Sequence
  Synthetic
ucacuuggccuuaaaugcgccuc

SEQ ID NO: 32308 - RNA, 23 nt, Artificial Sequence
  Synthetic
cacuuggccuuaaaugcgccuca

SEQ ID NO: 32309 - RNA, 23 nt, Artificial Sequence
  Synthetic
acuuggccuuaaaugcgccucaa

SEQ ID NO: 32310 - RNA, 23 nt, Artificial Sequence
  Synthetic
cuuggccuuaaaugcgccucaag

SEQ ID NO: 32311 - RNA, 23 nt, Artificial Sequence
  Synthetic
uuggccuuaaaugcgccucaaga

SEQ ID NO: 32312 - RNA, 23 nt, Artificial Sequence
  Synthetic
uggccuuaaaugcgccucaagaa

SEQ ID NO: 32313 - RNA, 23 nt, Artificial Sequence
  Synthetic
ggccuuaaaugcgccucaagaaa

SEQ ID NO: 32314 - RNA, 23 nt, Artificial Sequence
  Synthetic
gccuuaaaugcgccucaagaaaa

SEQ ID NO: 32315 - RNA, 23 nt, Artificial Sequence
  Synthetic
ccuuaaaugcgccucaagaaaaa

SEQ ID NO: 32316 - RNA, 23 nt, Artificial Sequence
  Synthetic
cuuaaaugcgccucaagaaaaag

SEQ ID NO: 32317 - RNA, 23 nt, Artificial Sequence
  Synthetic
uuaaaugcgccucaagaaaaagu

SEQ ID NO: 32318 - RNA, 23 nt, Artificial Sequence
  Synthetic
uaaaugcgccucaagaaaaaguc

SEQ ID NO: 32319 - RNA, 23 nt, Artificial Sequence
  Synthetic
aaaugcgccucaagaaaaagucg

SEQ ID NO: 32320 - RNA, 23 nt, Artificial Sequence
  Synthetic
aaugcgccucaagaaaaagucgg

SEQ ID NO: 32321 - RNA, 23 nt, Artificial Sequence
  Synthetic
augcgccucaagaaaaagucggu

SEQ ID NO: 32322 - RNA, 23 nt, Artificial Sequence
  Synthetic
ugcgccucaagaaaaagucgguc

SEQ ID NO: 32323 - RNA, 23 nt, Artificial Sequence
  Synthetic
gcgccucaagaaaaagucggucc

SEQ ID NO: 32324 - RNA, 23 nt, Artificial Sequence
  Synthetic
cgccucaagaaaaagucgguccc

SEQ ID NO: 32325 - RNA, 23 nt, Artificial Sequence
  Synthetic
gccucaagaaaaagucggucccu

SEQ ID NO: 32326 - RNA, 23 nt, Artificial Sequence
  Synthetic
ccucaagaaaaagucggucccug

SEQ ID NO: 32327 - RNA, 23 nt, Artificial Sequence
  Synthetic
cucaagaaaaagucggucccugc

SEQ ID NO: 32328 - RNA, 23 nt, Artificial Sequence
  Synthetic
ucaagaaaaagucggucccugca

SEQ ID NO: 32329 - RNA, 23 nt, Artificial Sequence
  Synthetic
caagaaaaagucggucccugcaa

SEQ ID NO: 32330 - RNA, 23 nt, Artificial Sequence
  Synthetic
aagaaaaagucggucccugcaaa

SEQ ID NO: 32331 - RNA, 23 nt, Artificial Sequence
  Synthetic
agaaaaagucggucccugcaaaa

SEQ ID NO: 32332 - RNA, 23 nt, Artificial Sequence
  Synthetic
gaaaaagucggucccugcaaaac

SEQ ID NO: 32333 - RNA, 23 nt, Artificial Sequence
  Synthetic
aaaaagucggucccugcaaaacc

SEQ ID NO: 32334 - RNA, 23 nt, Artificial Sequence
  Synthetic
aaaagucggucccugcaaaaccg

SEQ ID NO: 32335 - RNA, 23 nt, Artificial Sequence
  Synthetic
aaagucggucccugcaaaaccgc

SEQ ID NO: 32336 - RNA, 23 nt, Artificial Sequence
  Synthetic
aagucggucccugcaaaaccgcg

SEQ ID NO: 32337 - RNA, 23 nt, Artificial Sequence
  Synthetic
agucggucccugcaaaaccgcgg

SEQ ID NO: 32338 - RNA, 23 nt, Artificial Sequence
  Synthetic
gucggucccugcaaaaccgcggc

SEQ ID NO: 32339 - RNA, 23 nt, Artificial Sequence
  Synthetic
ucggucccugcaaaaccgcggcg

SEQ ID NO: 32340 - RNA, 23 nt, Artificial Sequence
  Synthetic
cggucccugcaaaaccgcggcga

SEQ ID NO: 32341 - RNA, 23 nt, Artificial Sequence
  Synthetic
ggucccugcaaaaccgcggcgac

SEQ ID NO: 32342 - RNA, 23 nt, Artificial Sequence
  Synthetic
gucccugcaaaaccgcggcgacu

SEQ ID NO: 32343 - RNA, 23 nt, Artificial Sequence
  Synthetic
ucccugcaaaaccgcggcgacuu

SEQ ID NO: 32344 - RNA, 23 nt, Artificial Sequence
  Synthetic
cccugcaaaaccgcggcgacuuu

SEQ ID NO: 32345 - RNA, 23 nt, Artificial Sequence
  Synthetic
ccugcaaaaccgcggcgacuuuu

SEQ ID NO: 32346 - RNA, 23 nt, Artificial Sequence
  Synthetic
cugcaaaaccgcggcgacuuuua

SEQ ID NO: 32347 - RNA, 23 nt, Artificial Sequence
  Synthetic
ugcaaaaccgcggcgacuuuuac

SEQ ID NO: 32348 - RNA, 23 nt, Artificial Sequence
  Synthetic
gcaaaaccgcggcgacuuuuacu

SEQ ID NO: 32349 - RNA, 23 nt, Artificial Sequence
  Synthetic
caaaaccgcggcgacuuuuacuc

SEQ ID NO: 32350 - RNA, 23 nt, Artificial Sequence
  Synthetic
aaaaccgcggcgacuuuuacucg

SEQ ID NO: 32351 - RNA, 23 nt, Artificial Sequence
  Synthetic
aaaccgcggcgacuuuuacucga

SEQ ID NO: 32352 - RNA, 23 nt, Artificial Sequence
  Synthetic
aaccgcggcgacuuuuacucgaa

SEQ ID NO: 32353 - RNA, 23 nt, Artificial Sequence
  Synthetic
accgcggcgacuuuuacucgaaa

SEQ ID NO: 32354 - RNA, 23 nt, Artificial Sequence
  Synthetic
ccgcggcgacuuuuacucgaaac

SEQ ID NO: 32355 - RNA, 23 nt, Artificial Sequence
  Synthetic
cgcggcgacuuuuacucgaaacc

SEQ ID NO: 32356 - RNA, 23 nt, Artificial Sequence
  Synthetic
gcggcgacuuuuacucgaaacca

SEQ ID NO: 32357 - RNA, 23 nt, Artificial Sequence
  Synthetic
cggcgacuuuuacucgaaaccag

SEQ ID NO: 32358 - RNA, 23 nt, Artificial Sequence
  Synthetic
ggcgacuuuuacucgaaaccaga

SEQ ID NO: 32359 - RNA, 23 nt, Artificial Sequence
  Synthetic
gcgacuuuuacucgaaaccagag

SEQ ID NO: 32360 - RNA, 23 nt, Artificial Sequence
  Synthetic
cgacuuuuacucgaaaccagagg

SEQ ID NO: 32361 - RNA, 23 nt, Artificial Sequence
  Synthetic
gacuuuuacucgaaaccagaggc

SEQ ID NO: 32362 - RNA, 23 nt, Artificial Sequence
  Synthetic
acuuuuacucgaaaccagaggcg

SEQ ID NO: 32363 - RNA, 23 nt, Artificial Sequence
  Synthetic
cuuuuacucgaaaccagaggcgg

SEQ ID NO: 32364 - RNA, 23 nt, Artificial Sequence
  Synthetic
uuuuacucgaaaccagaggcggc

SEQ ID NO: 32365 - RNA, 23 nt, Artificial Sequence
  Synthetic
uuuacucgaaaccagaggcggcu

SEQ ID NO: 32366 - RNA, 23 nt, Artificial Sequence
  Synthetic
uuacucgaaaccagaggcggcug

SEQ ID NO: 32367 - RNA, 23 nt, Artificial Sequence
  Synthetic
uacucgaaaccagaggcggcuga

SEQ ID NO: 32368 - RNA, 23 nt, Artificial Sequence
  Synthetic
acucgaaaccagaggcggcugag

SEQ ID NO: 32369 - RNA, 23 nt, Artificial Sequence
  Synthetic
cucgaaaccagaggcggcugagc

SEQ ID NO: 32370 - RNA, 23 nt, Artificial Sequence
  Synthetic
ucgaaaccagaggcggcugagcu

SEQ ID NO: 32371 - RNA, 23 nt, Artificial Sequence
  Synthetic
cgaaaccagaggcggcugagcuu

SEQ ID NO: 32372 - RNA, 23 nt, Artificial Sequence
  Synthetic
gaaaccagaggcggcugagcuuu

SEQ ID NO: 32373 - RNA, 23 nt, Artificial Sequence
  Synthetic
aaaccagaggcggcugagcuuuc

SEQ ID NO: 32374 - RNA, 23 nt, Artificial Sequence
  Synthetic
aaccagaggcggcugagcuuucu

SEQ ID NO: 32375 - RNA, 23 nt, Artificial Sequence
  Synthetic
accagaggcggcugagcuuucuc

SEQ ID NO: 32376 - RNA, 23 nt, Artificial Sequence
  Synthetic
ccagaggcggcugagcuuucuca

SEQ ID NO: 32377 - RNA, 23 nt, Artificial Sequence
  Synthetic
cagaggcggcugagcuuucucac

SEQ ID NO: 32378 - RNA, 23 nt, Artificial Sequence
  Synthetic
agaggcggcugagcuuucucacc

SEQ ID NO: 32379 - RNA, 23 nt, Artificial Sequence
  Synthetic
gaggcggcugagcuuucucaccu

SEQ ID NO: 32380 - RNA, 23 nt, Artificial Sequence
  Synthetic
aggcggcugagcuuucucaccuc

SEQ ID NO: 32381 - RNA, 23 nt, Artificial Sequence
  Synthetic
ggcggcugagcuuucucaccucc

SEQ ID NO: 32382 - RNA, 23 nt, Artificial Sequence
  Synthetic
gcggcugagcuuucucaccuccc

SEQ ID NO: 32383 - RNA, 23 nt, Artificial Sequence
  Synthetic
cggcugagcuuucucaccuccca

SEQ ID NO: 32384 - RNA, 23 nt, Artificial Sequence
  Synthetic
ggcugagcuuucucaccucccac

SEQ ID NO: 32385 - RNA, 23 nt, Artificial Sequence
  Synthetic
gcugagcuuucucaccucccacc

SEQ ID NO: 32386 - RNA, 23 nt, Artificial Sequence
  Synthetic
cugagcuuucucaccucccaccu

SEQ ID NO: 32387 - RNA, 23 nt, Artificial Sequence
  Synthetic
ugagcuuucucaccucccaccuc

SEQ ID NO: 32388 - RNA, 23 nt, Artificial Sequence
  Synthetic
gagcuuucucaccucccaccucc

SEQ ID NO: 32389 - RNA, 23 nt, Artificial Sequence
  Synthetic
agcuuucucaccucccaccuccc

SEQ ID NO: 32390 - RNA, 23 nt, Artificial Sequence
  Synthetic
gcuuucucaccucccaccucccu

SEQ ID NO: 32391 - RNA, 23 nt, Artificial Sequence
  Synthetic
cuuucucaccucccaccucccuu

SEQ ID NO: 32392 - RNA, 23 nt, Artificial Sequence
  Synthetic
uuucucaccucccaccucccuuc

SEQ ID NO: 32393 - RNA, 23 nt, Artificial Sequence
  Synthetic
uucucaccucccaccucccuucu

SEQ ID NO: 32394 - RNA, 23 nt, Artificial Sequence
  Synthetic
ucucaccucccaccucccuucuc

SEQ ID NO: 32395 - RNA, 23 nt, Artificial Sequence
  Synthetic
cucaccucccaccucccuucucc

SEQ ID NO: 32396 - RNA, 23 nt, Artificial Sequence
  Synthetic
ucaccucccaccucccuucuccc

SEQ ID NO: 32397 - RNA, 23 nt, Artificial Sequence
  Synthetic
caccucccaccucccuucucccc

SEQ ID NO: 32398 - RNA, 23 nt, Artificial Sequence
  Synthetic
accucccaccucccuucuccccu

SEQ ID NO: 32399 - RNA, 23 nt, Artificial Sequence
  Synthetic
ccucccaccucccuucuccccug

SEQ ID NO: 32400 - RNA, 23 nt, Artificial Sequence
  Synthetic
cucccaccucccuucuccccugg

SEQ ID NO: 32401 - RNA, 23 nt, Artificial Sequence
  Synthetic
ucccaccucccuucuccccuggc

SEQ ID NO: 32402 - RNA, 23 nt, Artificial Sequence
  Synthetic
cccaccucccuucuccccuggcc

SEQ ID NO: 32403 - RNA, 23 nt, Artificial Sequence
  Synthetic
ccaccucccuucuccccuggccc

SEQ ID NO: 32404 - RNA, 23 nt, Artificial Sequence
  Synthetic
caccucccuucuccccuggcccc

SEQ ID NO: 32405 - RNA, 23 nt, Artificial Sequence
  Synthetic
accucccuucuccccuggccccg

SEQ ID NO: 32406 - RNA, 23 nt, Artificial Sequence
  Synthetic
ccucccuucuccccuggccccgu

SEQ ID NO: 32407 - RNA, 23 nt, Artificial Sequence
  Synthetic
cucccuucuccccuggccccgug

SEQ ID NO: 32408 - RNA, 23 nt, Artificial Sequence
  Synthetic
ucccuucuccccuggccccgugg

SEQ ID NO: 32409 - RNA, 23 nt, Artificial Sequence
  Synthetic
cccuucuccccuggccccgugga

SEQ ID NO: 32410 - RNA, 23 nt, Artificial Sequence
  Synthetic
ccuucuccccuggccccguggag

SEQ ID NO: 32411 - RNA, 23 nt, Artificial Sequence
  Synthetic
cuucuccccuggccccguggaga

SEQ ID NO: 32412 - RNA, 23 nt, Artificial Sequence
  Synthetic
uucuccccuggccccguggagac

SEQ ID NO: 32413 - RNA, 23 nt, Artificial Sequence
  Synthetic
ucuccccuggccccguggagacc

SEQ ID NO: 32414 - RNA, 23 nt, Artificial Sequence
  Synthetic
cuccccuggccccguggagaccu

SEQ ID NO: 32415 - RNA, 23 nt, Artificial Sequence
  Synthetic
uccccuggccccguggagaccua

SEQ ID NO: 32416 - RNA, 23 nt, Artificial Sequence
  Synthetic
ccccuggccccguggagaccuag

SEQ ID NO: 32417 - RNA, 23 nt, Artificial Sequence
  Synthetic
cccuggccccguggagaccuagu

SEQ ID NO: 32418 - RNA, 23 nt, Artificial Sequence
  Synthetic
ccuggccccguggagaccuagug

SEQ ID NO: 32419 - RNA, 23 nt, Artificial Sequence
  Synthetic
cuggccccguggagaccuagugu

SEQ ID NO: 32420 - RNA, 23 nt, Artificial Sequence
  Synthetic
uggccccguggagaccuaguguu

SEQ ID NO: 32421 - RNA, 23 nt, Artificial Sequence
  Synthetic
ggccccguggagaccuaguguug

SEQ ID NO: 32422 - RNA, 23 nt, Artificial Sequence
  Synthetic
gccccguggagaccuaguguuga

SEQ ID NO: 32423 - RNA, 23 nt, Artificial Sequence
  Synthetic
ccccguggagaccuaguguugac

SEQ ID NO: 32424 - RNA, 23 nt, Artificial Sequence
  Synthetic
cccguggagaccuaguguugacc

SEQ ID NO: 32425 - RNA, 23 nt, Artificial Sequence
  Synthetic
ccguggagaccuaguguugaccg

SEQ ID NO: 32426 - RNA, 23 nt, Artificial Sequence
  Synthetic
cguggagaccuaguguugaccga

SEQ ID NO: 32427 - RNA, 23 nt, Artificial Sequence
  Synthetic
guggagaccuaguguugaccgag

SEQ ID NO: 32428 - RNA, 23 nt, Artificial Sequence
  Synthetic
uggagaccuaguguugaccgaga

SEQ ID NO: 32429 - RNA, 23 nt, Artificial Sequence
  Synthetic
ggagaccuaguguugaccgagaa

SEQ ID NO: 32430 - RNA, 23 nt, Artificial Sequence
  Synthetic
gagaccuaguguugaccgagaaa

SEQ ID NO: 32431 - RNA, 23 nt, Artificial Sequence
  Synthetic
agaccuaguguugaccgagaaac

SEQ ID NO: 32432 - RNA, 23 nt, Artificial Sequence
  Synthetic
gaccuaguguugaccgagaaacu

SEQ ID NO: 32433 - RNA, 23 nt, Artificial Sequence
  Synthetic
accuaguguugaccgagaaacug

SEQ ID NO: 32434 - RNA, 23 nt, Artificial Sequence
  Synthetic
ccuaguguugaccgagaaacugg

SEQ ID NO: 32435 - RNA, 23 nt, Artificial Sequence
  Synthetic
cuaguguugaccgagaaacuggc

SEQ ID NO: 32436 - RNA, 23 nt, Artificial Sequence
  Synthetic
uaguguugaccgagaaacuggcu

SEQ ID NO: 32437 - RNA, 23 nt, Artificial Sequence
  Synthetic
aguguugaccgagaaacuggcuc

SEQ ID NO: 32438 - RNA, 23 nt, Artificial Sequence
  Synthetic
guguugaccgagaaacuggcucc

SEQ ID NO: 32439 - RNA, 23 nt, Artificial Sequence
  Synthetic
uguugaccgagaaacuggcuccu

SEQ ID NO: 32440 - RNA, 23 nt, Artificial Sequence
  Synthetic
guugaccgagaaacuggcuccuc

SEQ ID NO: 32441 - RNA, 23 nt, Artificial Sequence
  Synthetic
uugaccgagaaacuggcuccuca

SEQ ID NO: 32442 - RNA, 23 nt, Artificial Sequence
  Synthetic
ugaccgagaaacuggcuccucag

SEQ ID NO: 32443 - RNA, 23 nt, Artificial Sequence
  Synthetic
gaccgagaaacuggcuccucagc

SEQ ID NO: 32444 - RNA, 23 nt, Artificial Sequence
  Synthetic
accgagaaacuggcuccucagcc

SEQ ID NO: 32445 - RNA, 23 nt, Artificial Sequence
  Synthetic
ccgagaaacuggcuccucagccc

SEQ ID NO: 32446 - RNA, 23 nt, Artificial Sequence
  Synthetic
cgagaaacuggcuccucagccca

SEQ ID NO: 32447 - RNA, 23 nt, Artificial Sequence
  Synthetic
gagaaacuggcuccucagcccac

SEQ ID NO: 32448 - RNA, 23 nt, Artificial Sequence
  Synthetic
agaaacuggcuccucagcccacu

SEQ ID NO: 32449 - RNA, 23 nt, Artificial Sequence
  Synthetic
gaaacuggcuccucagcccacuc

SEQ ID NO: 32450 - RNA, 23 nt, Artificial Sequence
  Synthetic
aaacuggcuccucagcccacucu

SEQ ID NO: 32451 - RNA, 23 nt, Artificial Sequence
  Synthetic
aacuggcuccucagcccacucug

SEQ ID NO: 32452 - RNA, 23 nt, Artificial Sequence
  Synthetic
acuggcuccucagcccacucugg

SEQ ID NO: 32453 - RNA, 23 nt, Artificial Sequence
  Synthetic
cuggcuccucagcccacucuggg

SEQ ID NO: 32454 - RNA, 23 nt, Artificial Sequence
  Synthetic
uggcuccucagcccacucuggga

SEQ ID NO: 32455 - RNA, 23 nt, Artificial Sequence
  Synthetic
ggcuccucagcccacucugggaa

SEQ ID NO: 32456 - RNA, 23 nt, Artificial Sequence
  Synthetic
gcuccucagcccacucugggaag

SEQ ID NO: 32457 - RNA, 23 nt, Artificial Sequence
  Synthetic
cuccucagcccacucugggaaga

SEQ ID NO: 32458 - RNA, 23 nt, Artificial Sequence
  Synthetic
uccucagcccacucugggaagac

SEQ ID NO: 32459 - RNA, 23 nt, Artificial Sequence
  Synthetic
ccucagcccacucugggaagacc

SEQ ID NO: 32460 - RNA, 23 nt, Artificial Sequence
  Synthetic
cucagcccacucugggaagaccc

SEQ ID NO: 32461 - RNA, 23 nt, Artificial Sequence
  Synthetic
ucagcccacucugggaagaccca

SEQ ID NO: 32462 - RNA, 23 nt, Artificial Sequence
  Synthetic
cagcccacucugggaagacccag

SEQ ID NO: 32463 - RNA, 23 nt, Artificial Sequence
  Synthetic
agcccacucugggaagacccagc

SEQ ID NO: 32464 - RNA, 23 nt, Artificial Sequence
  Synthetic
gcccacucugggaagacccagcc

SEQ ID NO: 32465 - RNA, 23 nt, Artificial Sequence
  Synthetic
cccacucugggaagacccagcca

SEQ ID NO: 32466 - RNA, 23 nt, Artificial Sequence
  Synthetic
ccacucugggaagacccagccaa

SEQ ID NO: 32467 - RNA, 23 nt, Artificial Sequence
  Synthetic
cacucugggaagacccagccaaa

SEQ ID NO: 32468 - RNA, 23 nt, Artificial Sequence
  Synthetic
acucugggaagacccagccaaau

SEQ ID NO: 32469 - RNA, 23 nt, Artificial Sequence
  Synthetic
cucugggaagacccagccaaaug

SEQ ID NO: 32470 - RNA, 23 nt, Artificial Sequence
  Synthetic
ucugggaagacccagccaaaugu

SEQ ID NO: 32471 - RNA, 23 nt, Artificial Sequence
  Synthetic
cugggaagacccagccaaaugua

SEQ ID NO: 32472 - RNA, 23 nt, Artificial Sequence
  Synthetic
ugggaagacccagccaaauguag

SEQ ID NO: 32473 - RNA, 23 nt, Artificial Sequence
  Synthetic
gggaagacccagccaaauguagc

SEQ ID NO: 32474 - RNA, 23 nt, Artificial Sequence
  Synthetic
ggaagacccagccaaauguagcu

SEQ ID NO: 32475 - RNA, 23 nt, Artificial Sequence
  Synthetic
gaagacccagccaaauguagcuc

SEQ ID NO: 32476 - RNA, 23 nt, Artificial Sequence
  Synthetic
aagacccagccaaauguagcuca

SEQ ID NO: 32477 - RNA, 23 nt, Artificial Sequence
  Synthetic
agacccagccaaauguagcucag

SEQ ID NO: 32478 - RNA, 23 nt, Artificial Sequence
  Synthetic
gacccagccaaauguagcucagc

SEQ ID NO: 32479 - RNA, 23 nt, Artificial Sequence
  Synthetic
acccagccaaauguagcucagcg

SEQ ID NO: 32480 - RNA, 23 nt, Artificial Sequence
  Synthetic
cccagccaaauguagcucagcgg

SEQ ID NO: 32481 - RNA, 23 nt, Artificial Sequence
  Synthetic
ccagccaaauguagcucagcgga

SEQ ID NO: 32482 - RNA, 23 nt, Artificial Sequence
  Synthetic
cagccaaauguagcucagcggau

SEQ ID NO: 32483 - RNA, 23 nt, Artificial Sequence
  Synthetic
agccaaauguagcucagcggaug

SEQ ID NO: 32484 - RNA, 23 nt, Artificial Sequence
  Synthetic
gccaaauguagcucagcggaugc

SEQ ID NO: 32485 - RNA, 23 nt, Artificial Sequence
  Synthetic
ccaaauguagcucagcggaugcc

SEQ ID NO: 32486 - RNA, 23 nt, Artificial Sequence
  Synthetic
caaauguagcucagcggaugccc

SEQ ID NO: 32487 - RNA, 23 nt, Artificial Sequence
  Synthetic
aaauguagcucagcggaugccca

SEQ ID NO: 32488 - RNA, 23 nt, Artificial Sequence
  Synthetic
aauguagcucagcggaugcccag

SEQ ID NO: 32489 - RNA, 23 nt, Artificial Sequence
  Synthetic
auguagcucagcggaugcccagg

SEQ ID NO: 32490 - RNA, 23 nt, Artificial Sequence
  Synthetic
uguagcucagcggaugcccaggg

SEQ ID NO: 32491 - RNA, 23 nt, Artificial Sequence
  Synthetic
guagcucagcggaugcccagggc

SEQ ID NO: 32492 - RNA, 23 nt, Artificial Sequence
  Synthetic
uagcucagcggaugcccagggcu

SEQ ID NO: 32493 - RNA, 23 nt, Artificial Sequence
  Synthetic
agcucagcggaugcccagggcug

SEQ ID NO: 32494 - RNA, 23 nt, Artificial Sequence
  Synthetic
gcucagcggaugcccagggcugg

SEQ ID NO: 32495 - RNA, 23 nt, Artificial Sequence
  Synthetic
cucagcggaugcccagggcuggg

SEQ ID NO: 32496 - RNA, 23 nt, Artificial Sequence
  Synthetic
ucagcggaugcccagggcugggc

SEQ ID NO: 32497 - RNA, 23 nt, Artificial Sequence
  Synthetic
cagcggaugcccagggcugggcu

SEQ ID NO: 32498 - RNA, 23 nt, Artificial Sequence
  Synthetic
agcggaugcccagggcugggcuu

SEQ ID NO: 32499 - RNA, 23 nt, Artificial Sequence
  Synthetic
gcggaugcccagggcugggcuuc

SEQ ID NO: 32500 - RNA, 23 nt, Artificial Sequence
  Synthetic
cggaugcccagggcugggcuucu

SEQ ID NO: 32501 - RNA, 23 nt, Artificial Sequence
  Synthetic
ggaugcccagggcugggcuucug

SEQ ID NO: 32502 - RNA, 23 nt, Artificial Sequence
  Synthetic
gaugcccagggcugggcuucugg

SEQ ID NO: 32503 - RNA, 23 nt, Artificial Sequence
  Synthetic
augcccagggcugggcuucuggg

SEQ ID NO: 32504 - RNA, 23 nt, Artificial Sequence
  Synthetic
ugcccagggcugggcuucugggc

SEQ ID NO: 32505 - RNA, 23 nt, Artificial Sequence
  Synthetic
gcccagggcugggcuucugggcc

SEQ ID NO: 32506 - RNA, 23 nt, Artificial Sequence
  Synthetic
cccagggcugggcuucugggccc

SEQ ID NO: 32507 - RNA, 23 nt, Artificial Sequence
  Synthetic
ccagggcugggcuucugggcccg

SEQ ID NO: 32508 - RNA, 23 nt, Artificial Sequence
  Synthetic
cagggcugggcuucugggcccgc

SEQ ID NO: 32509 - RNA, 23 nt, Artificial Sequence
  Synthetic
agggcugggcuucugggcccgcc

SEQ ID NO: 32510 - RNA, 23 nt, Artificial Sequence
  Synthetic
gggcugggcuucugggcccgccg

SEQ ID NO: 32511 - RNA, 23 nt, Artificial Sequence
  Synthetic
ggcugggcuucugggcccgccga

SEQ ID NO: 32512 - RNA, 23 nt, Artificial Sequence
  Synthetic
gcugggcuucugggcccgccgac

SEQ ID NO: 32513 - RNA, 23 nt, Artificial Sequence
  Synthetic
cugggcuucugggcccgccgacg

SEQ ID NO: 32514 - RNA, 23 nt, Artificial Sequence
  Synthetic
ugggcuucugggcccgccgacgc

SEQ ID NO: 32515 - RNA, 23 nt, Artificial Sequence
  Synthetic
gggcuucugggcccgccgacgcc

SEQ ID NO: 32516 - RNA, 23 nt, Artificial Sequence
  Synthetic
ggcuucugggcccgccgacgccg

SEQ ID NO: 32517 - RNA, 23 nt, Artificial Sequence
  Synthetic
gcuucugggcccgccgacgccga

SEQ ID NO: 32518 - RNA, 23 nt, Artificial Sequence
  Synthetic
cuucugggcccgccgacgccgac

SEQ ID NO: 32519 - RNA, 23 nt, Artificial Sequence
  Synthetic
uucugggcccgccgacgccgacc

SEQ ID NO: 32520 - RNA, 23 nt, Artificial Sequence
  Synthetic
ucugggcccgccgacgccgaccg

SEQ ID NO: 32521 - RNA, 23 nt, Artificial Sequence
  Synthetic
cugggcccgccgacgccgaccgc

SEQ ID NO: 32522 - RNA, 23 nt, Artificial Sequence
  Synthetic
ugggcccgccgacgccgaccgcg

SEQ ID NO: 32523 - RNA, 23 nt, Artificial Sequence
  Synthetic
gggcccgccgacgccgaccgcgc

SEQ ID NO: 32524 - RNA, 23 nt, Artificial Sequence
  Synthetic
ggcccgccgacgccgaccgcgcc

SEQ ID NO: 32525 - RNA, 23 nt, Artificial Sequence
  Synthetic
gcccgccgacgccgaccgcgccc

SEQ ID NO: 32526 - RNA, 23 nt, Artificial Sequence
  Synthetic
cccgccgacgccgaccgcgcccg

SEQ ID NO: 32527 - RNA, 23 nt, Artificial Sequence
  Synthetic
ccgccgacgccgaccgcgcccgc

SEQ ID NO: 32528 - RNA, 23 nt, Artificial Sequence
  Synthetic
cgccgacgccgaccgcgcccgcg

SEQ ID NO: 32529 - RNA, 23 nt, Artificial Sequence
  Synthetic
gccgacgccgaccgcgcccgcgc

SEQ ID NO: 32530 - RNA, 23 nt, Artificial Sequence
  Synthetic
ccgacgccgaccgcgcccgcgcg

SEQ ID NO: 32531 - RNA, 23 nt, Artificial Sequence
  Synthetic
cgacgccgaccgcgcccgcgcgg

SEQ ID NO: 32532 - RNA, 23 nt, Artificial Sequence
  Synthetic
gacgccgaccgcgcccgcgcggg

SEQ ID NO: 32533 - RNA, 23 nt, Artificial Sequence
  Synthetic
acgccgaccgcgcccgcgcgggg

SEQ ID NO: 32534 - RNA, 23 nt, Artificial Sequence
  Synthetic
cgccgaccgcgcccgcgcggggc

SEQ ID NO: 32535 - RNA, 23 nt, Artificial Sequence
  Synthetic
gccgaccgcgcccgcgcggggcu

SEQ ID NO: 32536 - RNA, 23 nt, Artificial Sequence
  Synthetic
ccgaccgcgcccgcgcggggcug

SEQ ID NO: 32537 - RNA, 23 nt, Artificial Sequence
  Synthetic
cgaccgcgcccgcgcggggcuga

SEQ ID NO: 32538 - RNA, 23 nt, Artificial Sequence
  Synthetic
gaccgcgcccgcgcggggcugag

SEQ ID NO: 32539 - RNA, 23 nt, Artificial Sequence
  Synthetic
accgcgcccgcgcggggcugagg

SEQ ID NO: 32540 - RNA, 23 nt, Artificial Sequence
  Synthetic
ccgcgcccgcgcggggcugaggc

SEQ ID NO: 32541 - RNA, 23 nt, Artificial Sequence
  Synthetic
cgcgcccgcgcggggcugaggcu

SEQ ID NO: 32542 - RNA, 23 nt, Artificial Sequence
  Synthetic
gcgcccgcgcggggcugaggcug

SEQ ID NO: 32543 - RNA, 23 nt, Artificial Sequence
  Synthetic
cgcccgcgcggggcugaggcugg

SEQ ID NO: 32544 - RNA, 23 nt, Artificial Sequence
  Synthetic
gcccgcgcggggcugaggcugga

SEQ ID NO: 32545 - RNA, 23 nt, Artificial Sequence
  Synthetic
cccgcgcggggcugaggcuggau

SEQ ID NO: 32546 - RNA, 23 nt, Artificial Sequence
  Synthetic
ccgcgcggggcugaggcuggauu

SEQ ID NO: 32547 - RNA, 23 nt, Artificial Sequence
  Synthetic
cgcgcggggcugaggcuggauuc

SEQ ID NO: 32548 - RNA, 23 nt, Artificial Sequence
  Synthetic
gcgcggggcugaggcuggauucc

SEQ ID NO: 32549 - RNA, 23 nt, Artificial Sequence
  Synthetic
cgcggggcugaggcuggauuccu

SEQ ID NO: 32550 - RNA, 23 nt, Artificial Sequence
  Synthetic
gcggggcugaggcuggauuccuu

SEQ ID NO: 32551 - RNA, 23 nt, Artificial Sequence
  Synthetic
cggggcugaggcuggauuccuuu

SEQ ID NO: 32552 - RNA, 23 nt, Artificial Sequence
  Synthetic
ggggcugaggcuggauuccuuuc

SEQ ID NO: 32553 - RNA, 23 nt, Artificial Sequence
  Synthetic
gggcugaggcuggauuccuuucc

SEQ ID NO: 32554 - RNA, 23 nt, Artificial Sequence
  Synthetic
ggcugaggcuggauuccuuuccc

SEQ ID NO: 32555 - RNA, 23 nt, Artificial Sequence
  Synthetic
gcugaggcuggauuccuuuccca

SEQ ID NO: 32556 - RNA, 23 nt, Artificial Sequence
  Synthetic
cugaggcuggauuccuuucccac

SEQ ID NO: 32557 - RNA, 23 nt, Artificial Sequence
  Synthetic
ugaggcuggauuccuuucccacu

SEQ ID NO: 32558 - RNA, 23 nt, Artificial Sequence
  Synthetic
gaggcuggauuccuuucccacua

SEQ ID NO: 32559 - RNA, 23 nt, Artificial Sequence
  Synthetic
aggcuggauuccuuucccacuaa

SEQ ID NO: 32560 - RNA, 23 nt, Artificial Sequence
  Synthetic
ggcuggauuccuuucccacuaau

SEQ ID NO: 32561 - RNA, 23 nt, Artificial Sequence
  Synthetic
gcuggauuccuuucccacuaaua

SEQ ID NO: 32562 - RNA, 23 nt, Artificial Sequence
  Synthetic
cuggauuccuuucccacuaauag

SEQ ID NO: 32563 - RNA, 23 nt, Artificial Sequence
  Synthetic
uggauuccuuucccacuaauaga

SEQ ID NO: 32564 - RNA, 23 nt, Artificial Sequence
  Synthetic
ggauuccuuucccacuaauagag

SEQ ID NO: 32565 - RNA, 23 nt, Artificial Sequence
  Synthetic
gauuccuuucccacuaauagagg

SEQ ID NO: 32566 - RNA, 23 nt, Artificial Sequence
  Synthetic
auuccuuucccacuaauagaggg

SEQ ID NO: 32567 - RNA, 23 nt, Artificial Sequence
  Synthetic
uuccuuucccacuaauagagggc

SEQ ID NO: 32568 - RNA, 23 nt, Artificial Sequence
  Synthetic
uccuuucccacuaauagagggca

SEQ ID NO: 32569 - RNA, 23 nt, Artificial Sequence
  Synthetic
ccuuucccacuaauagagggcag

SEQ ID NO: 32570 - RNA, 23 nt, Artificial Sequence
  Synthetic
cuuucccacuaauagagggcagc

SEQ ID NO: 32571 - RNA, 23 nt, Artificial Sequence
  Synthetic
uuucccacuaauagagggcagcg

SEQ ID NO: 32572 - RNA, 23 nt, Artificial Sequence
  Synthetic
uucccacuaauagagggcagcgg

SEQ ID NO: 32573 - RNA, 23 nt, Artificial Sequence
  Synthetic
ucccacuaauagagggcagcggg

SEQ ID NO: 32574 - RNA, 23 nt, Artificial Sequence
  Synthetic
cccacuaauagagggcagcgggc

SEQ ID NO: 32575 - RNA, 23 nt, Artificial Sequence
  Synthetic
ccacuaauagagggcagcgggcg

SEQ ID NO: 32576 - RNA, 23 nt, Artificial Sequence
  Synthetic
cacuaauagagggcagcgggcgc

SEQ ID NO: 32577 - RNA, 23 nt, Artificial Sequence
  Synthetic
acuaauagagggcagcgggcgcu

SEQ ID NO: 32578 - RNA, 23 nt, Artificial Sequence
  Synthetic
cuaauagagggcagcgggcgcuu

SEQ ID NO: 32579 - RNA, 23 nt, Artificial Sequence
  Synthetic
uaauagagggcagcgggcgcuug

SEQ ID NO: 32580 - RNA, 23 nt, Artificial Sequence
  Synthetic
aauagagggcagcgggcgcuuga

SEQ ID NO: 32581 - RNA, 23 nt, Artificial Sequence
  Synthetic
auagagggcagcgggcgcuugag

SEQ ID NO: 32582 - RNA, 23 nt, Artificial Sequence
  Synthetic
uagagggcagcgggcgcuugagc

SEQ ID NO: 32583 - RNA, 23 nt, Artificial Sequence
  Synthetic
agagggcagcgggcgcuugagcg

SEQ ID NO: 32584 - RNA, 23 nt, Artificial Sequence
  Synthetic
gagggcagcgggcgcuugagcgc

SEQ ID NO: 32585 - RNA, 23 nt, Artificial Sequence
  Synthetic
agggcagcgggcgcuugagcgcu

SEQ ID NO: 32586 - RNA, 23 nt, Artificial Sequence
  Synthetic
gggcagcgggcgcuugagcgcug

SEQ ID NO: 32587 - RNA, 23 nt, Artificial Sequence
  Synthetic
ggcagcgggcgcuugagcgcugg

SEQ ID NO: 32588 - RNA, 23 nt, Artificial Sequence
  Synthetic
gcagcgggcgcuugagcgcugga

SEQ ID NO: 32589 - RNA, 23 nt, Artificial Sequence
  Synthetic
cagcgggcgcuugagcgcuggaa

SEQ ID NO: 32590 - RNA, 23 nt, Artificial Sequence
  Synthetic
agcgggcgcuugagcgcuggaag

SEQ ID NO: 32591 - RNA, 23 nt, Artificial Sequence
  Synthetic
gcgggcgcuugagcgcuggaaga

SEQ ID NO: 32592 - RNA, 23 nt, Artificial Sequence
  Synthetic
cgggcgcuugagcgcuggaagaa

SEQ ID NO: 32593 - RNA, 23 nt, Artificial Sequence
  Synthetic
gggcgcuugagcgcuggaagaag

SEQ ID NO: 32594 - RNA, 23 nt, Artificial Sequence
  Synthetic
ggcgcuugagcgcuggaagaagu

SEQ ID NO: 32595 - RNA, 23 nt, Artificial Sequence
  Synthetic
gcgcuugagcgcuggaagaaguc

SEQ ID NO: 32596 - RNA, 23 nt, Artificial Sequence
  Synthetic
cgcuugagcgcuggaagaagucc

SEQ ID NO: 32597 - RNA, 23 nt, Artificial Sequence
  Synthetic
gcuugagcgcuggaagaaguccc

SEQ ID NO: 32598 - RNA, 23 nt, Artificial Sequence
  Synthetic
cuugagcgcuggaagaagucccu

SEQ ID NO: 32599 - RNA, 23 nt, Artificial Sequence
  Synthetic
uugagcgcuggaagaagucccuc

SEQ ID NO: 32600 - RNA, 23 nt, Artificial Sequence
  Synthetic
ugagcgcuggaagaagucccucu

SEQ ID NO: 32601 - RNA, 23 nt, Artificial Sequence
  Synthetic
gagcgcuggaagaagucccucuc

SEQ ID NO: 32602 - RNA, 23 nt, Artificial Sequence
  Synthetic
agcgcuggaagaagucccucucc

SEQ ID NO: 32603 - RNA, 23 nt, Artificial Sequence
  Synthetic
gcgcuggaagaagucccucuccu

SEQ ID NO: 32604 - RNA, 23 nt, Artificial Sequence
  Synthetic
cgcuggaagaagucccucuccuc

SEQ ID NO: 32605 - RNA, 23 nt, Artificial Sequence
  Synthetic
gcuggaagaagucccucuccucu

SEQ ID NO: 32606 - RNA, 23 nt, Artificial Sequence
  Synthetic
cuggaagaagucccucuccucuc

SEQ ID NO: 32607 - RNA, 23 nt, Artificial Sequence
  Synthetic
uggaagaagucccucuccucucg

SEQ ID NO: 32608 - RNA, 23 nt, Artificial Sequence
  Synthetic
ggaagaagucccucuccucucgg

SEQ ID NO: 32609 - RNA, 23 nt, Artificial Sequence
  Synthetic
gaagaagucccucuccucucggg

SEQ ID NO: 32610 - RNA, 23 nt, Artificial Sequence
  Synthetic
aagaagucccucuccucucgggu

SEQ ID NO: 32611 - RNA, 23 nt, Artificial Sequence
  Synthetic
agaagucccucuccucucggguc

SEQ ID NO: 32612 - RNA, 23 nt, Artificial Sequence
  Synthetic
gaagucccucuccucucgggucc

SEQ ID NO: 32613 - RNA, 23 nt, Artificial Sequence
  Synthetic
aagucccucuccucucggguccu

SEQ ID NO: 32614 - RNA, 23 nt, Artificial Sequence
  Synthetic
agucccucuccucucggguccug

SEQ ID NO: 32615 - RNA, 23 nt, Artificial Sequence
  Synthetic
gucccucuccucucggguccugg

SEQ ID NO: 32616 - RNA, 23 nt, Artificial Sequence
  Synthetic
ucccucuccucucggguccugga

SEQ ID NO: 32617 - RNA, 23 nt, Artificial Sequence
  Synthetic
cccucuccucucggguccuggag

SEQ ID NO: 32618 - RNA, 23 nt, Artificial Sequence
  Synthetic
ccucuccucucggguccuggagc

SEQ ID NO: 32619 - RNA, 23 nt, Artificial Sequence
  Synthetic
cucuccucucggguccuggagcc

SEQ ID NO: 32620 - RNA, 23 nt, Artificial Sequence
  Synthetic
ucuccucucggguccuggagccc

SEQ ID NO: 32621 - RNA, 23 nt, Artificial Sequence
  Synthetic
cuccucucggguccuggagcccc

SEQ ID NO: 32622 - RNA, 23 nt, Artificial Sequence
  Synthetic
uccucucggguccuggagccccu

SEQ ID NO: 32623 - RNA, 23 nt, Artificial Sequence
  Synthetic
ccucucggguccuggagccccug

SEQ ID NO: 32624 - RNA, 23 nt, Artificial Sequence
  Synthetic
cucucggguccuggagccccugc

SEQ ID NO: 32625 - RNA, 23 nt, Artificial Sequence
  Synthetic
ucucggguccuggagccccugcc

SEQ ID NO: 32626 - RNA, 23 nt, Artificial Sequence
  Synthetic
cucggguccuggagccccugccc

SEQ ID NO: 32627 - RNA, 23 nt, Artificial Sequence
  Synthetic
ucggguccuggagccccugcccu

SEQ ID NO: 32628 - RNA, 23 nt, Artificial Sequence
  Synthetic
cggguccuggagccccugcccug

SEQ ID NO: 32629 - RNA, 23 nt, Artificial Sequence
  Synthetic
ggguccuggagccccugcccugu

SEQ ID NO: 32630 - RNA, 23 nt, Artificial Sequence
  Synthetic
gguccuggagccccugcccuguc

SEQ ID NO: 32631 - RNA, 23 nt, Artificial Sequence
  Synthetic
guccuggagccccugcccugucc

SEQ ID NO: 32632 - RNA, 23 nt, Artificial Sequence
  Synthetic
uccuggagccccugcccuguccu

SEQ ID NO: 32633 - RNA, 23 nt, Artificial Sequence
  Synthetic
ccuggagccccugcccuguccug

SEQ ID NO: 32634 - RNA, 23 nt, Artificial Sequence
  Synthetic
cuggagccccugcccuguccugg

SEQ ID NO: 32635 - RNA, 23 nt, Artificial Sequence
  Synthetic
uggagccccugcccuguccuggc

SEQ ID NO: 32636 - RNA, 23 nt, Artificial Sequence
  Synthetic
ggagccccugcccuguccuggcg

SEQ ID NO: 32637 - RNA, 23 nt, Artificial Sequence
  Synthetic
gagccccugcccuguccuggcgu

SEQ ID NO: 32638 - RNA, 23 nt, Artificial Sequence
  Synthetic
agccccugcccuguccuggcguc

SEQ ID NO: 32639 - RNA, 23 nt, Artificial Sequence
  Synthetic
gccccugcccuguccuggcgucu

SEQ ID NO: 32640 - RNA, 23 nt, Artificial Sequence
  Synthetic
ccccugcccuguccuggcgucuu

SEQ ID NO: 32641 - RNA, 23 nt, Artificial Sequence
  Synthetic
cccugcccuguccuggcgucuua

SEQ ID NO: 32642 - RNA, 23 nt, Artificial Sequence
  Synthetic
ccugcccuguccuggcgucuuag

SEQ ID NO: 32643 - RNA, 23 nt, Artificial Sequence
  Synthetic
cugcccuguccuggcgucuuagc

SEQ ID NO: 32644 - RNA, 23 nt, Artificial Sequence
  Synthetic
ugcccuguccuggcgucuuagcc

SEQ ID NO: 32645 - RNA, 23 nt, Artificial Sequence
  Synthetic
gcccuguccuggcgucuuagccg

SEQ ID NO: 32646 - RNA, 23 nt, Artificial Sequence
  Synthetic
cccuguccuggcgucuuagccgg

SEQ ID NO: 32647 - RNA, 23 nt, Artificial Sequence
  Synthetic
ccuguccuggcgucuuagccgga

SEQ ID NO: 32648 - RNA, 23 nt, Artificial Sequence
  Synthetic
cuguccuggcgucuuagccggac

SEQ ID NO: 32649 - RNA, 23 nt, Artificial Sequence
  Synthetic
uguccuggcgucuuagccggaca

SEQ ID NO: 32650 - RNA, 23 nt, Artificial Sequence
  Synthetic
guccuggcgucuuagccggacac

SEQ ID NO: 32651 - RNA, 23 nt, Artificial Sequence
  Synthetic
uccuggcgucuuagccggacaca

SEQ ID NO: 32652 - RNA, 23 nt, Artificial Sequence
  Synthetic
ccuggcgucuuagccggacacac

SEQ ID NO: 32653 - RNA, 23 nt, Artificial Sequence
  Synthetic
cuggcgucuuagccggacacacc

SEQ ID NO: 32654 - RNA, 23 nt, Artificial Sequence
  Synthetic
uggcgucuuagccggacacaccu

SEQ ID NO: 32655 - RNA, 23 nt, Artificial Sequence
  Synthetic
ggcgucuuagccggacacaccug

SEQ ID NO: 32656 - RNA, 23 nt, Artificial Sequence
  Synthetic
gcgucuuagccggacacaccugc

SEQ ID NO: 32657 - RNA, 23 nt, Artificial Sequence
  Synthetic
cgucuuagccggacacaccugcc

SEQ ID NO: 32658 - RNA, 23 nt, Artificial Sequence
  Synthetic
gucuuagccggacacaccugccc

SEQ ID NO: 32659 - RNA, 23 nt, Artificial Sequence
  Synthetic
ucuuagccggacacaccugcccc

SEQ ID NO: 32660 - RNA, 23 nt, Artificial Sequence
  Synthetic
cuuagccggacacaccugccccg

SEQ ID NO: 32661 - RNA, 23 nt, Artificial Sequence
  Synthetic
uuagccggacacaccugccccgc

SEQ ID NO: 32662 - RNA, 23 nt, Artificial Sequence
  Synthetic
uagccggacacaccugccccgcg

SEQ ID NO: 32663 - RNA, 23 nt, Artificial Sequence
  Synthetic
agccggacacaccugccccgcgc

SEQ ID NO: 32664 - RNA, 23 nt, Artificial Sequence
  Synthetic
gccggacacaccugccccgcgcc

SEQ ID NO: 32665 - RNA, 23 nt, Artificial Sequence
  Synthetic
ccggacacaccugccccgcgccg

SEQ ID NO: 32666 - RNA, 23 nt, Artificial Sequence
  Synthetic
cggacacaccugccccgcgccgg

SEQ ID NO: 32667 - RNA, 23 nt, Artificial Sequence
  Synthetic
ggacacaccugccccgcgccggu

SEQ ID NO: 32668 - RNA, 23 nt, Artificial Sequence
  Synthetic
gacacaccugccccgcgccgguc

SEQ ID NO: 32669 - RNA, 23 nt, Artificial Sequence
  Synthetic
acacaccugccccgcgccggucc

SEQ ID NO: 32670 - RNA, 23 nt, Artificial Sequence
  Synthetic
cacaccugccccgcgccgguccc

SEQ ID NO: 32671 - RNA, 23 nt, Artificial Sequence
  Synthetic
acaccugccccgcgccggucccc

SEQ ID NO: 32672 - RNA, 23 nt, Artificial Sequence
  Synthetic
caccugccccgcgccgguccccg

SEQ ID NO: 32673 - RNA, 23 nt, Artificial Sequence
  Synthetic
accugccccgcgccgguccccgc

SEQ ID NO: 32674 - RNA, 23 nt, Artificial Sequence
  Synthetic
ccugccccgcgccgguccccgcu

SEQ ID NO: 32675 - RNA, 23 nt, Artificial Sequence
  Synthetic
cugccccgcgccgguccccgcua

SEQ ID NO: 32676 - RNA, 23 nt, Artificial Sequence
  Synthetic
ugccccgcgccgguccccgcuau

SEQ ID NO: 32677 - RNA, 23 nt, Artificial Sequence
  Synthetic
gccccgcgccgguccccgcuauu

SEQ ID NO: 32678 - RNA, 23 nt, Artificial Sequence
  Synthetic
ccccgcgccgguccccgcuauua

SEQ ID NO: 32679 - RNA, 23 nt, Artificial Sequence
  Synthetic
cccgcgccgguccccgcuauuac

SEQ ID NO: 32680 - RNA, 23 nt, Artificial Sequence
  Synthetic
ccgcgccgguccccgcuauuacu

SEQ ID NO: 32681 - RNA, 23 nt, Artificial Sequence
  Synthetic
cgcgccgguccccgcuauuacug

SEQ ID NO: 32682 - RNA, 23 nt, Artificial Sequence
  Synthetic
gcgccgguccccgcuauuacugu

SEQ ID NO: 32683 - RNA, 23 nt, Artificial Sequence
  Synthetic
cgccgguccccgcuauuacuguc

SEQ ID NO: 32684 - RNA, 23 nt, Artificial Sequence
  Synthetic
gccgguccccgcuauuacugucu

SEQ ID NO: 32685 - RNA, 23 nt, Artificial Sequence
  Synthetic
ccgguccccgcuauuacugucug

SEQ ID NO: 32686 - RNA, 23 nt, Artificial Sequence
  Synthetic
cgguccccgcuauuacugucugc

SEQ ID NO: 32687 - RNA, 23 nt, Artificial Sequence
  Synthetic
gguccccgcuauuacugucugca

SEQ ID NO: 32688 - RNA, 23 nt, Artificial Sequence
  Synthetic
guccccgcuauuacugucugcac

SEQ ID NO: 32689 - RNA, 23 nt, Artificial Sequence
  Synthetic
uccccgcuauuacugucugcacc

SEQ ID NO: 32690 - RNA, 23 nt, Artificial Sequence
  Synthetic
ccccgcuauuacugucugcaccu

SEQ ID NO: 32691 - RNA, 23 nt, Artificial Sequence
  Synthetic
cccgcuauuacugucugcaccua

SEQ ID NO: 32692 - RNA, 23 nt, Artificial Sequence
  Synthetic
ccgcuauuacugucugcaccuac

SEQ ID NO: 32693 - RNA, 23 nt, Artificial Sequence
  Synthetic
cgcuauuacugucugcaccuacg

SEQ ID NO: 32694 - RNA, 23 nt, Artificial Sequence
  Synthetic
gcuauuacugucugcaccuacga

SEQ ID NO: 32695 - RNA, 23 nt, Artificial Sequence
  Synthetic
cuauuacugucugcaccuacgaa

SEQ ID NO: 32696 - RNA, 23 nt, Artificial Sequence
  Synthetic
uauuacugucugcaccuacgaag

SEQ ID NO: 32697 - RNA, 23 nt, Artificial Sequence
  Synthetic
auuacugucugcaccuacgaagc

SEQ ID NO: 32698 - RNA, 23 nt, Artificial Sequence
  Synthetic
uuacugucugcaccuacgaagca

SEQ ID NO: 32699 - RNA, 23 nt, Artificial Sequence
  Synthetic
uacugucugcaccuacgaagcau

SEQ ID NO: 32700 - RNA, 23 nt, Artificial Sequence
  Synthetic
acugucugcaccuacgaagcaug

SEQ ID NO: 32701 - RNA, 23 nt, Artificial Sequence
  Synthetic
cugucugcaccuacgaagcaugc

SEQ ID NO: 32702 - RNA, 23 nt, Artificial Sequence
  Synthetic
ugucugcaccuacgaagcaugcc

SEQ ID NO: 32703 - RNA, 23 nt, Artificial Sequence
  Synthetic
gucugcaccuacgaagcaugcca

SEQ ID NO: 32704 - RNA, 23 nt, Artificial Sequence
  Synthetic
ucugcaccuacgaagcaugccag

SEQ ID NO: 32705 - RNA, 23 nt, Artificial Sequence
  Synthetic
cugcaccuacgaagcaugccagc

SEQ ID NO: 32706 - RNA, 23 nt, Artificial Sequence
  Synthetic
ugcaccuacgaagcaugccagcu

SEQ ID NO: 32707 - RNA, 23 nt, Artificial Sequence
  Synthetic
gcaccuacgaagcaugccagcuu

SEQ ID NO: 32708 - RNA, 23 nt, Artificial Sequence
  Synthetic
caccuacgaagcaugccagcuuc

SEQ ID NO: 32709 - RNA, 23 nt, Artificial Sequence
  Synthetic
accuacgaagcaugccagcuucc

SEQ ID NO: 32710 - RNA, 23 nt, Artificial Sequence
  Synthetic
ccuacgaagcaugccagcuuccu

SEQ ID NO: 32711 - RNA, 23 nt, Artificial Sequence
  Synthetic
cuacgaagcaugccagcuuccua

SEQ ID NO: 32712 - RNA, 23 nt, Artificial Sequence
  Synthetic
uacgaagcaugccagcuuccuag

SEQ ID NO: 32713 - RNA, 23 nt, Artificial Sequence
  Synthetic
acgaagcaugccagcuuccuagg

SEQ ID NO: 32714 - RNA, 23 nt, Artificial Sequence
  Synthetic
cgaagcaugccagcuuccuagga

SEQ ID NO: 32715 - RNA, 23 nt, Artificial Sequence
  Synthetic
gaagcaugccagcuuccuaggau

SEQ ID NO: 32716 - RNA, 23 nt, Artificial Sequence
  Synthetic
aagcaugccagcuuccuaggauu

SEQ ID NO: 32717 - RNA, 23 nt, Artificial Sequence
  Synthetic
agcaugccagcuuccuaggauug

SEQ ID NO: 32718 - RNA, 23 nt, Artificial Sequence
  Synthetic
gcaugccagcuuccuaggauugg

SEQ ID NO: 32719 - RNA, 23 nt, Artificial Sequence
  Synthetic
caugccagcuuccuaggauuggc

SEQ ID NO: 32720 - RNA, 23 nt, Artificial Sequence
  Synthetic
augccagcuuccuaggauuggcg

SEQ ID NO: 32721 - RNA, 23 nt, Artificial Sequence
  Synthetic
ugccagcuuccuaggauuggcgg

SEQ ID NO: 32722 - RNA, 23 nt, Artificial Sequence
  Synthetic
gccagcuuccuaggauuggcggg

SEQ ID NO: 32723 - RNA, 23 nt, Artificial Sequence
  Synthetic
ccagcuuccuaggauuggcgggg

SEQ ID NO: 32724 - RNA, 23 nt, Artificial Sequence
  Synthetic
cagcuuccuaggauuggcgggga

SEQ ID NO: 32725 - RNA, 23 nt, Artificial Sequence
  Synthetic
agcuuccuaggauuggcggggau

SEQ ID NO: 32726 - RNA, 23 nt, Artificial Sequence
  Synthetic
gcuuccuaggauuggcggggauu

SEQ ID NO: 32727 - RNA, 23 nt, Artificial Sequence
  Synthetic
cuuccuaggauuggcggggauug

SEQ ID NO: 32728 - RNA, 23 nt, Artificial Sequence
  Synthetic
uuccuaggauuggcggggauuga

SEQ ID NO: 32729 - RNA, 23 nt, Artificial Sequence
  Synthetic
uccuaggauuggcggggauugau

SEQ ID NO: 32730 - RNA, 23 nt, Artificial Sequence
  Synthetic
ccuaggauuggcggggauugauc

SEQ ID NO: 32731 - RNA, 23 nt, Artificial Sequence
  Synthetic
cuaggauuggcggggauugaucu

SEQ ID NO: 32732 - RNA, 23 nt, Artificial Sequence
  Synthetic
uaggauuggcggggauugaucua

SEQ ID NO: 32733 - RNA, 23 nt, Artificial Sequence
  Synthetic
aggauuggcggggauugaucuag

SEQ ID NO: 32734 - RNA, 23 nt, Artificial Sequence
  Synthetic
ggauuggcggggauugaucuagc

SEQ ID NO: 32735 - RNA, 23 nt, Artificial Sequence
  Synthetic
gauuggcggggauugaucuagcg

SEQ ID NO: 32736 - RNA, 23 nt, Artificial Sequence
  Synthetic
auuggcggggauugaucuagcgg

SEQ ID NO: 32737 - RNA, 23 nt, Artificial Sequence
  Synthetic
uuggcggggauugaucuagcggg

SEQ ID NO: 32738 - RNA, 23 nt, Artificial Sequence
  Synthetic
uggcggggauugaucuagcgggc

SEQ ID NO: 32739 - RNA, 23 nt, Artificial Sequence
  Synthetic
ggcggggauugaucuagcgggcu

SEQ ID NO: 32740 - RNA, 23 nt, Artificial Sequence
  Synthetic
gcggggauugaucuagcgggcuc

SEQ ID NO: 32741 - RNA, 23 nt, Artificial Sequence
  Synthetic
cggggauugaucuagcgggcucc

SEQ ID NO: 32742 - RNA, 23 nt, Artificial Sequence
  Synthetic
ggggauugaucuagcgggcuccu

SEQ ID NO: 32743 - RNA, 23 nt, Artificial Sequence
  Synthetic
gggauugaucuagcgggcuccuc

SEQ ID NO: 32744 - RNA, 23 nt, Artificial Sequence
  Synthetic
ggauugaucuagcgggcuccucu

SEQ ID NO: 32745 - RNA, 23 nt, Artificial Sequence
  Synthetic
gauugaucuagcgggcuccucuu

SEQ ID NO: 32746 - RNA, 23 nt, Artificial Sequence
  Synthetic
auugaucuagcgggcuccucuug

SEQ ID NO: 32747 - RNA, 23 nt, Artificial Sequence
  Synthetic
uugaucuagcgggcuccucuugg

SEQ ID NO: 32748 - RNA, 23 nt, Artificial Sequence
  Synthetic
ugaucuagcgggcuccucuuggg

SEQ ID NO: 32749 - RNA, 23 nt, Artificial Sequence
  Synthetic
gaucuagcgggcuccucuugggu

SEQ ID NO: 32750 - RNA, 23 nt, Artificial Sequence
  Synthetic
aucuagcgggcuccucuugggug

SEQ ID NO: 32751 - RNA, 23 nt, Artificial Sequence
  Synthetic
ucuagcgggcuccucuugggugc

SEQ ID NO: 32752 - RNA, 23 nt, Artificial Sequence
  Synthetic
cuagcgggcuccucuugggugcg

SEQ ID NO: 32753 - RNA, 23 nt, Artificial Sequence
  Synthetic
uagcgggcuccucuugggugcga

SEQ ID NO: 32754 - RNA, 23 nt, Artificial Sequence
  Synthetic
agcgggcuccucuugggugcgaa

SEQ ID NO: 32755 - RNA, 23 nt, Artificial Sequence
  Synthetic
gcgggcuccucuugggugcgaau

SEQ ID NO: 32756 - RNA, 23 nt, Artificial Sequence
  Synthetic
cgggcuccucuugggugcgaauu

SEQ ID NO: 32757 - RNA, 23 nt, Artificial Sequence
  Synthetic
gggcuccucuugggugcgaauua

SEQ ID NO: 32758 - RNA, 23 nt, Artificial Sequence
  Synthetic
ggcuccucuugggugcgaauuag

SEQ ID NO: 32759 - RNA, 23 nt, Artificial Sequence
  Synthetic
gcuccucuugggugcgaauuagg

SEQ ID NO: 32760 - RNA, 23 nt, Artificial Sequence
  Synthetic
cuccucuugggugcgaauuaggg

SEQ ID NO: 32761 - RNA, 23 nt, Artificial Sequence
  Synthetic
uccucuugggugcgaauuagggg

SEQ ID NO: 32762 - RNA, 23 nt, Artificial Sequence
  Synthetic
ccucuugggugcgaauuagggga

SEQ ID NO: 32763 - RNA, 23 nt, Artificial Sequence
  Synthetic
cucuugggugcgaauuaggggaa

SEQ ID NO: 32764 - RNA, 23 nt, Artificial Sequence
  Synthetic
ucuugggugcgaauuaggggaag

SEQ ID NO: 32765 - RNA, 23 nt, Artificial Sequence
  Synthetic
cuugggugcgaauuaggggaaga

SEQ ID NO: 32766 - RNA, 23 nt, Artificial Sequence
  Synthetic
uugggugcgaauuaggggaagaa

SEQ ID NO: 32767 - RNA, 23 nt, Artificial Sequence
  Synthetic
ugggugcgaauuaggggaagaaa

SEQ ID NO: 32768 - RNA, 23 nt, Artificial Sequence
  Synthetic
gggugcgaauuaggggaagaaaa

SEQ ID NO: 32769 - RNA, 23 nt, Artificial Sequence
  Synthetic
ggugcgaauuaggggaagaaaag

SEQ ID NO: 32770 - RNA, 23 nt, Artificial Sequence
  Synthetic
gugcgaauuaggggaagaaaagu

SEQ ID NO: 32771 - RNA, 23 nt, Artificial Sequence
  Synthetic
ugcgaauuaggggaagaaaaguc

SEQ ID NO: 32772 - RNA, 23 nt, Artificial Sequence
  Synthetic
gcgaauuaggggaagaaaagucc

SEQ ID NO: 32773 - RNA, 23 nt, Artificial Sequence
  Synthetic
cgaauuaggggaagaaaaguccg

SEQ ID NO: 32774 - RNA, 23 nt, Artificial Sequence
  Synthetic
gaauuaggggaagaaaaguccgg

SEQ ID NO: 32775 - RNA, 23 nt, Artificial Sequence
  Synthetic
aauuaggggaagaaaaguccggc

SEQ ID NO: 32776 - RNA, 23 nt, Artificial Sequence
  Synthetic
auuaggggaagaaaaguccggcc

SEQ ID NO: 32777 - RNA, 23 nt, Artificial Sequence
  Synthetic
uuaggggaagaaaaguccggccg

SEQ ID NO: 32778 - RNA, 23 nt, Artificial Sequence
  Synthetic
uaggggaagaaaaguccggccga

1. A nucleic acid comprising:
(a) a template nucleic acid set forth in any one of SEQ ID NOs: 1-8;
(b) a nucleic acid encoding a PMP22 artificial inhibitory RNA at least 70%, 75%, 80%, 81%, 82%, 83%, 84%, 85%, 86%, 87%, 88%, 89%, 90%, 91%, 92%, 93%, 94%, 95%, 96%, 97%, 98%, or 99% identical to the polynucleotide sequence set forth in any one of SEQ ID NOs: 9-16,
(c) a nucleic acid encoding a PMP22 artificial inhibitory RNA set forth in any one of SEQ ID NOs: 9-16;
(d) a nucleic acid encoding a PMP22 antisense guide strand at least 70%, 75%, 80%, 81%, 82%, 83%, 84%, 85%, 86%, 87%, 88%, 89%, 90%, 91%, 92%, 93%, 94%, 95%, 96%, 97%, 98%, or 99% identical to the polynucleotide sequence set forth in any one of SEQ ID NOs: 17-24; or
(e) a nucleic acid encoding a PMP22 antisense guide strand set forth in any one of SEQ ID NOs: 17-24.

2. A viral vector comprising the nucleic acid of claim 1 or a combination of any one or more thereof.

3. The viral vector of claim 2, wherein the viral vector is an adeno-associated virus (AAV), adenovirus, lentivirus, retrovirus, poxvirus, baculovirus, herpes simplex virus, vaccinia virus, or a synthetic virus.

4. The viral vector of claim 3, wherein the viral vector is an AAV.

5. The viral vector of claim 4, wherein the AAV lacks rep and cap genes.

6. The viral vector of claim 4, wherein the AAV is a recombinant AAV (rAAV) or a self-complementary recombinant AAV (scAAV).

7. The viral vector of claim 4, wherein the AAV has a capsid serotype of: AAV-1, AAV-2, AAV-3, AAV-4, AAV-5, AAV-6, AAV-7, AAV-8, AAV-9, AAV-10, AAV-11, AAV-12, AAV-13, AAV-anc80, orAAV rh.74.

8. The viral vector of claim 4, wherein the AAV has a capsid serotype of AAV-9.

9. The viral vector of claim 4, wherein the AAV is a pseudotyped AAV.

10. The viral vector of claim 9, wherein the AAV is AAV2/8 or AAV2/9.

11. The viral vector of claim 4, wherein expression of the nucleic acid encoding the PMP22 artificial inhibitory RNA is under the control of a U6 promoter.

12. A composition comprising the nucleic acid of claim 1 and a pharmaceutically acceptable carrier.

13. A composition comprising the viral vector of claim 4 and a pharmaceutically acceptable carrier.

14. A composition comprising a delivery vehicle capable of delivering agents to a Schwann cell and a nucleic acid encoding an artificial inhibitory RNA, wherein the artificial inhibitory RNA binds a segment of a messenger RNA (mRNA) encoded by a human peripheral myelin protein-22 (PMP22) gene, and, optionally, a pharmaceutically acceptable carrier.

15. The composition of claim 14, wherein the human PMP22 gene comprises the sequence of SEQ ID NO: 25, or a variant thereof at least 70%, 75%, 80%, 81%, 82%, 83%, 84%, 85%, 86%, 87%, 88%, 89%, 90%, 91%, 92%, 93%, 94%, 95%, 96%, 97%, 98%, or 99%, identical to the sequence of SEQ ID NO: 25.

16. The composition of claim 14, wherein the mRNA segment is complementary to a sequence within nucleotides 1 to 2423 of SEQ ID NO: 25.

17. The composition of claim 16, wherein the mRNA segment is complementary to a sequence within nucleotides 1412-1433 or 1415-1436 of SEQ ID NO: 25.

18. The composition of claim 14, wherein the delivery vehicle is a viral vector.

19. The composition of claim 18, wherein the viral vector is an adeno-associated virus (AAV), adenovirus, lentivirus, retrovirus, poxvirus, baculovirus, herpes simplex virus, vaccinia virus, or a synthetic virus.

20. The composition of claim 19, wherein the viral vector is an AAV.

21. The composition of claim 20, wherein the AAV lacks rep and cap genes.

22. The composition of claim 20, wherein the AAV is a recombinant AAV (rAAV), a recombinant single-stranded AAV (ssAAV), or a self-complementary recombinant AAV (scAAV).

23. The composition of claim 20, wherein the AAV has a capsid serotype selected from the group consisting of: AAV-1, AAV-2, AAV-3, AAV-4, AAV-5, AAV-6, AAV-7, AAV-8, AAV-9, AAV-10, AAV-11, AAV-12, AAV-13, AAV-anc80, and AAV rh.74.

24. The composition of claim 20, wherein the AAV has a capsid serotype of AAV-9.

25. The composition of claim 20, wherein the AAV is a pseudotyped AAV.

26. The composition of claim 25, wherein the AAV is AAV2/8 or AAV2/9.

27. The composition of claim 14, wherein expression of the nucleic acid encoding the PMP22 artificial inhibitory RNA is under the control of a U6 promoter.

28. A method of delivery to a Schwann cell with a duplicated peripheral myelin protein-22 (PMP22) gene, the method comprising administering to a subject with the Schwann cell
the nucleic acid of claim 1.

29. A method of treating a subject suffering from overexpression of a peripheral myelin protein-22 (PMP22) gene, the method comprising administering to the subject
the nucleic acid of claim 1.

30. The method of claim 29 wherein the subject suffers from Charcot-Marie-Tooth Disease Type 1A (CMT1A).

31. The method of claim 30, wherein the subject is a human subject.
